United States Patent Application Publication US 2008/0114160 A1 - sequence listing, part 74

SEQ ID NO: 27407 - DNA, 2276 bp, Oryza sativa
taattccccaaacattcaggagtcagggattcatccaagacacgcgttaagctcaaaatcaacatccactactaaattcctaatcttctaacgctactacctcagtacactggtacacaagcatcgtacatttcgtactggctgtggctgataagcgcacgtttttttttcaccagtacaagcagggaggcgacgccctgggtcgcttgctgccggcgccccactccgcgttcatctgcggcacccaccgctcgcggctggcccgctcgtcggcggcgacagcgacgccactgtgcagctgctcccggccggcccacgccgcgtaaccgtccggcaccccaccgatctgagccagcagcccaccctgcacgaaggaaagcagcgaaatgccaattgccacatgagtccaagcacaagcttctagcgaccttactgttttgaacatgcagacagagtacgggaaattttcaaatagggaaagcagggaacaatctgctcgtgaggggaggatgaatatgatatgcaggtttacgggaaattattctaaactcttaagaaaatatctttttgttgcttgaggcatatcacttcataaacatgtgaattcaaattcaatttatatattctcataccgaaaaaatatattaaactacagctagctagttaacgtataaatacaattaaatttatttttttcgttacaatatatataaattgaattttaacttgtatgtttatgaagtgatatatcccatattagtacatcttctcaaatttttttataactatttgagcgacatacaaacaatgagtgaacgtccccttcaaagtttaaaatccaccctcatggatttatcgcttagtattttatttttgtggtctccacaggatattatcctgacaccctggtccagcaattacatatattttttgttattgctagctgtgtgagcatgactacaaactacctgcatggtaaaatttgtccgctcacgatattgtgaacagattggcttatgtgcccacgacggccggcagggcctgaacagagtttggcgcgccgtgctttgcctgtgcttcgttcatggtgctcacaagaacgtgtgtggattggtttttcagggtttcatgcatgaaccggactgaatacgtattcaggttttcgttgccatggaaagtttggatcgttaacagtggatgaactgacctgaaatagcccgtctgaggaggaggaggcggcggtggcctcgtcgacgaggaagtcctcgacgtgccaaccgggcagcgtcttggtgaggtactcggagatgctgctcccgtcgctcgcgctccccgcggcggtgccggcgacgctgctggggctgcagctgtagtcctcccctgcttcctcctcctcttcctccgacggcgcgggggagtccatcggcgccgacgagaggcgcacgccggtgaggaggaaccggccgtgccgcctcgtcagctcgctcgtggtgtgcaccgtgacgtcgcactcccggcacaggatcgccctgtcctccttgcagaacaagaaccccctcttctcctgaagtgacgagagtccacacgcttcagagttgcagcaagcaacagaagcaacccgaggaaaaagagcagcagcctctcgccgcgtgcatacctgacagatgtcgcagagcggtggcttctgggcggacgacgacgacgccaacggttggaggagggagaatcggcggtgcttcccggcgagcttgttcgcgctgtggacgcggcggtcgcacgcgtcgcacagcgcggcctcgtcggcgcagcagaagaccgaggcggcctcggccgcgcacacgtcgcactgcaccttcatgtctccccgtccagtccgatcgatcggcagagacagctaacgaagcgggaaagaaagatggtcgcgtctcggccgggaggggatgcagataaggcagaagcgcacaacaagctcaggtcaatgccttgggttagaggactaacgacgatgttgcaaggagaagtagagtggtaggttattaggagtggacgagtggtagttgtagtgcacgagagagtagatgtgtttatatattgggcggcggcagtggcacggccggttttaggccgaggtgaaaggaaaataaagctgaaaaggcggtgtcccctgcaaatcaacctaaccctgatttgtgaaagtcttatgaatcgtgttcgtgctgattgggagatgactatactacatggtagtgatcagggcttgtgagagaagtaacctt

SEQ ID NO: 27408 - DNA, 715 bp, Oryza sativa
ctttaacccgaaaggcattgtcgtataacaataagttcctatgggggtaatgaatgcagttttttcctcatcctccctagccatgcgaatctgatgataaccagagtatgcatctagaaaacacaaaaggtcgcaccccgcggtggagtcgacaatctgatctatgcgtggcagggggtaagggtccttaggacatgccttgttaaggtcggtgtagtcgatgcacatccgaagcttgccgttcgccttgggaacgacgaccgggttcgccagccactccggatggatgacctcttggatgaatctggcctccagaagtcgcgccacctcctcgcggatgaaggcttgacgttccggggcctgccaccgcactttctgccggaccggccttgcgcccggccgtacggcgagacggtgctcaatcacctccctggggaccccggtcatgtccgccggtctccaggcgaagacgtcggcgtttgcccgcaggaaggagacgagcgcgtcttcctatttatcgtccagaagaccaccgattcgtgtggtcttggacgggccgtcgcccagggcaacctgcttgatcgggacctcgtcgcacgtgatcatccgatgcctcggggcggctgggacggaggtgctgagcctctcgtcgccacccgcgggcttggatgccgcggcgaggtggtccgcgcgctgctccatgcaagcaagcgcg

SEQ ID NO: 27409 - DNA, 900 bp, Oryza sativa
gcaggagccaagcaggatttaaaaataattacataagtaagagtcgttatgacctctgcatcatcccaaagtctaagaggagtgttttctgcacttaccacatcccttacaacttcattatatattgctatagctgaaaattgcaagacaaatgctttctcctcatgctgcaaaaagaacaccatgcctatcagcctgacagtacaaatgtgtctcgtttcaacaccagctatggattaataggcactaagagagggggctgattaccttgccaatgtaatcataaatatctgctaccgtatattcagttatgccagtcatggtgtatgtctttccactacttgtttgaccatatgcaaaaatactcgctgttacagaacaaattaaaaggaaataaaatgtgttcagttagtttatgcaatcttcaatcaaaaccaaattggataagataggcaataggtttggacttaacagttaatgccactaactacagagagggcaacctccttggccccttgcttgtatacttcgttcgtatcgcagtcagagcggaataccctatctgcaattggaatagagttgtgtcaaaaaacacagctggaaagtgagaatattaaagagcatacttgtagtacgagcaaactaaactcccacttatctgtattctagtggtgtgtagttgtccactaccaaaaaaaaatgtccaatacatttgtaaatgtaaacattcaatttcaggagggttagcttaatttctaaaggtgttctgtcagattttttttactgggacaggaatgtgtcgatgtgttctgttacttgtaacaaacgacgatgtataagtaaccaattaccagtgattgcactccggcaggtatgttaaattctgagattttacatttt

SEQ ID NO: 27410 - DNA, 655 bp, Oryza sativa
tcaaccctcatcctcctaactaaggggctgtttggttttcagggacttattcacctcagatatttaaacactaatttaaaatattaaacatccactaattacaaaacccatttcataagtttagactaattcgcgagacaaatcttttaagtctaattacaacatgactttgacaatatgatgctatagtaaacttttaataattatggattaattaggcttaaaaaattcgcctcacagataagctctcatttatgaaattaatttttaaattagtctatgtttaatactctaaattaacgtcaaacatccgatgtgacatagactaacaagttttagccccatctaatcaccccctaagcatatcatgctgttacagttgacaccatcacgcgatgtaaccaagggtgcacgcaacacacaccaacctgtcatcgctcacactgctgctgtgctgtgctgcactcttctcctggccttggggaataaaacaaggcgatcggtttgctttcgtcttcctccccttctcgccatgcaaagggcgctttggttcttggtatcttcttccttttgcctcaaaaataatcacaccggcattgatgaaccaagcatatgcaggtactacctgagagaaaaaaaaaactccttcgggtaa

SEQ ID NO: 27411 - DNA, 3319 bp, Oryza sativa
ctgcggcccctcaaatactactgcaaaacattgtagcatattgcattagtagttcaattatagaggatccatatcgggagtagggcatatatgtttgtcggtgacatgggaccggggatatcttgactagaggtttgggcagccgcggtcacccacgtggcctgaccccctcggggggtcgggcccgaggttgatgaggccgcccctccctctatctccccgaggggtcgggccgctcccgtttcgaccccccgggggctggggcgccccgaccccctgagggtttggcgccacgtgtgtgggttaggtgagcacagcggcgctcacctaaccgcgtttattgcgggttggacgagcgcctcacgccgcatttaatgcagcatagcgcatgcttatccggtccgtgatcggtcgcagtgtgtgaccgatcacagaccggtcagatcgcgggttagggggcaacaggcggcttgacacacgcctcgccccgtcccgtcggaatgatgagagcctccaggcactcgtccctagccagagccggcgtgggaactcctagagttggcacgtcagccccggccagatacattccaggcttcatcgcaaccattgcaaggaagtcattgtatgaagaagtgcagacgtgtagcatgctaaactgacacgtggtggacaagaatgaccggtctgtgactggtctgacgccggtcgcgtcatcagcaaacaaccgtgcttccacgttgcacctgcttccggcggagtggaggttggtatgacccatcccgtcggagggtcattcggacagcagccattgcaaatctccgcccattaatgagggaggacagggttatcccggtgtcaggcgaaagtacgagccaagttttggtcaaagtaggatgggtccccacccaaaagaagggtaggtagaaatggtgtatgtggtatccccttgagatataaaaggaggaccatgcctacgaagaggggggaccaaaaaaaaggagggacggaaaaaaagactagaggagacctgagcaagtagactggagaaaagaggagtgagaggggctctagagtgggaactctcttgctctccaactctttgtaactccttcatacacagatccaccagaacacaggagtagggtattacgcttctcagcggcccgaacctgtctacatcgcccgtgtcttgcgcatttactctctcgcgaaacattccccagaccgatcgagggcgaagaacctcacttagcgcccccggccgaaccggcaaaggggggcctgcgcggtctcccggtgaggagccccacgctccgtcatctggcgcgccaggtagggggcgcgcgtgggtttttctaagccctcgtcctctttcgtgtgcgccaagcttctcccgctcagcccaatggccgaacgggcagtggcgcacaacctctctccgagcgctagcggtgacgacagcgagcagaacccgcgtcgtcgagctcgtactccaccgcccccctctcgccgaagtcttaggcgggaggaggcgctcgagggggtcgaaagatccgcgacttcgccgcacgcgggcgatggagaaggacggcgagacggggagcgtcgtctcctcgtctacggtgatggcagcacgccccagggcgcgctccaggctgcgggcgcgctcttgcgtcacccgcccgtcgtccctgatccagagactccaacccgccgttggctagatgacgtggccaacttggtcatgacggcgcagcagcgcctaggcgccggcgggcggtcctccgccaccaaggccactggcgttgctactgccggctccgtgtcgtcgaggcgaagggcgcggcgagcggcagccgttacccgccgttcatctgccattccctcgtcaacgcctcccacccaagaagatgtgcgtgaggggccggatgcccgcctcaatatcgagcgccggcgcaatgatcgccgtgctgcccacgcatcggagggcgcttcctcgtccggagcgccacttcggtccgggcacgggggccagccccccgtgtccccggttggcggtgccggctgtcgagcctttgtggcgagccttcggaacgtccgttggcccccaaggttccggcccaccatcaccgaaaaatacgacgaaagcgtcaaccccgccgagtttctccagatctacacgactgggatcgaggccgccgggggtgacgacagggtcatggcgaatttcttccccatggccctgaaaggacaggcgcgggattggctaatgaacttgccacccgcgtcggtccactcttgggaggatttgtgccagcagttcaccatgaacttccagggcacatatccgcgcccaggtgaagaagcggacttacacgcggtacagcgaggggacgatgagtctctttgctcgtacattcagcggttttgtcaagtccgcaacaccataccgtgcatccttgcacacgcggtgatctacgcgttcagggggggcgtgcggcacaaccgcatgcttgagaagatcgcctccaaggagccccagaccactgcggagcttttcagctcgcggaccgtgtggctcgcaaggaggaggcatggacctggaactccaccggttccggtgtggcagcttcggccgcccccggatccgccgctcggtcagggcggcgggacaggaggaggaagaagaggtcggcccattccgacgacgagggtcacgtcctcgccgtcgagggcgcttcgcgggccacccgaaaggggaggcctggagcgacaaaaagaaggaggccggcgctcccagcagggagcgcccgaccagcaagtggtgcaccgtgcacaacacctccctccacgacctcgcggactgccgcgcggtcaaaagtttggctgagcggacgaggaagtgggaggaggagaggaggcaggagcgccgtgagggcaaggccccggcggctccctccagcaaccggcgaagtgaggccaagcagaaggcccccgccgagaacattgacgatggcgacgatgacctagggttccaggagcccggggccaccatcgccaccgtcgatgggggagcacgcgctcacgcttctcgtcggagcctcaaggccatgaagcggagcttctggccgcggcccctacccatgaggcgacgcggcgggcgcggtggtcggaggttgccctcacattcgaccagaccgaccacccgccatgcattgcccggggaggacagatcgcatggtgggttcccccaccgtttgcaacgtgaagttggggcgtgtcgtcatagatggagggagcagccctcaacatcctttcc

SEQ ID NO: 27412 - DNA, 1456 bp, Oryza sativa
cgggcatgcttctcgggttcttggtctctgcccgaggcattgaggccaaccccgagaagatacgagctatagagcggatgcgccccccagcaagcttagggatgtgcaatgcgtcactggctgtatggccgccctaagtcggttcatatcgaggctgggagagaaggcgctacccctatttaaactcgtcaaacgctccgggccgtttatctggacggaggaggctgaacgggccctcactcagttgaaggcgtacctcagttctcccccagtcctggtcgccccggagccagatgagccgttgctactctacctggcgggaaccccgcaggtggtcagcgcggcgttggtcatggagcgcgacgaggacgaccctcgcttcgcgcatccccaccctgtgtcgactcgacccgggagagagcagggaggagaggcccccgagccgaacggtggcccaaggcccccgacggccggagctggccctccgcccgcttgtccgaaggtgccaggcgcccccgacccccaggatggccacggggccactgcgggaaggccgcgcctgtcgccctctgaccccgaggtcatcggcacagaagccgagtgcgccccgcgcggcctctcggagcgtgacgaggacgatcctcgctctgcgcgtccccaccctgtgtcgattcgacccgggagagagcagggaggagaggcccccgagccgaacggtggcctaaggcccccgacggccggagctggccctccgcccgcttgtccgacggtgctaggcgcccccgacccccaggatggccccggggccactgcaggaaggccgcgcctgtcgccctccgaccccgaggtcgtcggcacagaagctgagtgcgccccgcgcggcctctcggacgaagagcgccctggaaatgcggcccctagtgaagaagatcggccccgccgaaaggtgtagcggcccgtctacttcgttagcgaggcccttcgggacgccaagacccgataccctcaggcctagaagatgctttacgctattctgatggcttcgaggaagttgcgccattatttccaggcgcatcaggtcacggtggttacgtcctaccccctcggccaaatcttgcataaccgagagggtactggacgggtggtgaaatgggcaatcgaactctctgagttcgatttgcactttgaaccacgccacgcagtcaagagccaggccctcgccgactttgtggcagagtggacaccggctcccgagcccgtctccatccccgaggccagctcgggcccttcgcagctgcctcacaccgcctattgggtgatgcagttcgacggctccctgtctcttcagggtgccggtgcgggggtcacgttgacctcgccgagcggagatgtcctcaaatacctggtccgcctcgactttcgggcaaccaacaatatggcagagtacgagggactc

SEQ ID NO: 27413 - DNA, 1110 bp, Oryza sativa
gacctcgtcctacgccgcgtccaaaagcgtgctggactgagcaagctctcaccaatgtggaagggtccgtatcgagtgatcggcgtccccgggccgggctccgttcggctggccacgggcgacggcacagagctgcctaacccgtggaacatcaaacaccttcgtcgcttctacccctagtgggggtcgggtgtcaggtctcgggctcgggccaaccccgcaccccgcccgggcgtgcagggttggccgggggctaccacatgcataagcttatcttttttctcttccgtatttcaataaaagcattttcgatttcctaaggactgtgtctgtgccattgtttcctttcgaagaatcttggcttgaattagcacgctcgtgctcgatcctgccctcagtggcccgggccggctaaaatcgccaaacggggcccagaaccgagccgtgccccggggcgtggtgaactccgggggggaatcggcaaaggcccacaatcgggtccccataaccctcggtcaccgcgctcccggcctggccagtctcgacacgtggatctccccaggcactagccccgacccgcgccgtttgaggctgggacctgggcacgagtcctcgttcaagccaagacacagaaggaccgcggcacagaccatcctcgtctcatatacacaacgaacagagctgacacaaaaatttcctctttatttgattgcagattgaattagtttatacaagaagggggcccgaaggcctcagaagaagaaagaaaaagctatttaagattggcgggggcctgggggctcacgccgacgcgcccgggtcgccggcctcgtcgtcgctgtcgtccgcaccaccgtcgccgccctcctcgtcggagtcgagggcgaacgcgagccgaggggccgtaccctcgaagctgtggacgatgtggacggcggcgtcccggacctgtgcgcgcgcgccatcctcggttccaggagagaactcgtccagcgctgcccacggggagaagtccgggtccctggcctagtagcttgccagtacgagctccaccgccccccgggcgaggtccctcgaggatgacttgatcgtctcctcgagctcctcggg

SEQ ID NO: 27414 - DNA, 903 bp, Oryza sativa
tcagtggggcagcggaaggcatgggggagagccgcctcggtaaggatgccgcacggctcgtcccaccgatcgacgtgccggactcagggacgtcccccgaagctggcccgtcctgagcgtcgcccgagaggtcgggcccgagcggtgcgcccgcggcctcgtcgtgggtggcctcggaagtcgtcgtcgcctcgggcggagtcgggtcggaggcttggcaggccgcccggcgtgcgcgcgccgcctccgtctcccggacggactcctcggcccggtggagtcgggcctcctcccaagcggcttcctcagcctggcaagcccggacagcctcctgggcagcttcctcggcttcccggaggcggtttgcggtttctcgccggtcagctctccgcctccgggcctccgcggtcgccgtctcctcggcctcagaccggccggacttggaatggcgggaagggcgcgacgggatctcgctgaggtagaagaaaaactagaagacgaaaaacgggtgagtgaaaacttgccttgggagatgggagaatgaatacggccgcagtgggcgcagggacgaacctgcgaggaggtcggctaaacgaccaccttgggggggagatgaggtttccccggtatggttcggtcccccccatcttgtggagccgcttcttttttcgcttcccctcgggccgcgacgtcggcacagcaccctccgggcgcctgctgctggcacgcaccgccccgccccctcggggaggagatggggagggggtatcctcctgtttcctcttcccccgggcgtcggtagggcggctgccccccgggcccccgtcacggggcccagaagcacgaccccctcccggcgtagattgttcccccctgcggctcccgcccgcgccatcgtggcct

SEQ ID NO: 27415 - DNA, 1218 bp, Oryza sativa
aaaaattgggttcgaatttttctctggttcgcttgtgattttgtgggggctaaagaatcaatccttcggggctcggagcgatggacgtggaccagctgatcctgttcgtctttgtgtgctgtttgtcctcgaggtttgctggtgagctctgtgatattcaagtcatgtttgtttcccgtgctgtttcttggacatcgccgtcgtgtttgccctccgagtgttgttcttaggtttgattgattgaactacggtcggtgatttgttttctctatgttttgacagatgcgtatgatccggtagatccgaatgggaacatcataatcaactgggattttcagagcatcgagaacgtctacacggtgcgcatgcctgctagtgagtttagtactgccgttaatttttcactgtttgggatcatcccagtagtagatatgcagtcgaataaaagattcagaatttcagacgtaccatcgttgcaactatcctttttatctcgattctaacttttccccattatttcctccggtgaaacttatcattagtacagccgaaatacgatattctgacaaaaaaaatttgacgttcgcaaccgccaacaccacgaatcaatcgatatatcctgtgcttatgcaggtcatggtgagcgtccacaatcaccagctgtaccgccacatcgagcagcccgggtggcggctgagctggaggtgggctggcaacgagatcatctggggcatgacgggcgcggaggcgacggagcagggcgactgccaccggatccgtggcgccacccggccgcattgctgcgagaagcaaccggtcatcgtggacctgccccccggcacgccgtacaacaaccaggtctccagctgctgccggggcggcgtgctgtcgtcgctcacgcagaacaaccggacgtccaccgcggcgttccagatggtggtcggcggcttcaggcgcgccacgtaccacgacggcgacaggggccccgcgctgccgtcacgcttcggcgtcggagtgcccgggtactcctgcagcaacgccaccaaggtgaacgcgaccaggtcaccgatcggcaggaccggcacgtccagtctctgcgtaaggcttctcccctttctttcttatcgcggcgcgtgcgttgagcgggagttctgagcgattcttgctgccgcgcgcgcgggcgccgtgtgcagtgacatggcaggtcacctgcacgta

SEQ ID NO: 27416 - DNA, 855 bp, Oryza sativa
tacacttccagcaacaaaagaacccaagatttatgaatgctcagaggataagaataatttctgtgctaacaaaacttaccttcacccacgttgacatcaatttcctgtacaacagttcaaaaaaaacaaatgattgatttcgtagatagcaagcacagcagaagacaattcaaaaaaggaacgcaaaacaaaatataaggacaaatatttcatttactgaccattgctgtcatcccacaatccaagcagctccaaggcccttgctcccagaatcaacacatgcaagagcaacaaaagccaaaacaaagttgctaaaaagtacacatataacccagtcaatatcacacagagaacaatagaccaaaaaaatgaaaatgtcatgtggacacatctaaaaattatagataagaatatcttgcacatctgaaattagagacaaaaattcctcaacagttgctatctcagataacttgtgagataacgggcaccacactaaacctaaaaattccatgctaagcaatggaagtaaactagagacagtatgtcaagcttctatcaaggaagaagcctcaggtcaatctatattctaccaagagaaatagagataacagaaaaaaaacagtacaaaactaggcctcattactaactagcaaaaaaaaaatatatcaggcacatatctaagaaaataaagatgcctagggttccccaaactacaagtctctgataaaaccaatatcaataattaacaatctaactaccaatagtcagttacagtgcgaaataataaaaattacaactgtaactaaggtatatttccactgtaagtggtgtgagttgcactgtaagtgtgtttta

SEQ ID NO: 27417 - DNA, 797 bp, Oryza sativa
caaatcgcgcgcatcggcaagggaaaaaccgaccgacaataatgagcggctttcttcaagaccgctacattacttgagtagcgcgcgaattgggacgagccggttcgtttcgcctggagatgtgatgatgtgcatcggtcggcgagcgtagttaacgcgcgcatgatatgtcccatctcgactgccacggccgcacatccgcctcgtgcgccgcaaacgggcgagcaggattaatggaggagtgggcgcgagaaacgagggggcgagatagtgggcgcgggaagcgaggagccgggcatagcgtttggcaagggtataaagacgccgaggaagagattcgtttccttcctctcgccattattccccttgccttcgccgcttgcgctctaacttctcgtttcctgtgccctaccctcgccgcactcactcgctctcaaacccctcctccgccggcgttatggcacggggctccgcaccgctcgacggtagcgtgctgccgccttctcgcatcgtgagcgagaggcaagccgggctgccgcgccgattcatgccggaatctgccaccggccgggaggtggttgcgctgggtgagggacgcccggcgccacactacccggggcggtccgtattcttccttcccttcgcaatggcagggctggtcccgtcattctcttctttcttcatggatgttctggagctttatgatctccagatggcgcacctcacccccaacgcagtaatgacgttggccatcttcgcgcacctgtgcgagatgttcatcggggtgcgcccatctc

SEQ ID NO: 27418 - DNA, 9794 bp, Oryza sativa
cccgtttttattttaatacttagaattggtgaggataggaaagaaggacgactgtgcttgtgctttaaaagtagtagatactacctccgttccattttaataatagttgtggtacccgtgcctaacgtttactgtttatcttatttaaaaaaatatgaaaaaaattaaaaaataagtcacgcataaagtactatttatgttttatcacctaataacaataaaaatacaaatcataaaaaaatttaaataagatggacggtcagacgttggatacaataaacccacaactgcatttaaaatgagatgatgttttttctttctggcatatagtattcggtatttcatgacagcagaaaaaaaatccatcttaacacagacagaaaaactgcatacatattgatgaattgtgcttagttttagaccacatatttccgttggaaacaaaaggatcatctacagattctgctgctccttcggaacacagaaatccacatattctttcttttttttaaaaaaaaatacaagtgtaattaatagtttttcccccaaaagattatcgcattaccaaaagaaaaatgctacgcataggatcattttcttatggttttgatacgatcaaatgaaacggcacagactgtaagggaacctaacgcgagttcacgcgcacggggcagtccaagagcattcatgggccctaaagctcaattcacctcttttcatctaactttacatctttctttgttgaaccctaaacctaatgttccctattccatggtttcatctaatatgcaagtctgcaactaattcagatagcatacgccatcctaagacgaaggtatgtcatcttatttgcttgatttccagcttgacaatcatcttctttggtgcactagtctctctcttttatgttcctaggcaatctccatggccataaaatgattgtatttttttattatagatttaatctgaaaatttgctttgcaagacatgccattattttcaatttaccagtttcagcaatgaagaccaacttgtctactaatgaagtacaagatgacattgccaaatctgatgtggatgatttgctgctgagggggtccaaaatgaatcagatgacacatgataaattcaatgttgagcaccaagtacaagtactatataagatatgattaggaagaagattgctttggttggttgtgcaatcaggacaacgagatagcagcccaaaacgtcgggagcttgtgtgacatcttggcccaattaggatgagacctgtgtagctcatgtgagttgtctgcgcatgtttagtaccaccttactagtttagcacgagtggaaccaacttataaggtcttttctctccaaccatgtcactcccaagttaacccttttacacgaagcgaggacgaaaatgtaagtggagttgtatgtgcaagtgggtccgcccatcggttgggctggctacgcggcgtgcgctatgcctgtgtgtcggttgggctggctggagggaaggctcttacagcttggactttttacacgaagtccatgtcaggttaacccttttacacgaagcgagtacgaaagtacaagtggagtggtatgtgtaagtgggcctaccaagcgaggacgaaagtataagtggagtggtatgtataagtgggcctgtccgtcggttggatgggtaagttggaccgacggggacgtcgggtcctttaaggaggggtgtatgtgacatcctggcccaattaggataaggcctgtgtggcccatgtgagctgtgtgcgcatgtttagtaccacattgctagtttagcatgagtggaatcaacttataaagcctcttccctccaaccatgccaggttaacccttttacacgaagcaaggacgaaagtataagtggagtggtatgtgtaagtgggcatgcccgtcgtttggtctggcaacgcggttctggttctggagggagggctgttacagcttggactttttacatgaagcgaggatgaaaatgtaagtggagtggtatatgtaagtgtgcctgtccgtcgggacttggactttttacatgaagcgaggacgaaagtgtaagtggagtggtatgtgtaagtgggcctgcccgactgttggactggctacgtggttctgggggggagggctgttacagcttggactttcgatatgggctcaacagtgaaaggcgatctgttttatcgaaaaaacattaggagagaaacgtttcatcatacaaccatcgtagaaaataatcatatgtacaacaatgctcttttctatgaaaataatcatacgtacaacaacgctcttttctatgggtacacatcatgtattagtgggactatttttgcccctaagctcaagtgccaactagatatggttgggctacacatttcagaaaaaaaaggggtatggttgcatttgggcttgttgggccttacggaggatcaaatcttttaccagcttgatacatgtagatagaaataacaaggttgattataaccgatataaaaagacgattaaaaccatgttggtacaatagaagataatgtatagggcaccacaagagatatgaacgtgtataagacattatctaccaataatgctcgacattattgaaacaccataaaagatatgaacgtgtatagggcactatctccaataccatggcaaatctacaagttggagtcaccagaaaaatcagtgatccaaacaccaaagctgttgccactgaccggacaatccgcaacctggtagacaaacattcctaagtcttcatcaatgatccaaatgcaaacatcaataaatagatagaaaaagaaagtaaaaaactctagacaatgctagcttcatagacatcataaaagaccaatcataatctaactaatatacctaaatcttctaaatactttatttggaagaaacctaaaaaccttactggagtaagtcgaaaaagggttccctccccttgtcattggccaaacactagagacaaaggagaaggggaacgaaggctaatggcagttgaggccaccctcagcgattacaagtaatgaaatcttgtggaaacattttttcttcaattgaaagtattgcacattttagttgaaaataatttgttttgaaggtgaatttagcatttatagttgaaggtggcatttgtttagtttgagttatgttgtattttttagttggaagtttcatgcagtttttgatatggaagatgaaattacattcctaacttctactccctctagtttttaatatttaacaccattcacttttgaacatccatgcaccattggtcttattcagaaaactagtgcaaatatgaaaaaaaatatgtcatgtttataatatgtttaataacaaaacaaatcacaataaaataagtaataattacacaaatttttaataagacaaattgccaaatgtatgtccacaagtcaacaacatcaaacattataaaaactggaagaactatattataagatgaactcaaccaaaagtttccttatgatatattaaattaactgttttggaggtatgtcatgaggaccttcgactaacctgccgaaaccacctaagccatcaaaaatatcggtcaagtcttttgggcgaaacccccgggcgaagccgtagggcgaagaccaaggggttcgtcactaagaatcgggcaaagcctggcgatgaagatcaatgggttcgccaccaagcttggtgaccggccgaaggcttaccaaggacgaaggccgtcaagcgaagcatgaagccgtcgtctggagtagaagatgccttcggctaaggtcccgagaggcctagtggcccatggaggcccttcaccacctaacggccagcccaggaagatcatctcggggcccataaagataaaagacacagtatacccattgtaatatccctatcataagggtaacaatataaaatcccctgtactaaccaaaccatagtgggtatgagcctgtactagaattataaatagccccatagggccatgtaatgggggaccccaaaaattttaaccaattaatatattgttttactattctaaccacccaacgggtttccacgtccttcgacatgacgcggttatcattcgacaacattaactaagaatggacataccctatcttagaaagaagagctaaaataaacaagcctccaaagcttccctcttgctacaaaatgtttcaaactataaaacctttattttattttgctacaaagccattgctacaaaaacatagcagtgtgaagtttcgtatcaagcatctctaacctttagcaataggtgatatctaataaaatgtatgttaatttatattcctataggatgtattttagtttttgaaaaatatttaaaactaaggctaagtttaaattaggtgtacaaacggttgaagacttgaaaaatgggataaatcactagcgtataactaaatgaatattaattataataaacttaaaagatggatttgttcgatttttttttaaaaaattatatatacaatttattttcataaaacacgctcttcgaaaaaagatgctaacgaataacaagagagttgctgaagccaatggaccaaacaaatggggcctaactcctacctcatgtttttgttatgaaaaccaaccccaacatctaatattgcctatatcagggtttacgattccgacgaaatctggttggatttcgcgaaatttcgacgtttcgatgaggctcaaaagtagaaaccatataagatttcgaagagtttcatccaaattcaaatttgaattgataaaaaagaaaaaaaagaaaaaaaatcttataaatactatgatattcatataacctattaggatataaattttttaaaaaatgatgtattatgtgtttactaaaacttagctcagaaaataaaagaataaagaatttaaaaaaaaaggaaaacacttacatgggccagaatacatgtactaggcccagttactgatcgaaatttcgatgatttcgatctgaatttcgccaaaaccgactggttttgagaacttatcggcaaactcagggaatttgtattcaaattttggtttatgaaatttgttcgaaatttaccggtttttcaccggatttcgcgaaatcccgaattccgccggtgcccgaaacggaagggcctgtcggaatcgtaaaccctggcctagatagcattttagaaaaacttgctataacttttatacactaaatgcaaaaagtcttgattcctagaattatgagaagcagctagttagtactttctctgttttatattatatatatctagattcattaacatatatatgaatatgagcaatgctagaaagtattctaatatgaaacggagggagtagctagttttgaaaaaccaggagagttcgtttattagattttattattatatcccacaaccatttcttttaaataaaaaacaagacaaaaccttaggttttggaaagtcttcacttaatattattacttactgtatactcccttcatctacttttgatagtcatatttcatcttggcacacagaccaacgataagtgattctacttatcatctatttaaacatgctactagtcattcctcgtgaacaagcgattcattaatattttcatttctcgatgcctatgtagccaatcttgtgtggaggaatagagaatcacgcattaaattcgagaaagacattaagatgataggttgttggattgaaatatacttatcaaaaatagattttttagatttggaaatatgactatcaaaagtagatggagggagtatataatagcaataacaacaacaacaataataataattaaacacaggtaaacaaagaaacaaaatcaaactccttccccccaaaatccttccaaaattcttgagaaaagctccaacctttcctcttcttcctcttcccctccctctcgctgcctgccgcctctgcttgctcagatcttctcctctccttcccggattccaccctcagttgttgtctcacagtctccgaatcgctgggcggtggagccattggtgctcacccacgggcacgggcgatgggcgccgatggcggcggcggcggaggccggaagagctcgtcgccggccgggaagccggcggaggcggcacgggcggggagcctgctcgccggactcccctcgcggggcaacttcgtcgccgacagcatcgcgtccagcatggtgcgttcgttcccccccacccctaaaatggaccagcctttttcttggcatgttagaagggttcttgtgaaaagccctctgatttttatgattttttattattattttttgcgcagggaggcctcccggtttatgtctgcctgcacgacaccgctcctccaggtttgtttgtgattttctaggataatcaagctttacttttattattgtgatgatgctaatttgttgttttaggaatgagggctgattgtagtgctagtggtgtgtactgtggagagacagatttgaagtagaaggatgatcctttctactagggttttatgtagaattttccttgtaagaacgcagtcatcttgcctaggttttgttctttcgattggcaatgctgttggcatcatgcttaatttgtggttactgaatttgttttgctgatgttaagagttggaatttctatgggtttactcagaatgtctcttgcaggaaagctaaagtctatatttgttctttggatttgtggtggcactgttgattgttgtcatgcttattttatggtttcctggagtagtttacaggttttcggagtgagaattgcaggtgtttgtgaaatattgtactgaaccattctttggtggttaaatagatttaaatcttctggatgtaaagtgtaggagtttagtagcttggcaatggggataaatggtttgctttccattcaatgaaatttagatttagtagtgtttgggagtgaattttactgcctttgagttttctagtgattacctaaagtgagctgtccctaaggaaaaaatgaagctacagagaagaatttctgatgttgctttttttttcttcggatcgagtgagacattgtgctgctgtcacaaaacttttgccatgtgtttcttgggagtcttatcttttgaatatcatttttggacgtatatgatttacattttatagtggcagttgttagtatatgatctattgtcagaccatgatcttttacatattttcattacttatgttcttatgataaagctgattactgatgacacaaacagatcattttaaggctgttttgttctgttcattgactgatcaccgtttttgtcattttagagggacaagttatagacacagacaccacaaacattttaatcagatctctccagttgagcaaacagaaaaatgaggcaaaagatgtaggatcaaggactccaggagaaagcagcaaggggaaaaggtacatcgctcttacgacatctttacaatattgaacctcatttttgcaatgtacaatgttcagttttagagtttcaattaacagcttcagattattttcttcatgacatggttacttgtgaactgagcatgtccctcctgaaacttttttgatcaaataatcctccctggaacttgcttcttaatctagcgttgtttgtcattttcctcacttgatattaagctattgacttactgtcatttttatcgatctgttgaacagaaattcatccatcatagttattgcctgagcagaatgtagtttagctctatttttttgagcaaaaaccatctgcagaaccttcgtcaaatatcaatggaaacattgttttgcatgaaggccatcaatttgatacaagctgttggatgattttggaaacttgtttccctttaaaaaaaaatctatgaactaagtaaaatccatatcgtagtctcttggatgatacaagtgctaggctacagttaaaactgtaagataggcaattatcagacgaactctgaaaacatgccttgacctgggattaacttggggaatgccctagtctatttaattgaagggcggtgtgctactgccatttgcattacaaaaaagttatgccagacaaacctattgttctcctatgttttttttttttttagattttgatttggtgccttttctgtcattggaatttttgtgccatttagattgcttgtgatgccagctagtaggacaaaaatcaactcttttcaattgctgacttgtagagaagttgtctcctaaaacttcttgcaattgtcagttaaattttatcctccatgtagcttatgttccttcttttttatcaggtctgcttccagacttttagatggcaagaatccatctaaaagagctaacactggcagcacggcagggtcatctgcccatggtaactatttgattcttctctgcaccctttcttatatgagtagtcatgcatagttttatgagtaatatgtgcattgaaggaaaaggcttatcagtaatttatttgttgctgttgtacgtttgcagtgttaggtaaataatgttagttccttggaaaagaaattgctgttttccctttgttttcttggtctttaaatttggagttgtcaaacttaggctgtgttcttttggaggggttgcgaacccctccccttcgcacggaaaacggagcgatagattaacacgtggttaattaagtattacctataaaaaacttgaaaaatggattaatatgattttttaaagcaactttcctatataaactttatgcaaaacacgtaccgtttagcagtttgaaaagcgtgcacgcggaaaacgagggagatgggttgggaacccatgggaaagaacacaccttaggccgtgttctttttatgggattgttttggctgattagctgcatgcaaaatgagaaacataattagcatatgaataattgagtattaattattaaaaacttgaaaaatggatttattttttttaaagcatcttctacatagatagtttccgcacgaaacataccattttttttttgagatgagagaaacataccatttagtagtttgaaaagtgtgttaacggaaatcgaggaatagctaagtttaatcagctctttagaacttgcccttaatttgggtgagaagttgaagttattataggacaaataaactggtactctactttgagtggtacttttctgtaaaaaaaatggcactgagggcatttatgaaactatagctgatgcagatagcaaaaattgcgtgattcattgtcgctttgctaacttttatgttgctattatatgacctatttcctgaattttcagaagcatttagacagttgtatacatattttgtttttataatacgatgcaacatttgtttctttttctgactacagtgatgcttctggccagcttagttatatgaagtaagaaatcaatacatcttaaattgaagtatccaagtataaattccaatatggctactacgtcatatatcaaaatcttaaaatataaataacattatgatagttttgttggtaaaattgattaatttgagaaaccaatgatgtggttttaatactgagtactggtagataattaaaggaacgcactgccaaataccacgcaaatgtcacataagctggagaataacatttgctgtgatattttccatccaaaggcctcaaatgaacaatcatgcaggccgaactattttcttatttccttcctttgatgtactccatgtaatgtgcccatcag

SEQ ID NO: 27419 - DNA, 7585 bp, Oryza sativa
tgcaattcacagattttgcaatggcatttaccagcccaagtttgcagtggtattttccaagttacccttctttgagatggcactagcaaatttattgtgtatatccctttgtatatgatctgaataaatagtgaaactcagataatttcagatgattaaagtctgctctaactgtgcaagcctagttttcttgtaccaaattagaattctgaataacaataagattccatatgtttttgaaaaaaaagattttgacctatattgtacatagattattcagttaacacctttttttaggtattttccctcatcatctgagcatcaatattatcttgagaacaacataatccacaaaattctgagcatcaatcattttagtactattgaatataatatcaactttgatcttgcaggggaattgggatctgttttttctgagcagacgctccaatcatttacggtggagaagttgcgtattcttctgaaagagagagggctctcaccaaaaggcaaaaaggtaagtacagaaaatgcttaattttgtaactccctctttcagttttaagaacttgcaaaatcttgtttatgcctgggagattgctagacgtttgacacccaagggtacattgttctgctgtctcatttaaatctagaaaattttaatagtactttagttttctagtcataaatttatgactagtgagtcccagtgtgaatatttctgttgtaaatatttttttcattatattaataaagcattaacagcaggggcctcccctgctgtgttgtctttttaaaaaaaaagggaatcatacatgtgtggaacacgctgcttaaataaaaaatcatatgtttggaattgttgataatcatatacctgaatttcaagaaatattcacatctttttgattgatcgactttagcaattggaatttcgatctctggtgactggtagcctagcggtgggtcatcaggtagagcagtttgttatatgcttgggtgagggtgtttggcttcatcagaagcatgcacaatgtactgttggcgactgttgctgtggtgctgaccattatggtgttggaattaaagggaaggaaccctcagattgtggtgggtaagagatggtggtagtggaatcatatcaaagtgtggtgctattgactagagaaaagttgatgcaggaaggaaaaaactggagattgtggcggagggttgggtttggtttggctttggccggggataataaatgatggagctgtagcctgtagaattaggccttgtttagttcccaaaacaaaaacttttcacccatcacatcaaatatttggacacatgcgtggagtattaattatggacaaaaagaaaaaccaattacacagtttacgtgtaaattgtgagatgaatcttttaagcctaattgcgccatgatttgacaatgtggtgctacagtaaacatttgctaatgacagattaattaggcttaataaatttgtctcgcagtttcctagcggaatctgtaatttgttttgttattagattacgtttaatacttcaaatgtatatccgtatatccgatgtgacaaccaaacccgaaaatattccccaactaaacaaggccttagatggacttgagaggggtggattttgcttagagggtatacagaagggtaatgattacttgaatagacatggtggagaggatgttggtttgggtgcgctgacgattgaggatatatactgaaggttttagatatgatgtgtgcaaaccatgcagaaggagacatgaccatattggacagctttggtgggcattcaaatttttaatgcaatatgatatctaattggcaaatggtaatttgtatggtgatgaaatcacaaacacacaagttacagaaatggaaatacaattgttttgatgtttttagggccacagttgtgttttcttgactaactatgattagtgaaccttgtaaacaaataaacaatagcatgagaaacagaaccctcaccccaaccatgatcagcactgtttgcacctacggacactggatttcacagggaaactggaatttgaaatggagtactttctttgatgagtagaaaggcatgtattgaaaggctaaacaccggctgatagaagttgtcaatatatggagacaatagtcttatattcgctgcccattaaacaaaataatactccctccatcccaaaatgtttgatgccgttgacttttttgaaaatgtttaaccgttcatcttattcaaaagatttaagtaattattaatttttttcctatcatttgatttattgttaaatatacttttatgtatacatatagtttacatatttaacaaatttttttgaataaaacgaacggtcaaacatgtttaaaaaagtcaacggcgtcaaacattttaggaaggaggtagtatgaaggatatcacacgttcgaagggttgttcactttactgtctatcttttgaacatttagttatgaaccaaaaaagaatagcactcatttattttgagatcactcatctaattccttttcttgctaaatcaaacttttgtcccttgttgcaggatgaactgatcgcccgcttaattgagtcctcggagtgatctgaactgcgatcggaacctcattttgttggatgttgtaccgtagtgacgatcatacaccatgcaagtgaacttctatcgcagacctcatgtaagcatatatttcatacagtgccgaaatgaaagatctggctgatagtttccacattgcaccttgttcgatggagctccttcaacgtttgcacgacgtgttgtgtttaacactagtgttacccagggcaccaagtctgtctacgtccgattccctcttggtgaatctgaatctcctattctgacacttcgtttcgcatcgtgtcggtgcctgggtacacctgtgcaccctcacctcgtttgtactccgtagctttctgggtgagaaaggctatttagaccattcccaacccaagacactagacatagtttttataaactccgcgtcattatcatcaagaaactagtactaggcactattcttccaatgcaaacacaactattccatacatacttatcccacacgatgtcttggatgttgtgtagaaattatgtctcatgcaagatatggttttcttctctttcttcatttattcgccacatcatttttcgtcctaggtggcagcttatttaatgctatggacatcatcctagttattgggttgggaatagccttatgttcctacggaagcgtctttgaccgctgcgcgacgaggcctctttggatgaggtgcttgcggaatttgtgggccgctacccccgcaaatcatcgcggcgcggacgacaatcttcgaccttgacgcggtggtgggcgacggaatcatcgacctcgtcgacgtgcaacaaggagcaagctagcttcgcatgcttgcgtgtatcctcattctactcttttatgttgtcaactatgctatgctgcagaattacttcttactactatgtcccagaaaaaatcaaaccctgggtttgtgtgtctagatttagacctagagttcgatttttttttttgggacggatgggtacttttgttgctccaaaaggactcatcgacaccgaacggctgcgtccatcgggtcacagagcatacagctcatgtaccgcgctacactttgcatatatttcatcagctcatgtacaactcaagtagcgcgcgtggtacatgagctgatgacggaaacgacatgcgacctagcttgtttccatggaaacaatgctgcgaggtgactgccagcgatagatgacggtcaggcaaaatatctcggaggatacaagtggacagccacacaatgcatggaaccagctagggggccacatcctgcttctttggagctctggtgtgatcgaagttcgcgacatcagactaagacttctcaatcacgaccagaatcacactactgaacagctcggataaagcttcctcctgtaggcggtttataggcccacgagccatagaggaaaggaatacttccttcaaggaattaggaggctaaggctgtgttcgttgctcctagttcccaacccctctcgctcgtattccgcgtgcacgcttttcaaactgctaaaggtgtgtttttaataaaaagtttctatacgaaagttgcttaaaaaatcatattgatccattttttttaaaaaatagcaaatacttaattaatcacacgctaatagaccgctccgttttccgtacgtattgttccttttgggaactggctagacgaacacagccaaagccggaggatgacgagctgtggctattaattggtttcaacatgatttataaggcaaacgataaaaaataacacgaacctcaacttgaggtgaatgagccggttccgtgctgctcttaaccactgtgagctcaaagagatccaccttcaaaataggaaaatcacttggagaaatgagagagtttagctgacacttgttaagatggacagattcttctgcaacgaggaatgggacctcacctttgggcatcacatcctccatgcgttgtcttttggaatatctgatcactaccccttgcttatctccaacccgggcaggccacggagccgagaaccttcaaatttgagaacttctgggtaagactatcatgattcaaggaggtggtcctgcatgcttggactcaacaaacgacacaccacgaacctctacaccgcctagctagcaaacaaaatgagacgtcctatgattgctttaaaaagatgtgtaaagggcgtttgctcaaatatcacatggcattggacgtaatccaccgatttgacgtggcccaagagggccgacacctaattaacacaggcagaacacaggctccgcgcggccctgaaaagaaggctcctaggttttgcggtcattgaaagagcaagggaaaaacaggctgcaggtaacaaacattacagagggagatgcaaacatgaagtacttccacggcaaaatcaatgcacgcaaaagaaaaaaccacatctatcgtttgcgcaagcagagtggttgggccgtcacacataaagaaaaggagctctccatcgctgagcacatccaacacgtaatgggccggcctgaggctagaacacacgatctcaactgacctttcctaggaatcaccccgctagacattagcagcctagaagaaccattcacggagggcgaaatccagaaggcgactgtacgacgtaagaaacgtgcatctaaatcttctcaactctacaaatgtggtccttattccaaataaagatggagcggaggaaattggagactatagaccaataagccttcgtcaaaatcttatccaaagtgttggccatcagattgcagccgctcatgcattcgatgatctcgacaaaccaaagcgctttcatctgaggccgaagtatacatgacaatttcatgtacgtcatgaacatggtgagaaagcaccatagaaaaagaagatcgattctgctcttcaaacttgacatctccaaggctttcgactcggtgcaatgagattacctcctaaccttagtgcataatagggggttcccatagagatggaaaaataggataacgggcattctatccatttccatatcaaatatccttctcaatggaattccgggccaaatgattcggcatggaaaggggttgcagtagggtgatcctctatccccgcttatgttcatcttggcaatggatcccctataacgaatgctcaaaaagccactcaaatagggctgatcagtaagctacgaggcagagcagtacgcttttgcacgtccatgtacgccgataacgcgactgtcttcacaaacccaagcaaagaggatgttcaggccttctccgacctactccaccactttggacaagcaacgggattatgtacagacctgcaaaagtcacaggtggcaccgattcgatgtgatagcttagacctggacggcatccttgatggcacgccagctacgcgggcctccttcccgatgaagtacctagggctccttcttaccacaactaggctatgaagaagggacctccaaccgctctatgacaaaatcaatgagccggattgcaggatggcgaggaaggcatgtgggttaacccttattggaaatcaagaagcgggttagagattatggttctaatcatgacttagtagataaaaattaactgatgcagcactaagtatgaaaaaaaacataatatctagacaatcaaggatttgactgattttcagggtggtagataccttagttaatctaacctggtaaagcgatttagccgataccgacataaaccctaaaacgaatctcaaccgatataagtaaatcgagctatcaaactagttaactaagatatatgacaaacaggtgcttacatttacaagattagagtgttgaagccctagccgtgccgatgcaaacagccatgacaagtataaactcgtcgaaaaactagaaaagttaaaagggtggcaaatttgtattgatcgtggagatagtttacaatgaccccgggtgtacatatttatacccatgggtagatacgagtctttcttgggcaataaagaaactttcctaaagataaaaggaaaacataaagtccttataagacattaaacacactttcctaaagataaaaggaaactagcagactcttactaattaatagataaactgacatatcacatcctgcttgaatttggtctcttctagataagcttcctttaattgattaatttccttaaccgaatatagtaagaatacgactattggcgacttgataattctcatcagccgattctaggactttgaagttgatattgactctaggcagatgatgacttcagggcttactaaatttcactgttaacacatatagtattagatagtatctaattgctatattttgaatcgaagggaataaaatttagttgacaacgctgtcgacaggggatacccgtagactggatatagagggtattggggtacgctggtacgaggatctacgtagtacgacatcaagcaaacaggaaacagggattatactggttcaggcctcttgataggtaatagccctaatccagttgatatgggattatatgatggaaaccacagattacaaagggaataacagaactcgatgatgccgacgagaccatagtcgagttggttcgactagatcacccggcgatttggctcctgtaggctccgacttcgtaggctgtggtggatgtgttggcggtgagattcgatgccttaggtcctcccggggggtcccttttataccgcggatcaattgatctctaagtcgaactcggagatatcggaccccacacgatatggtaacgacccagtcttgtccgcgtaggagttctcccatgtatggattctatttctgccacgcgatagatttccttaacgtatacagaaactgcccgtatatgcacaggtataccatattggtatacaacatacatccaagggtagagggtataccttattcgtaaccctgaca

SEQ ID NO: 27420 - DNA, 19825 bp, Oryza sativa
atgtagacacgaatacggatatttttttcccgaatacgaatatggtatcggggtttctgtcggatacggatatccgatgaatagtgctattcggatatccgcagaagccatgagacataccatattttttttatagttcaatgacgttcaatataccttttgaaattttaaaagtagtctatcttttaacattagtccctgctactaatattatttaattttttaaaaaatataaataatactatatttttataaaaaatgagctaattatatatgatgatatttgtttctactagaagttgagttggttttcgtgttctaagataaaattgtttccgtattcgtgtccgatcatattcgatttttattcatattcgagataatccgtatttgtttccgtatccaagctattcgtgttcgtttctatatccggtaaaaaaaatgaaaatgaatatggtatgagtattatccgtccgtatccgatccgttttcatctctaattcatatcaatgatgagcaaattatatctattcaatactcttttgcaaaatccaaatgctagctgctaatgctataggattttaagaacttaactatatagttcagttctattgtgcagtgaagaaacactattttacaaacaattaaacacacgggcattaattttttctccagagaatatgaaatgaattcagggacatttctgaggctaatttacgcattattaactgctgcttcgcaaaaccactgtttttggcgcaggaggcaaaggatcaaaaactaggggcgcaactcactgggcgatatgtgcaaagagtctagaactaagcataatctatagcgtatcacaacaacgaaaggccgatcctgatctggacaaacgatgggaactgcgtttgttttgttctttcctgagacataataatttaataatggccacacgcccacctgctacctaccttgtcatgtttgctctggattgtttgtcagtacgagcatgcagttctttgctgtgttggtgactactagaaggctagtgtgtagtgtgtgtctatgtatacatgcacaagaacgaaggccgtggcgactacgagagatattatgttaatttattataccatttcagtcttgtctagctttgttaaacttgggaagcttgaacgaagaataggaggggctattatgctattttgtgtaacagtacttcaactcaatatagtgacttatggacaacataatttttcaaaaacttagagtcggggacatgacaatattgacctcgatgagctttgccacttactcgacaacccaggctgccttacttctcccattctattttccgactgctcctaccatgagtccgcgtgtatccaagagcgtcaccgacatcctccaagcttgtcttcaccgcccactttgaacgggcattagtgttcctgatggatggaggttgacaaaaatcatgaccgagaggcatggttggaattttttaaaatttcaatggcacgtagtaggtttcgtgaatggtaatagtatttttttaatatgatatatttactatggcacgatctaattaactatttaaataatttaaatgggttgtttatcaatattttcgtagctagcgaagctataaagctgggtgcaacagaagatccagatgaagttagtcagtacagtgaacggcatcgggaaatgcaggcagatgatgtctgtgatgacttcatggagcactttacaagtcacacttgacttaaaaaaaaaactctcaatatgcaaatgcaagcacacgcttctatatacttatgttagtatgtcgtgcaaaactcttgcaacttggaattcaatgataattagaaacataattccaattgttagctaggatcaactaattataacacatgctggaaaaggaattccatgatacagaggcacatttgcatttaccaaatacattcagggttgagagagatgtatggtcagctaatacaaggcaaacttgactaggcttttatagagtacctgtagaacggcacaaatgcaaggcacaagtcaaacaaacttcaaaactgttgaagatgattggatgaacatatatgtgcaaatttgcaaaaatacagtggaaaatgaacgatggcctaagtcagtattttgactatttttaaataaatcaaataaaatactctctccgttgtatattataagtcgttttcacttttccctagtcaaactaatttaagtttgatcaaatttatagaaaaatataactattttcaacatgaatcaagcatacttttaaaatgtgttaaatgttagttttgatgaaactagtttggtgctatagtaattactaattttttctatatatggtgggtcaagtttgactatgaaaaaaaattaaaacgacttataattttaaacgaaggaagtacatcttaaggagtttaacatgtaccagacctatacatttattaaaataatatcctagttataactttccaacctatacacacatatcctaataagaacatttataaagtctgttagttacgcaactacactacaatagaagcaggagaccactctgttttggaggatgtaaaaaattccaactaatgcactaatacttgacaaataaacttcttccacataccagacataaaaggaacgagtatcataatgaacattaggtgtgataatgctatctactccctctatcccaaaatataataatttttaagtggatgtgacatattttagtacattgaatttggacattcctacctcatccccgcagaaaaacaaaatcaaaactttgtactttaaagttaccaagaaaatttctttttatttttttttgtctcctcacaaaaaaaaagaagaaacaaagtcttcttgttaagtttgtactaccatcgcaccagagagagagagagctggaaatggatcccctttaaaagccgttgcgttggctctgccgccttggcaacaacatccaatttccaaaccaagagagaagcagcagcgatggcgatgcggcagggagcgctgcgaggcccctccgattactcccaggagcccacccgccacccctccctgcgcatcaacgccaaggtgccggccgtgatcgcagcagcaagaatcgcatcttcttccttgagtttctactcgtacgtactcgcgttgagttcttttgtcgcgcaagtaaaatgtgttttttggggggcgatggatgcgtgcaggagccgttcaatgcggaggcgacgaggcgggacctcgtggcgtcctacatcacccccgtggatctcttcctcaagaggaaccatggccccatccccatcctccacgacatcgacaggtacggttcttgatttgtatttcctctctttgcctgatttatttttgtcaccttcttagtttcaacttaaaatggtttcagtcttttgttttgtggatttgcagctactatgtgacggttgccggtctgatagagaggccagcgaagctttatctgaatgacatcaagtgagtcgtgtgtcagtcatcgtggctgtgctatgcatgccttctgtttgatgatatgcctgagaggtgatcgagttttttcgtgctttctttgtgtgcaggaagctgcccaagtacaatgtcactgccactctgcaggtggattttggtgtcctggtggactggtggtgtgtgtgtggattcttagggccgaattttgtgtgacatggtttcgattggttcagtgtgcagggaacaggaggaccgaaatgagcaagagcaggaaggtgagaggcgtcggatgggatgtctgcgctctcgggaatggttagtgtgcttcacttctcaatcttctttgtgtcttactattagcgtggtggaatacggcaaaaggaagaaagaaagaaaaaagatgcatggacattctccagttaagtgtgtataggaagttgtcatcactcaccaatgtaataaggaaacctgtcttatatgatcttagctgcaattttgaatagaagtgagttccatgagattgataaaggatgtgctgtaaatgtttaacttaattcttctgcacttttttactgtcttcgatgcataatcatcatattcactgtcactgaatttatgtgcttcattttagcgacatggggaggagctaagttatctgatgtccttcagctcattggtgtgccatatcatactgaaattactccatcaggaggaaagcatgttgagttcactagtgtagatcagtgccctgtgagtttcttgagacttcatttatgaaaaaaaaaaatatatatatgacagctttagttattttttctataacatctttttcaaaatattattaggaggaaaaaggtggcccttacaaagcatcgatttctttaggccatgcaacaaatcctgcagcagatgtactggttgcatatgaaatgaatggtgaggtaggaccataggagataataataggttatatcttatataccatccttacatccatctatcaggatatttggttatttcatatatctgtgcatttttctaatcatatccctattatgtgtttttgttacaaaggtgctcaagcgtgatcatggataccctctccgtgtcgtagttccaggtgtgattggtgctcgttcagtcaaatggttggacagaattgacataattgaggaagagtgtcaggtatgcattatctaacttcttgtcaatatgtaaatatattttcagtttgccaaaaagatttttgaaactcgttcattttcagggtttctttatgcaaaaggattacaaaatgttccctccatctgttgattgggacaatattgtgtggtcaaccaggaagccccaaatggactacccagttcaggtgttaattcttaaccgtcttgtttccacacagtaagagcaagagcaactatagcaaattgagcaattcagaaacaaaaaacatcatgttcctaaccatgaaaagtctgagtatacaaggaatttccagtatacatcatttcgatacaacagcatattggaatgaggatggcatccgtattttgtgctgcttatctaaatatcacacagtaaactacatgaagttctgtttccaatttacattgtcatatattctattttgccatgcaaaaccttactgtaacagtaatttcctctagtaatttactgtattgcataatattgaaaaattgtgtgcactaattaccttttggaccgactctgatatttcagtctgccatatgctctttggaagacacaaatgccatcattccaggagaagtgagttcagcttcttaactgggcttttttatttccattttgcttcatgacttacccctaacgctttgccttattgtgctcttcaggtgactgtcactggatatgcgttgtcaggaggcggccgaggtattgagagggtggatatatccactgacggtggcaagacttggttcggtgctgtccggtaccaaaaggaaggtgtaccatacgtcgcaggtgacataagtagtgacaagtgggcttgggttctcttcaagactgttatcgatgtgaaaggtgacacggaggttatcgtaaaagcggtatgctatcttgctagttcgtcctacttgcaattcaatgttgttttttctgttccattttacatattggctgcaggattgttcattctaatataaatgtactgaatcttgtggcacaaactatgcaggttgattccagtgcaaatgtgcaacctgagagcgtggagaccatatggaaccttagagggatcctgaacacctgctggcaccgtgttcgccttctgacaatacacaaccttagaagccttttgtgatgatcctacacatacacctaactagtattatctctttaaatttaccgctctatgttgcactgtcgttccgctttcggatctgcattggagaaaaagagtcaagagggaccaataatataatgctggctgacttgcttggatgctggaataaaatcccgtgccaccttgttatcctattctttttgagtaagaaatatgtgtgtatgaaataatgggcacaggctagatcaacctcatttaagagtgcaaaacagtttgcctctttgttttatttggatgcaacaattggtcaacatacatggaatggtttcagatttgtgtaaccatgtagagaaatagtgatctgaagatttttcatatgctcgtttggtactgaatcatcataatttcaatcttttagtattattactcctacattttagacaaaagctggctgaagccgtttaagttacttttcttctttttttttttgaagcggaaaggagttctgtcgttttatattggtagagggacagaaaaacagttatgttactcatacttagattaattaatctatctatttgggcttctgatccatgaaaatttgcattccgtctctgtttattcaatctgtaatctcaaacatttccaagaatgtgtgattgaattgcagaatgagcttggtatgcttactaagtacaccctccaactaaaaagaattaaacttctaactgtgaatatggacataaaaaaagatggagtgggtaaggatttgtaccaagataagagggcaaagtgtttatttatcctcttttctccttgtcagcatttatcaaaactgaatcaacattacaagcggtgacaggatcaaaagagcaatatttatgcaagtttggatgtattttttgattgcatgtaagatagaagcatatgaggtgatcatgtttaaaggcctagcttgtgatcgttgaattgtggtgggttgatggcccccccccccccccccccgaaaggccttgttgggtcaattccatgagggagggatttgaggggatttattccagatctattgtggtgtgaaattattcctcctcaatcccctccaaaccgaacaaagcctaagtgtttatgaaaataaattggtatagcccttatatatatgtttagatgtcctatacgttcagcacaaaataatattatcgttcaatatatatagactaaaagaaaataaaatttattaaacgcaacaatatgtagaagcaatcacaacaaacgggattttcataatccatggcaacgccattagcattcaaaagctcttttttttttactgacaaaatcagatggtctaaggcagtttaattatgactttttttttggcaccttctgtttctgaatttcagatgcccaattccactttcccaaacttttctgcatatattctggctgtattgctgataataaatattagaccaaagaatcaacaaccgtagagttatatagaattgaaggtacatggcactctccttgagcacatttgcagatatatatgggcattgaaaattttgctggactctaggagtgacgatttaggtatggaaggcaccaggacggatcagtgggcaagtgaggtggtttatgcaaccacaaggccaccagtgattttgatcagtgagctgtagtgtactaccgtttataatttttatcctaatttgcaatcaacacctaatagtacttctaatatgtttgaaaggtggctatatggatcaaattttggtttgggacaacagctatttcttgggctacatggctaagttgcaatgacatggtgttgataatgcaaaagcgtgttatcctatatgcaggtaatttcaggtccacacgctatgttcggcattagattttgttgcaaaaagaggagaaacgggattatgcaagaacatctaaaaacctacagctatgtaaatatgtaataagacatggctatgtgcatctgtcggtgtggaggctggggtatatttatattccattatctagaaaggatgtgcatgtgtaggccgcagttgataggaataacataaacaaacactatagttgttgatcatgtattagtcaatgttataaaaccagccccgaaatcacatcggaaaccaaacgcggaagaaaatgccatagaagatccaaacacaatgacgacaccgaggtacgatatttaataacggagttcagttgaggcctacatctccggggtactgattacgggcgctccttccctatccagcatatacagcgtatcagagttacaacgactcacggccggtcaccgccgccagctgctccctctcgctatgctaagtcgccatgcggtaacaacaggcacgcgccctctatttatgagagattctagaatagagtctgactcatactctggtcctaatacctattacaactttgagtcctaaactgtaaccgactacgtacacatattcgacacaaactctatcaaactccattttggcaaatatgccacagcaacctgaatttgttccttgctcgaacctccatgtaccaggacttgagttggttccttttcgctgctcacaccgagccgccccgataagccttcatcaggctcaccgtaaacaagagactccgctatccctgtaatttcttcttcttgactccacctgcaacagtgcttcaccctatctcatatcaccacagtcgtcttgccaagccaaattggatccttcctagctgtcacatcatacacttcccgaagactatgttcaactccatctaccgtcttaaatttgacttgatctaatccatggtcagataacccgcgttatcaccaaatagataaatcaaactcacctacaagtctaaacttgctttaaatctagtactctattaattgttgaaacttgtctgaaattgggctgaacttgttaactgtggtctggaatgaacatggtctgaatttgctgttgagattggtctgaacttggtgtcaaattggactgagcttatattgcatttgctgttgaaattggtctgcatttggtctcaatggtcagaaattggatctcgtacgtcaccattagtctgaactttaatttcttgaattgaaaaactcggaacatcatgtaaaatttatcactttttccacgattgcacaaaatcaaaattactgattgtaccataatgattgcacagattaaacaacactggataactggctaactgcagttcattgcatgcattacaggaaaacacattatgctgctagattactactagtacattatagttccctaagatattggcaaatgctataatattacaaacggagttgttccgttgttgacacaaaattaccctaaaatacagtgtagataggacgaaacaattggagtttcaaccggatccaatcgactgaaaccttaccattacatcccaatccaaattaagccagagttttcgcgggaggggactggggtctggtgtgtgtgccggggggtgggggtgagggggctcacctggagggcgtgcctgttctgcttgaacttgaggaacctgcggacgcagaagaggacctgctcctccgagagcgggcacctctcgcggagccatcggccgagctcctccaccattccacccgacggcagctgcgccgacagcctcgcgtagagcgcccacctcgcaccatccagcggtcgccgctccgggctcgcgtactggagaccgcgcgcctgactccccggggcctgtgagaggcgccactacatcagagacctgacaacatggtgttctgcttcttctcgtctcataattatgttggaattaatagatgggctaaggcctattcgaatattaattctttggaaaatcacaaaagcccacctcatgggatggcatacatgtggagtttagtaccactttgcttattctaggagaggggacctccttaaaagggaggatgccctcctagccacttgaagcatgtgtggtggagagaagagggggaacacgcgcttgcttgctcgccttgcctagcagggcagaattgactcctcacccttacacagatgcagccttcttttgcagttttgttttgctgcaggaaaattcggatttgttttgttgttggaaacattccggaaaatccggtgcatgaaaacggcgtggagtccggatcagttacgcacgacttatccggtttggttacgcggagtggagatcgtgcgggcgccctgatcaagcgacctatctctatataaaccgagccgctgccttcacgcaacacacgtgaaatcaatctagggtttgcctcctcctctgtgctgcgccgtcgctcgtagactactccagttttgttttgctgcaggaaaattcggatttgttttgttgttggaaacattccggaaaatccggtgcgtgaaaacggcatggagtccggattagttacgcacgacttatccggttcggttacgcggagcggagatcgtgcgggcgccttgatcaagcgacctatctctatgtaaaccgagccgctgccttcacgcaacacacgcgaaatcaatctagggtttgcctcctcctctatgctgcgcgtcgctcgtagactactccatcccgctggcagggcagaattgactcctcacccttacgcagatgcagccttcttttgcagttttgttttgctgcaggaaaatttggatttgtttcgttgttggaaacattccgaaaaatccggtgcgtgaaaacggcgtggagtccggatcagttacgcacgacttatccggttcggttacgcggagtggagattgtgcgggcgccctgatcaagcgacctatctctatataaaccgagccgctgccttcacgcaacacacgcgaaatcaatctagggtttgcctcctcctctgtgctgcgccgtcgctcataggctactccatcccgcttgcaggcgtgcacctgcgatcggaagagcaggtttccggaacctctgccttcgacgtcctgcaccgggagaagcggcagtaaggtttttgggaagcgcttcacgcgactgctccctgtttgtccgcgacggctcgccttcctcttcgttcgcgtgctgcgcgccttcgtcgacgctcgcaaccgcgagtagttcctgccgagcaaccggtctttccgccaccttggtacgtgttcgacatgttgcgcatatttgatctgtttatgttttactgcttagtttacatgtgtagatctaatgatgcgttaatgctagtatacatctgtaatgtcatgatttatttatggaatatattaaatcattatatgcctatattctcaacaatccaaaaaccttattataggcgctatgattttactatggctggttttgccgatgcactgaggccggataaatttaccggtgtgcactttaagagatggcagatcagggtcactctgtggctgacagctatgaaatgcttctgggtgagtactggcaagcctatgggcgttcttaatgctgaccaggagaaagaattcgatgaggccactactctctttgtgggatgcattcttagcgtgcttggcgatcgtctggtcgaggtgtatatgcatatgaccgacgctaaagagttgtgggatgcactgaatactaaattcggtgctactgatgctagcaatgtgtcacgtcctgataaattcatcccgaaattaaaaatcattttctaaaaggaataatagaattaattaaaattcgaaaagaaattggcaaacactaaaatacgtacaagaaaaattcaaatgtggcccggagaatttttgttaaattctccttggtctaaaaggagccctcaaattttacttgaattttcagagcacaaataataattaagaagatataaacaaagttaaaatggttttataaaaataaaagctctaaaaagtcccttttcccccctctcctcttgggccgcctcggcccatctccttccccctccctctcctctccccgctgcccattcggcctcctccccgcgcgcgcgccgctgacgggcgggcccgcccgcctccctcgctgacgggtggggcccacccgtcatccccttcatcccgccgctcccgccgcctcgcccgcgccctagcgccgccgccgccgtgaatcccgccgcccccgtccgccccgcgtgcaatcaataggggggaattattccccgggatcccctccccctttccccccatttttccctctctctctccctcggattggtttggaaactcctcccctaacctcgccggcgccattaatggcggccgggactcccgcgcccgtttccccctcctccggccacccctctcactcccaaccctatataaaccctccccgtgcctccctccaccgtttccgccactcgccgccctcattccctgtcggaatcgagctcgcgccgtcgctctctctccgccgtcgccgccgagctccggtccgccgccgtcgtcgccccggaccaccttccccctcggcgccgcctccttcggcttcgccgcatcctcgccgacctcgtccacccctccgtttcgctcgccgaccgccggagcaccgccgaccccgtccacccgagccgcgccgccgccttcctccgctccggtcgccgtttccgtcgtcgccatcgacccggggtgagccgtggaccgccgcttcttttccccccttcccttcccctccctcggccgccgctccgccgtgcctatggccgccgccggcgaccataggggcgcgggcgcgccgcctcccgccgctgcgccggcgtggccgccttcgggcgcaccgtgcggctgccgcgtggggcccggctgtcagccgcccgcgccctcgggtgcagctgacgcgtgggacccacggcgccggccggtgtgagcccgggtgcgcccggtccaccgtggaccgtggggctgccgcgtgggccccacccccgtggacccggtccgcgcgcccctcccctcggctgacgcaataaatccattttaaattaaaaattaaatgaagaaattcgcaaatattcatttaaagagcatataaacttcaaatggccataacttggccatttgaactcggaattggaccgttcaagtctctaatttttccttaagaagtcaagaacccatttttgtgctttgtttctgcttgttatatggagtttattagagtaaaagccttttcttttccgttggtcgtgtagacactgcagcttcggaggatccgctcttcgtggaagttgaagccggcgtttgggaaagcgagcaaggcaagtcacatcatccttgaacatattgaatcccagtttataaaattattttaatttaaattaatgcattatcgctttatttaaattcccgcgttaccactgttttatttagccatgcctatttacctttgttatgaccttattattgttgttattgttattattaccttgttcaccctagaataaacaaaaccccaactagtgggtactctattcatggttccactagtatgaatttaggtagatgcttcgctgattaataggacaacattaggtggttttataactttagacttggggaatattcatatctcttggacactatggaatggttggcttatggtggaattggacatacacctctcttcctctttcaaaacccctaaaacctgttttccggtggggtttgggtgcatgccagtcgtgggaagtagcaccccggccactataaggattaagctcgggcctctgttgcaaagcactaccgtacttccacatgtctagtgggtaaggcttagtttgtggctcagtctggttataaacaaaagtacacggatggagatggacgaagtcggaggtcgatggacatctctaggacaaatgaaggctacacgagctgcggcccggtagtcgagatgtcatggcacagggccggtgtcctgctgctagggggctcaatcctgcctgcctgtcccgggggttccggccgtaggtggggttgggtcggtactcttgtctatggctaggatgggttggaaactatgtcacgtcttccgtccgtataccgtggtggtatgtggcacgtggttacacgtgaggaagatgtgtcttgtgggtaaagatgtacacctctgatcagagtataatctattcgaatagccgcgccctcggttatgggcaagccgagcaatgtacccaagttagtgttttaattcttaaaatttgcttaacaactaaaatgtggaatggttggcctgggttggcttgggacgagctgggacccagggtcgggttgccagttcggtctgaatcatcgtaggccttgggttaaggcaggttcgtgagggttcacggccttgattaataacactgtgtaactctaggatcgtcttataaaatggctttgggcaactaagtgacttttaaatgctgttttctgcaaagcttaacccctatatttttaccccttgtacccccttgcattaatcatgcatctgccggtgtggcttgctgagtgctgtggttgtactcattcttgctcaatcttttccccccccttcagtaagagaagcttaggagaagaagtcttaggtggagtcctggcttataccccagttgagcgcctgtgaagatggagccgtaggcccgcaagtccgctgctgtttatgttgtttgtcaggcctaggtgcctttgtaataatgtaaatattatcgatataataaagatgtgtcttttatatcatgtttgtgtggtgtaccccggcttttcctgggacggggattaatacactagcgttcgggaaaaggcaattttctcggtcgtgacaagctggtatcagagccatctcgactgtaggataagccaagtggataaaacctaaggacatattttataaataaaactatttgcgaaagttccttttttctccttcccctaatgctatttgcaaaaggtttactcccttcttcctttttcggatttccactagtacttgatggttagttttgcaaagaagaagatgtcgtcaattgtctgccgaagctccagaaggctgcaggatccgctagtgaagtgagggaagcagtgaagccagcggtgaagcaggagtgaagatcttggagaacccgtcacagaacctaagccaccctctagggtagagtcgttagtcgtgtgtttccttgcttgtgtgtgtagcgcgtggtttgcatcagtgggttgtgatgtaaccatgctaggttgtttgcttaatcaacttgcagaataagtgaaacaaacaacacatcagcaagaagagttagttcctttaaggtcctgtccctagttctggtctattctttcctggcttgtttcctctctcacctcaatccctatcacagatgtttaacagagaaaaaggaaagaatgtcagcgggtatgcctctagtaacttaagtttccaactcaatccaccactggcctcaagagagttaacaagggcacacccttggtccattccaagcatgctgcttagttcacagctaccattggttggaagtcaagaccaaaatcggtatgtgtttgatcgagcatttgccacccaggtcaatgagcttccaatgccagaagagcatgtccccttttgtcatgattgtagagaacaaggacactatgccctgaattgtccatgggtatatgccaaagaagccccttcctttggtttagcagggcagacatcgctaaaccagcctcctcacaccaagtcaagcttgcagcctagtgtgcaaagtagagagcccaatggagagaatccattgaataccgggaaatgctttcctcctagcctttcgcaccacgtggggtcacgtactaagcaagccaaaggcaagaagagtaagaatcagaagagaaaagcaccgatgcgaactgaagaagaagtacgtaagatgactattaccaacaccgaatggcctccagcagggataactattcctagacgtcaaagaggaaataccttccgaggtgcacgacagttgacccagcacctcttaagccatggcggcagagtatctgatagtgaagggtcagatcaagtctccttggattatgaagatgagtctccccgacatgtcggcagggatgagatggaatcaaaagcatgcccccattgtggagaaattggacatgttgctagcatgtgtctcacactctgccctcattgtgaggaagaccatccaccaggtgaatgtcccacccgcaaggtgacatgttttctgtgcgaaggtacaaaccatgtgcccaaggattgccaactcagtgtgttgttgaccaagaccgcagaaatccaacgaacaaccctacgattgtctcatcagctagtcagctccaacaacaacatcgacgatatcatccacagcaccaatgctcctcctgctgcacctgactctgcaataaatcatagcaataataccttcagcaccaaccattctctgcaccgacggcctcagcaaagaattgtcgtcgatggaagaagttgtgtctctccccgacctactccaggccgagcaaagggcaatcaacctcaggagggcgataccaagcagaagaccgttatctgcttcgaatagcaatcagaaggaagcttctcctgtgaatgatagcaatatacagtcctatcacatcatcacagaaccaatcaaggatgcagtcactagaacaatgccagctatatctctccagaatcagaatgagtatccatgtttgtgatttttagttcgctacttatcacgtgttgtcgaaagtttgcagcaatcatgtaataaataaatatattcatgtctataaacagtgagcttgctatgtttatggatgattcctgttgaggatacaatgtaccgatgttaagcaccttccctttttgtttaaggcagggccttgtattcgtgtaataagggagaaatgtgtaatacagacaagttctaagaggattcttttggaagatgcagatatgtgatcatgtgtataattgtttactgacaaaggagacctagggtctcgtgtcagaggaactatattctaacctcgagttaataaccaacctgttgatggaaaagaaaaccaattaaactgtgttgggttaaaaagccaatgagacagtagttggggataggagtttggatacgccttttacagatcaagataaggattgttggatgaaacccataagggtacccgccatgcctctacattgataagttcggatatacctacaaacagttaagaagatccaggggacatcaatatttgagaacatagtagtcgatggttggtaattagtctatcaggtatcagaaaagggtcaaaggtgatatggcagaagaacaatttggatgctccccatctcgaggaagcactaaagaggatcatcggcaattaaaccctagtggcatagatacagatagcaagcaatgtatttccctgaaggtagtcagtgcagctttttgacgaaccacttcaaggtttctctgaaagacagcacgcccaaggacctcattgccccagaagcatcctcaacacccggagcgaagagtacctggttgagaaaggtcgaaaggtgattaatggaagagatcggaaaagatgtttggttactgggaaaagaagtagaacgaaaggtgattgataaaggataacgagaaccatgatttgtgtcactcgaggaagactcccgatagcgatcaaccctacaacagttgccctgtcattaaagtaggtgaattcacgagtaagagagatgaccacaggtagaagtacttctatggggacaaggatggaaacttttgtgacatgaccaagaagtcaagaagtaaaaccggaacagtggaatctaaagctcggttcaaccttgggctttgtatcagatgctactagaataaaagcacttgcactagtatcgttcaacgcactttcctagcaatcgatccatcgagaaagaacacatcaaggctgaaggtgtaaaggaatacgttgaatgctaaatgataacaacataaagagaatagtgggaagtaaactaaatgtaaggaaagtgaatccgagctgcttgttcgtgagagccattcccagttatggaacaagtgatatgtttgaagataatctatagaggtcagatcaaaatcacatctaacaacgaagcttcagatctggcaggatcacgatcagacaataacaagtccagcagcaaagtcattcgggaagacgtcaaagcatgtcaagtgggataaattggttctcttgggaagcataacttatagtaagagtggttgacccttgcatcgaatagcagaagtacctagcaccggagaccaggaaagctaatatgagacagttaatggcaagttgtcaatcatggtatccttagtaagcgggatatcatagtctaaagcatatggtggtaagctggaaggaaacgccaagcatggtattctcatgatgacaagcatggtatcctagtaatgacaagcaggttacgacacatgacatgaagttgataacttgtgtgaggttgacgccgaagatatgaatcgtgagaagttctggaacggaagcatcattaaactaccgcaacctagtctgcgtcagctaaaaggtgcaccctggttcgagtcaggtgaaaagaagattccacctgcaacaggagatcgagccaagcagtccagagtggagaagttttgttaggcaagtttgttatagaagacggagcggaagaagtcagacaagaagagaagaccgcccaacctatcttcttgctaacctcctcgaatctcggagacgagattcttgtaagcggggtggatttgtcacgtcctgataaattcatcccgaaattaaaaatcattttctaaaaggaataatagaattaattaaaattcgaaaagaaattggcaaacactaaaatacgtacaagaaaaattcaaatgtggcccggagaatttttgttaaattctccttagtctaaaaagagccctcaaattttagtggaattttcagagcacaaataataattattaagaaattaacaaagttaaaatgattttataaaaagaaaaatcctaaaaagtccttttttccccctccccctcttgggccggctcggcccatccctccccctctctctcctcttccccgtggcccattcggcctcctccccgcgagcgtgccgctgacgggcgggtccgcccgccaccctcgctgacgggtggggcccacccgtcatccccttcctcccgccgctcccgccgcctcgcccgtgccctagcgccgccgccgccgcaaatcccgccgctcccgtccgccccgcgtgcaatcaagaggggggaaatattccccgtgattcccttcctctttccccccatttttccctccctctctccctcggattcgttcggaatctttccccctaaacctcgccggcgcatcaatggcggccggatcttccgcgcccgtttccccctcatccggccgccctctctcactcccaaccctatataaaccctccccgtgcctccctccaccgtttccgccactcgccgctctctctccccgccggaatcgagctcgcaccgtcgccctctctctccgtcgtcgccgccgagctccggtccaccgccgttgtcgccccggaccacctctcccctcggcgccgcctccttcggcttcgccgcatccccggcgacctcgtccacccctccgtttcgctcgccgaccgccggagcaccgtcgaccccgtccacccgagccgcgccgccaccttcctccgctccggtcgccgtttccgtcgtcgccatcgacccggggtgagccgtggaccgccgcttcttttcccccttcccttcccctccctcggccgccgctccgccgtgcctatggccgccgccggcgaccataggggcgcgggcgcgccgcctcccgggctgcagga

SEQ ID NO: 27421 - DNA, 7027 bp, Oryza sativa
atgtgatcatgtgtataattgtttactgacaaaggagacctagggtctcgtgtcagaggaactatattctaacctcgagttaataaccaacctgttgatggaaaagaaaaccaattaaactgtgttgggttaaaaagccaatgagacagtagttggggataggagtttggatacgccttttacagatcaagataaggattgttggatgaaacccataagggtacccgccatgcctctacattgataagttcggatatacctgcaaacagttaagaagatccaggagacatcaatatttgagaacatagtagtcgatggttggtaattagtctatcaggtatcagaaaagggtcaaaggtgatatggcagaagaacaatttggatgctccccatctcgaggaagcactaaagatgatcatcggcaattaaaccctagtggcatagatacagatagcaagcaatgtatttccttgaaggtagtcagtgcagctttttgacgaaccacatcaaggtttcactgaaaggcagcaagccaaaggacctcatcgtccccagaagcgtccgcaatccacattaaagaataccacctgttagagataagctgaaagatgattgataaaagagattggcaaagatgttctctagcaggaaagaagtaggccgaaaggtgattgataaaggataaacagaaacatgctctgcatcgctcaaggaagacccctgatagtaattgccccgcaacagtcacctggtcattgaggcatcatgaagtaagcaagacgacctaggtaaaagtgtttctttgaaggcaaggaatgaaatctttaactcggtatcagatgctacacggagtgaaaagtgcaagcaccggttaccaggcaatgccatgtcttgggagatgatccaatgggaaagaacacatcaaggttaaaggtgtaaaggaatacgttgaatgctaactgaggacaacctgaagataatagtgggaaataaactgaatgtaaagaaagtgaatccgagctgcttgttcgtgggagctattcccagttatgaaccaagtgatatgttcgaagatagtctacagaggtcagacaacgaagcttcagatttggcaggataacgatcaaacaataagaagtccagcagtaaagccatttgggaagacgtcaaagcatgtcaagtgggagaagttggttcggttgagaaacataattcaaaggcaaagttatcgacccttgcatcgaatagcagaagtagctagcacccggagagcaggaaagttaatatgaggcagttggtggcaagttagaagtaaatgacaagcatggtattctcatgatgacaagcatggtatcctagtaatgacaagctgatatcgacgcataacgtgaagtgggtaacttgtatgaggttgacgccaaagatatgaattatgagaagttctggaaacggaagcatcattaaactaccgcaacctagtctgagtcagctaaaaggtgcaccctggttcaagtcaggtgaaaagaagattccatctgcaagaggagatcaagccaagcagttcagagtggggaagttttgctgggcaagcccgttcaagaagatgcaacggaagaagtcagacaagaagagaagaccacccaacctatcttcttgctagcctcctcgaatctcggggacgagattcctgtaggggggtggatttgtcacgtcctgataaattcatcccgaaataaaaatcattctctaaaaggaataatagaattaattaaaattcgaaaagaaattggcaaacactaaaatacgtgccagaagaattcgaatgtggtccggagaatttttgttaaattctccttggtctaaaaggagccctcaaattttacttgaattttcagagcacaaataataattaagaagatataaacaaagttaaaatggttttataaaaataaaagctctaaaaagtcccttttcccccctctccctcttgggccgcctcggcccatctccttccccctccctctcctctccccgctgcccattcggcctcctccccgcgcgcgcgccgctgacgggcgggcccgcccgcctccctcgctgacgggtggggcccacccgtcatccccttcatcccgccgctcccgccgcctcgcccgcgccctagcgccgccgccgccgtgaatcccgccgcccccgtccgccccgcgtgcaatcaataggggggaattattccccgggatcccctccccctttccccccatttttccctccctctctccctcggattcgttcggaatctttccccctaaacctcgccggcgcatcaatggcggccggatcttccgcgcccgtttccccctcatccggccgccctctctcactcccaaccctatataaaccctccccgtgcctccctccaccgtttccgccactcgccgctctctctccccgccggaatcgagctcgcaccgtcgccctctctctccgtcgtcgccgccgagctccggtccaccgccgttgtcgccccggaccacctctcccctcggcgccgcctccttcggcttcgccgcatccccggcgacctcgtccacccctccgtttcgctcgccgaccgccggagcaccgtcgaccccgtccacccgagccgcgccgccaccttcctccgctccggtcgccgtttccgtcgtcgccatcgacccggggtgagccgtggaccgccgcttcttttcccccttcccttcccctccctcggccgccgctccgccgtgcctatggccgccgccggcgaccataggggcgcgggcgcgccgcctcccgccgctgcgccggcgtggccgccttcgggcgcaccgtgcggctgccgcgtggggcccggctgtcagccgcccgcgcccttaggtgcggctgacgcgtgggacccccggcgccggccggtgtgagcccgggtgcgcccggtccaccatggaccgtggggctgccgcgtgggccccacccccgtggacccggtccgcgcgcccctcccctcggctgaagcaataaatccattttttttaaattaaaatttaaatgaagaaattcgcaaatattcatttaaagagcatataaacttcaaatggccataacttggccatttgaacttggaattggaccgttcaagtctctaatttttccttaagaagtcaagaacccatttttgtgctttgttcctgcttgttatatggagtttattagagtaaaagccttttcttttccgttggtcgtgtagacgctgcagcttcggaagatccgctcttcgtggaagttgaagccgacgtttggaaaagcgagcaaggcaagtcacatcatccttcaacatattgaatcccagcttataaaattatgttgctttaaattattgcattatcgctttatttaaattcccgcgttatcactgttttatctagccatgcctatttacctttgttatgaccttattattattgttattgttattattaccttgttcaccctagattaaacaaaaccccaactagtggacactctactcatggtaccactagtatggctttaggtagatgcttcgctggttaataggacaacattaggtggttttataactttagactttgggaatattcatatctcttggatactatggaatggttggcttatggtggaattggacatacccctctcttcctctttcaaagcccctaaaacctgtttttcggtggggtttgggtgcatgccagttgtgggaagtagcaccccggccactataaggactaagctcgggcctctgttgcaaagcactaccgtactaccacatgtctagtgggtaaggcttagtttgtggctcagtctggttataaacaaaagtacacggatggagatggatgaagtcgggggtcgatggacatctctaggacaaatgaaggctacacgagctgcggcccggtagtcgagatgtcatggcacagggccggtgtcctgctgctgggggcttagtcctgcctacctgtcccgggggttccggccgtaggtggggttgggtcggtactcttgtttatggctaggatgggttgggaactatgacacgtcttccgtccgtataccgtggtggtatgtggcacatggttacatgtgaggaagatgtgtcttgtgggtaaagatgtacacctctgatcagagtataatctattcgaatagccgcgccctcggttatgggcaagccgagcaatgtacccaagtcagtgttttaattcttaaaatttgcttaacaactaaaatgtggaatggttggcctgggttggcttgggacgagctgggacccagggtcgggttgctagttcggtctgaatcatcgtaggccttgggctaaggcaggctcgtgtgggttcacgaccttgattaataatactgtgtagctctaggatcgtctttataaaatggctttgggcaactaagtgacttttaaatgctattttctgcaaaacttaacccctatatcattaccccttgtacccccttgcattaatcatgcatccgccggtgtggcttgctgagtactgtggttgtactcactcttgctcaatcttttccccccttcagtaagagaagctttggagaagaagtcttaggtggagtcctggcttataccccagttgagcgcctgtgaagatggagccgtaggcccgctagtccgctgttgtttatttttgattgtcaggccttaagtgcctttgtaataatgtaaatattatcgatataataaagatgtgccttttgtatcatgtttgtgtggtgtaccctggcttttcctgggacggggattaatacactagcgttcgggaaaatgcaaaattttctcggtcgcgataggtattcaggtagcagatccaagcagctattgaaggaggcaaaatcaagtttgacgactctaagaggccgatgaatgttgatggcaatccttttcctgttaatatggtgcatacaactggccgaacagccgatgggggccgtgcaatgggttttcaggtcaattcgactaagattatcaattaatatcagaggaagtatgacaagcaacaggagaagcattacgaagaagatgacgatggctttgatcctcattggggttgtgagttctttagattctgttggaatgaaggtatgaggctgccatctattgaagactgtcctgggtgcagtgatattgccgagagttcaagccaatcatatataaggggcaatcggctaaggctgatgagagttcctgttcatcaaagattgggtccagtgagtcaagatcgtggccagaaggacagcgaaaatagaaaaaatcaatggtgtccatctggtatctctacgaagaatcaaaagagaagggttcaaagattgaggaacagggagcgctttcaggaggtcgagcaggaaattaaccatcggctaaagaaaacaaagccgacgcaggagtggcgtgttaagaatcaagttcctgtagccgatgaagccacggccgatgagccaaaaaggttggctaaaggaaaaatcgttgtagctgcttcggtcaacatggttttcacattgcctgccgagtttgggatcaagcaagccgatatcgatgaagttgaagaagaatcggctaaattaattttgtcgccagagcaggcagtttttgataagccagaggggacagagaatcggtatcttaagccattgtatataaatggttatgtcaatgggaagccgatgtccaagatgatggtcgatggtggggctgtggtaaacttgatgccttacgctacattaagaaagctgggcagaaacgatgaagatctcatcaagacaaacatggtgcttaaagactttggcggcatccatcagaaaccaaaggagttttgaatgtggagctgacagtcggcaacaaaaccatccctacaacattctttgtcatcgatgggaagggttcttacagcttgttgcttggaagggattggattcatgctaattgttgttttccttcaaccatgcatcaatgcttgattcagtggcaaggcgacaagattgaaattgtgccagccgacaggtcagtcaatgttgccagtgccgatttagctctttgggagatggatggtcttgattgtttatctggaaaagtttgggatggagattttctaaaagtgttcgattctaatatacgccaattgaagatggaaaacacaagctattattttgagggcatcgtggagggttcagatgtctacaacaaggacacagtagatgatctcaatgacagacaaggacagggttttatgttggccgatgatttagaagaaattgatataggtccaggtgatcgaccaaggccgacatttattagtaagaatttatctgcagagtttagaaccaagttgatagagctgttaaaagaattcagagattgcttcgtttgggagtattatgagatgcctggactcacccgatcaattgttgaacatcggctacctatcaaaccaggggttaggccacgtcaataatctctgaggagatgcaaagccgacatgcttgaacctatcaaggctgagattaaagggttatatgacgctggttttattcgtccttgccgatatgctgagtgggtttctagtatagttcatgttattaagaaaaatggcaaggtcagggtgtgcattgatttccaagacctgaataaagctaccccaaaggatgaatatccaatgccagtagccgatcagttggttgatgctgcgtcagggaacaagattttgagttttatggatggaaacgtgggatataatcaaatctttatggctgaagaagatatccataagatacttttagttgtcttggtgcaatcggcttatttgaatgggttgtgatgactttcggcctgaagagtgctggagctatatatcaaagtgccatgaattacatataccatgatctaatcggctggttggttcaggtttacattgatgatgtggttgttaagtctaaagaaata

SEQ ID NO: 27422 - DNA, 12081 bp, Oryza sativa
ttaattccgttttggtaccacgtaccgttctgtcactaaaaaatatacacaccaggtggcatactgttatgttttttatgatatcatagttattaagtccggattgatgaataaactaaacaagctctctgttagctggtcaagtggttagatagtcggtaataaaatatttgctaccaacagaagcgatgagacggtgggttagctagcgcgcatctctcagcccctgcgacctgacgatgaatcccaatggttaggcatatgcgccttgagaattgaattggggcctcgaccagccagaccaacaaagaggctccggttattgttgaccgttggtccagtccaatccccttcaggtcttgaagtgagtagcctagaacagagcgatgcttttctaacacatctttgaggttggaggtctcgtcagtagacagcttgtcgctgatggtgacgggcgactccgtatcaccatgcaagaaggtataaggaaagcctgaaagaagagatttgagctcatctggaggtcatgaatgtggatcagttttgggtaactcgatcatctctctatgatcgtcctagctcctcgacgaatgcattggcatcattttcgaggagggattcgggggcctcaaaaggagagatagccatcacttcctcaattggctcggaatcaggaatgggttccatcatagaatttttcaatcgcaagatcaaaatgaaaaacaccattttcccgagtttaatgtcaaggactccggtatgcggcacatcaaggagaagtttctctatgggatggccaacgaaaagatcgaaataagagactttcaaaacattgaagtcgaggatagcttcgacatcattgtgctggatcgacactctacgaagaatcccataaccttcgatgatgggactagaggggctccagaagtttttgtttgttggcgcaaatagttcgcccccgaagcaatttaatgcaaaggttgtagacataatgtttgcaccaacagtgggattatatagagtttgcaccatggcctctctcatcagatatggaatagttaaggactgggagctaatatgaattacttcagaagaaacctccatctccattaaccactcatcactcatgatggtagttaatttctgcaccgtctctttgaagagattctcatcgagtggtgcgggagaattacacgggaccggtggtctcttttggtaggaataatttgaggtgtttccataatgttcaaaaagatcatcatcaaactggaatgggaatttcaaaggttgaatttcttctaccttcagttctcgaggtttgggtgagaattcaacggtcgaatccaatatcggtcgtcgatggttcctcacgtgtattctttattttcaagacggtttcacaacgaacgaaggaggtgttctctaggatacaatccaagagctccctactttctaacgtcgttttgtgtgcgaacgaacctccggtggaagtattgagatacatggcagactccttatctaaacccgagtgaaagtgttataacaacgcatgatcgggtgcagacaaatctaggctgtcttgagttaacaagaacaaaagagcccatactgcaccattggatttttttctcattctgtcaaaagttgagaacctccttatgtatagagactacacgggttaacaggaagaaatcaaggtagaacctaccttttgattcctcccattcaccatgcagttttcttccggtatgggtgtaccattgctttaccccctctataagagagaagggaaacaatttccaatttaagcttgtttgtgtcatgcccgcgattgtcaagcatgagtacaattgctcaaactaacgcagatgatggtagggattttcgatttcacgtcctaagaaggattgttcccgaaccatggctataaaatcagtatggaatttatagctagatgaatggataggttttgaagaaaaaggtgactcacataacttggcccttggaatagaaagattttgaaaagaaaggtgctccatggtaggtaagaagagaaatgaaaagatacgaggatgaatcaggttcgaatatgatatagcaaccgttccttggcaacggtgctagaaatgtttgttggtatttgatacggcacaggtcaatccgcaagcatatggagaccgctgtagcacttgacctcagagtattttaagggtattgaatcacagggaacgtgtgtgtatatgtaagagtagaattctattcaaggacaacaactaatgatgggctaaggctaaagaggattcctatgggttaatttactagactggagttaaaggtaaaaccctatcgattgctttgggcactggctctcccctagtctgtcaatctgagttcggcctatgactctatgatgtaactgaacatggagggatgtaaaggacggacaaagctgtcaccacctagcacctacctcactttccgtggaccacacaacaaatgaatgtaaccgctaacctagacaccatgcctaagttattgattactactctagcctcgcataggaagttaggaacttccttctttatccagagtcctagtactagagcacttaataattcaactaagcgaggaacccataacgatgtgaatatgtctcactcaagcaaataaattagataccataaggagatctcgaatacttattttattaaaagaagcatccgtcgaggaacaagcttgacaagaaggccaacaacacatgcgcttctctagaattccagtggaacaatgtcaacgaacccggcactcctccggacttcccagagagaacgtcgatatttgggacactccttctagagcttccccttactatctacctaattccacatactaaagtgatgcctaaaatatgaaattgagttgtacttcacttgagttgtgtgttttggatgtgagttgagcctctccttttatagcctccatataacggttggaatgacagttgtggaggttggtgcacccacaaccaccatcaacaaccaatagtgggtcgccaagtgcaaggaggtggcggggagaggggaggagggtggtgccaaccttggtttggtcgaacccctcgttcgatcgaaccaggcacaccgcatctagccacccacattctctagtgtatgccaggtgagtgattatggcggttggcaatggattagctcaaatttagtcgattttgactgacatgtgggctctccgatccttgtgcttacgtatgattggtcagaggtacatttaatcgcatgacgagtgtgttttccttcagaaatcaactacataccactatttaccaagactagaggaaatagttagtaataaacccctaccaataagtttgatattatatttggtattcttttatgtaggagttgatagtgaaagttcgcacttaatgaccatcaacaataatcacagatatccaattaaacaacccaaaaccgattccagtcagaaaccagccagttagatcgtcaggctggtcggtttgaccgcacaacacacgccggtctgaccggcctagtctatccggcctgaccagagcacataattagcaccaaaccacttcgccaataatctccaaatatcaaaaccaataacctaccatgccaattgttcatcatcaaaatataatcaaaacacacattgattttacaatagaatcatgtcagatgatacaaattgatcgatatagtgagatgatagtgtgcacatgtaggtaaaaattaactatactacgcaattaggttaagaaaccacaataataaaaatcataaacttgttgtgaaaagatactaatgaagctaagatcataggggttcactaatatgatcctcattcaggcagtgtgctgaacatatgacatgcacatctgaaaatatttccatggaacaaatgtaacagaaaattgaatcatccgacaacatatggttggatctacaaagcaaagaagaaacaactaactttaaacaatcaaatggtcaaatcgaacagtgtaaacaaaagaagcacacatgagcactgcaaattaaggaggaaaaggtcattggaggtggtggtatccgaagcttagcgtcaacatatatggctactgtctgttagcaataaggtaatgcatgttgttttttcatcaggccagtgccacaccacgtgcgaggcacgccagggcaccacttgccatcaatggagaaaaccagctgcctctagcaccacaactccacaaggagaccctactaatcaaagaagaaaccctaagtacttcacgtggtacatgggcctcatgtggtggctattgcgttttgttcatccaacgcctaaaatgtaatctaatctagtgatccaacggctgagaattgatgatgacgtggaacattgaggtttgagatttagggtcttaattgcatttagtgtgtcataactttataaagaagggatttagtcattggaatattatatgcacacaattgaatgtaataatgataaatgtctgttattttattaaactctgaaatggcacatcgatatcggtttgtctcagaaagttccatccctagaaataaatcagaatagcctccgaaatgggaatgataaatgttgacagtcaaaaaatggaagttcttgctagaacctttggctgcacaagtggggagatgcccttcacttatctaggtttactaatggggaccacaaaaccaaagattattgactttgcccctctggttgacagagtggagagatggctcccatctatagctgcttttctcaatcatggtcagagactaacaatggtaaattttgttctatatgctccccctaatttctacatgtgcactcttaagcttcaaaaaaagtgattcaacacatagacagagcaagaagacactgtctttggaggaagtcaaatgatccaaacactaagatccactccttggctacatgggacctagtatgccagccaaagaagaaaggtggtttgggcattataaacctggaactgtaaaacattgcccttctgaccaaacatctggacaagttcttcaacaaaaaagacctgccctaggtaaaactaatatggaacaagtaatactctttgtctgactctcctcatgctcacacataaaaaggatccttttggtgtaaggacatttttagattgattcccatcttcagagcagtctcaaagatcactattggcaatggggacacggcccttttctggaaagataactggtctggcaagtttttacaagatgaaatgaactccctattctcttttgctaagaataaggacatctcctgtcaaagctttttagagctcgagagtttagaacaggcttttcacattcctctctctgttcaagctttacagcaatggcatctcttgtccaacctcattcaggaattgcgcaacacacaatgtttggatcaatggtcatatcagtggaattcgcagcatttcctctccaggaaattctataatttgttctttgctcaaatccagcatgctgcacccatctcttggatatggaaaacaaatgcaccctaaagctgaaagtattcctctggttacttttgatggatagattaaacagcaaggacctcctacaaagaaaacatttcaatacccaaggaaatgatagatgtgtaacttgcaactccttgaccacagaagactcattccatctgtttttcacctgcagctttgctcagcaatgctggcacaacattggcattaatgggaattttcacacaaccttcatggacatgataatagaagcaaaagagaattttcaatttcctttcttcatggagacttttgcaatctgctgttggaacatttgaagcagaagaaatgattttatttttaataatgttccagtcaattttcaaaggtggagatctgatttcaaggaagagtttactctacatatgcatagagtaaagaaatctgaacaaaccctctggcaatcatggattcagccttttgattaattatttcccttccctctgtaattctcttctgtttttttctccttttgtaaattgttcccttggtttcttaacaaagcacagtaagagcctctcctgttgttttacccgtaaaaaatgggagtgataagtttgatcactcgacaagtgctatatgctcaacggctcttaattacagttttacttctgtttaaaacaaaatttagatccataaaaactcatgcaatttctagatataacagtattttaaacagtcatttttagacaagaaaaaaaattgaactttctttaatgtgcatgcttggatgggggaggagtggcagcgggggagaaggagggaggacggtcgagggggtggaaaagcggtggcggagtggatgttgtgcgctcggtcaaaaagataaagaggaggaggggcaagatgcctaccggtttttttaaaaaaccgacacctatgcatactttataggtgtcgattctattaaaaaacaataactatagtattggtatcagttttttctctataactgacacctataatataagtataagcgacgattcttttaaaaaaccaacacctataatattgttattaattttttctgtagaaccgatacttatagtatttaaaggtgtcagttctatatttttttcaacatgtgaaagtggaaataggttcataggtgtcagctttaaactgacacctacgaaggattagtagtgattggctggtgtggctgatgcgttatacatcaaaagatgtatacgcgcgattaatttaactggtcaagcccatgacagctaaaaacaaaacctttcttggacaatagaaaacgaaaacatccgcctctgccatataaaaacttgaccaaagtcaggcatgattatgaagcactaattagtgcacatgatctaggtgtttggtctccctaatctcacaaaacaaagacatccacgaccatgaacacgcaaaacagctcatgcgacattctgtccaaacaacattatacacgcagacagcctatgtaccacatacacacatacaggaaagcaaatcatattaattagtcacggatgaacaatcacaacatcgacccctgctgatggtgatattttacatgatggccatctttcagtaacttcatctacaggaaattattatttttatataatttcatgaatggaatatatgcccccagtccccagatatatatatatatatatacacacacacacacaatgaaaattgttttttataagattgacaaacatggtacaatattaatttgacatccctataaaattttcaagtctaatataaacacacttctactcacaactgaattagtcttgtttgtgtggtgatagattccccacatagatcagaatccattttccatgaagcacaggtgctgattcacatgattttccatataggatcgagcatatttctgagcaatcaaagatataaagatcaaaaaaataccctgttccccaaacccaacaactacgtaaatgcatgtccctctcaaaacctcaaattaaaattgactcacccctaaaagttttccagccccctcagtgggccccactacacacgatcagcatgaagtgaacacatgctttcacacaccatagtctctctatatacatctctctctatatatatacgcactaacaccaatagctaatgatgcatgtaaaatacataaccctcacttgatcatcatcaccaataattccccatttgcaacacacaccatggatttggagagctgcagctacgtgctgccattgctgacgtgctgcctcttcttgctctactccataacctgctatgccttggcggcggcggccggcggcggcggttcttgcggcggctccgacgatcacgccgctccccggagctacccgctggtcggctgcctgctcgacttctaccgcaaccgccggcggcttctggcgtggtacacgggcctcctcgcggcgtcgccgtcgcagaccatcgtcgtcgaccgcctcggcgcgcgccgcaccgtggtcacggcgaacccggtgaacgtcgagcacgtcctcagggcgaacttcgggaactaccccaaggggaaggcgttcacggacgtgctcggcgatctgctcggcggcggcatcttcaacgccgacggcgagcggtggttcgcgcagcggaagctggtgagccacgagttcagcgcccgcgtgatgagggaggcggtgggcgtcgcgctggagcgggaggcgcgcgcgaggctcctgccggcgctcgacgcggcggcggagggtggcggcggcgtggtcgtcgtcgacgtgcaggagctgctcaggcagttcgcgttcaacgtgatctgcagggtggcgctcggcggcggcggcggcgaggtggcattggcattgccgctgtcgaggctggccgcggcgttcgacgccgccgcggcgatcagcgccaggcgtggcgcggcgccggtggccgccgcgtggaaggtgaagcgcgcgctgggcgtcggctcggagcggcggctcagggaggaggtgaaggtgatacgcgacgcgatcatggagttcgtccgtgacagcagcagccgccggcggcgggagcagctgctggcggcggcgcgcggccgcgacgacctggtgtcgcggatggccgcggcggggtaccccgacgaggcgatctgcgacatggtggtgagcttcatcatggccggccgcgacacgacgtcgtcggcgctgacgtggttcttctggctcatgacgcgccaccgcgacgtggagcgggaggtcctggacgaggtcgacgcgtgcatgggcgacggcggcgatggcggtggcctcgccggcgtggacctcgagggctcgcgcagggcgcgggtgctccacgccgcgctctgcgagacgatgcggctgtacccgccggtggcgtgggactcgaagcacgcggcggaggacgacgtgctcccggacggcacgcgcgtggggcgcggcgaccgcgtcacctacttcccctacgggatgggcaggatggaggccatctggggcgccgacgccggcgagttcaggccggggaggtggcttgcggcggcggcggcgggcggcggcgtgtcgccgttcaagtacccggtgttccagggcgggccgcggacgtgcctcggcaaggacatggcgttcgtgcagatgaagttcgtggccagcgccgtgctccggcggttcgagctccgccccgtggcgccggagggctcgccggagttcgtgccgctgctcaccgcgcacatggccggcggcctcaaggtgacggtgaggaggaggcagcggcaaaatggcacgtgcgagacatgaagccaattttagtatttttcttaataggttcttaatagatgacgctgttaacattcgaatatacgtttgactaattatctttttaaaaattttttaatgtaagtgtataagatatgaatcatgcttaaagtatttgtgaaatatattgtatatggtagttagatattaatatttgagtcataatatcttatactgcgaatatttgactcattgtggattccttcagttcttccatatctgtaatttttctttatcttcttcccatgtactcctatatgtacctgcctccgcaggcttaatacaataagtcaaatattcacagtattcctttcttcctataatattcaatatggtatcagagtgggcgatctagcgccgctcgaacgcttccgccactgctgcccctcctccccggcgaggagtagcgatctccaagggcggccatcatttttcctttattttttccatcgtctgcaccgttgcctggaggaattgattagagtcataatagaatatgattgatttgtgtgtggactccttcatatatgtaatcttttcttatcttctcccaacatacttctatatataccggccctataaaggcttaataaaatgggtcaaatattcgtggtatttctctcttcctatactattcaacaggataaaataactcacaataaaatagataataattaagtaactttttaataagatgaatgatcaaaagtgtgttaaaaaatcaacagtgccatctatatttaaaaattgagggagtacttattgtatatctatacaaatattctccattgttttgatttgaatagatatatgtacctatggtgactttaagttgaatagatatatgcattattttgattaaatttaacgaaatttctactttttattttctgaagtgccgagtatttctagtaaaatcattgggttaagtattacgatctttttaaaatagagtaaattacacctatggtacaataagtagacaggtgggtgcgatttagtacaagaatttgagaatgggacgtttaagtgcaataacttggcaagggtgcgctttaataaaagaatttggtactttagtattttagtacaataacttggctagatatatgctattttggttaattggtgctatgtatgttttttcacgatgttaatttgtcatcacgtagcaatcccgaagtattatcttataatgtttgatgtaatctataagaatatattgctcaactaatttgcaccatcgatttagattattttttttcaccgtctcaaataccaaatagaaaatttctacgcagtatgacaaaaaaaaaagtatgcctatacaaatctacataagtatgtcaataactgaataactgtgtgtacgtaaaaactgagttcatatagttaaaaattctcaaaataattaaatttttacaccacttctcaagtagttgtacccatacgctcatttattaaattcttatactatgttgcacccacttatcaagttgttgtactaccatactcatttatcaagttcctacactaaattgtatttacttgtcaacttgatgtaccatgaatatatataactaaactattcttttaagtatgtgtattatttcactaaggagaaaacgatggggagtggcttaaatgacgccaaagaaaaacaacagacagaaagtagaagataatgttggatagtataggagaggagataacaccatagctaagcattattaacacttacgttatgacaccaatatctcaattttgtagattttccattgacaagatcgtcatgcaaaagccagtggcggactgatggatgttattgtgtaattttcgctatgttttgccctagtacatatgttaaatgcttttgtgtacattttttttctaagtttgaaaatctttatctttatttgtaaatattcctcaaatcaaaatttattcatttctcgtccattttctaggaaaagagagttaagtttggtctataatgtaggatatataagaggagcgtgatgaggttaaatcatcactggaagggtgagaaaagcgatcgaccaacgtaacctttttttcaagtaccggaataattagacatacgtagttcaaacagtattttcaaagctttaaaaattaaaactctatatgtttaaaaacgtggtatccactttatgacccatattcacttcaatgtccttcccacgtactccctccatactcgtaaaggaaatcgtttaggacagcgacacggtctctaaaacataactttgacttcttattgctataaaaatatttattgaaaagtgatatatgtatacttttatgaaagtatttttcaagacaaatctatacatataatttttacattttcaaactcaacaacttgagagttattcatgatttatattcgtaaggtttgacttaaacattgtcctaaacgacttcctttataagtatggagtagtatggcggtagctccacatggccaacatttgccctctccattatgaaaatactccccctggtttgtatgtcaacttaaacacagttaaccacagtgacggttcgctaggatgtacataaagaaagggcttaagagtcgagtcttgggggagcctaatacactattacttagtttaactatttaattagttacataattatatgtgttat

SEQ ID NO: 27423 - DNA, 751 bp, Oryza sativa
  unsure (1)..(751): unsure at all n locations
cctacaactacgagatggtccaccgcgtcggctccttcgccgtgccgctctcccgcgacgaggaggccgccatgcgctcctaccagttcgtccccgtcgagacgcagcacggccgcctcgtcgtctctgtccagtacctccccagcctcgctgccttcaatctcgagatctcctccttgtcgccctccatgctgatcgccgactacgtgggcagccctgctgccgagccaatgcgtgccttcccagcttcgctcacaggagccacaggttccgctttcccgcaggcgctgtccaatcagccgcagcgcccgcacagctgggcgacgccagcgctctgcccgcaggcgcctaggcagcaagctagattttcgccacctcatttgctcaacgcatcacccactccatcgccacccaattttcccagcgggtatcttcaatctcgtcctaagggagggtctgcaccaatgagcataccacaggtgggtgacaggaggagcccaattcaccggccgatcacattgccaccaacgtctccgaggagagtaggggagacaggaacatctagtgcacaacagtctccatcagagagatgcccctcgtttgggagggcagatggatttcgaataatggatccctatgcaagcctgtcgccaggacgcaaggtgatccatggntttaaagcctacaatatgctttcaacttatattcgatacttgcgtatgccttatcttcatcactgctcaatactgga

SEQ ID NO: 27424 - DNA, 1144 bp, Oryza sativa
tatgtgcacgatacacaggcatacctgggtaatgatcaaagtatgaatttcccatttcctgtgtagggtagaactttacatcattgcgcacctgccgtaattttactaatggtgtacgaatagaagcctgtcaaatagcttaatatattcttttcgactaaatggtttgctgagagcatccaataacctctgcttgaaatctgaatccggtctactgttgatatgtgccggccatataacaccttgtgacccctgcatattataatatttttaagtaataagagaagtgcatcatgtaaacaagaggagaaaaaacccttatagtagattttattgtttgtgagataaatgcaaaattgccagatcaattggagaacaatgaaatactttagcatgtacattacataaccttagtatttgagactaattcttctttgaagagtccatatgggtgttactgttactgttccataattcaagtaggggaaaatttgagaaatatcatcacaaagatatgtgagcctggaccctctcgtgtcaatgacacatccgatggtatttttcaactcagtgatttttgcggtggtaataggcaaattggcccataaagtggaggggatgttcagcgtgaatttgctagagaatagtgttctggttggtacaatacagtatcagcttattcatacatgtccatcaacaggccttttgttgaatcgtactgaaatatcgaagactactatcatcttcttttgcgtatattctattaggcgaaaaacagagaactatttctggactgaaaacgtgtatacgctgctcaattcaaagaaacaacagtgccacaggtaacaacgattggagatgtataaaaaattctcaccggggggatggaagggccggcattattggaattgcttgaactcatcttcctcttcttcttactatctaatgttcgcacggatgcgtcacccaccgccacccagtgcatacttttgggtccggaagaattaccaccggctcgtctgaatccatggccacctctttctcccgcgcatcctcgacctcgctgctgctctcggaggacgcggcgcacgggtaggtgacgacggcgccgtcaatctcgagcaccatgttgtcgttcaccacg

SEQ ID NO: 27425 - DNA, 552 bp, Oryza sativa
ccattgttgagattgaaagccaatcagctgtttacttggggggcagagcaatagaaggctttggataatattaaggaatatcttagctctcctcctgttttgattcctccacaaaaaggagtaccttttagattatatctatcggccggtgagaagtcatcggctcagttttgattcaggagcttgaaggaaaggaaagggttgtattctatctcagtcgtcggctcttggatgcagaaactagatattcccctgtggagaagttatgcttgtgcctatatttttcatgtacaaggttgaggcaatatctactatccaacgaatgtactgtcatatgcaaggccgatgttgtcaaatacatgttttcggctccaattttgaaagtaagggttggaaagtggatattctctttaactgagtttgatctttgatatgagtcgccgaaggcaattaagggacaagctatagccgattttattgtggaacatcgtgatgattcaatcggctcggtcgagattgtgccatcgactttattctttgatggatcggtgc

SEQ ID NO: 27426 - DNA, 32971 bp, Oryza sativa
  unsure (1)..(32971): unsure at all n locations
aatcaatgcacacagcaataaaattgaacagatatcacctaacttatcgagttgcctgcgttgcttttgctaaatgaaaacacatgtcaataattgagaaaaaccattttggagtcatatcacctaacagaaagcacttgtctctatcacatgattcacgccttgtgcatatttttatgttgtgtctatgcaagcgtgtgaattactgttgggtaggccatgggagtatgatagagatgctttacattgtggtaaaactaattcatgcactttcacatataatggtaacgagttagagttgctaccaatgagccctgctgatattttgaaagatgattatgagagagtaaagattaaaaacaatgagccctaccacctgcaagtctaaaattatatgtataaaacctatgctggaaaacatctcattgcaagtattctctgatttagcaaaagcattggtttcccctcatccctcacttccaattggacctcacaggccccatggctcatttggcatccacccagcaccccctagacccatatggcagtcacaccaccgccctcgacacgtgctggcgttagaacgcgctagcacaccctgggcttggccacctccaccttgacccgatgacttcgagaacatcctcagaccatcactccacaccgtgtctccatcatccctggttgcgttctagccattcccgctgggagataaagctcttagcaatcatttccacctcgagatcttcttcgggcataaaaaagatgacgtcctcccttacaaatgagtcaagattttccctatctctttgttccctcttctcctcaccacacctaacaacttttgtttttgccttagttacttttgacttgtgggtcaatggcaacgcaacatgcgttccagcacacatgaagagtgtggccgtgggcgtcaaccctccgctgtgatcacatcgggcctcccctggacaagccacaagtcctcagagaatatccctcggttatgctgagtgaggagaacgccctttgtattccttggctcggccatccagattagccttccgtttctccgcaattgttgagcaatagatcgatttgttgcatgtgtaacttcctagtattcctgctaacactatgcatgcaccttcttgctagcctgatggccctaacttgccaacgctgtccgtgcaaacccatcgccgcggccaagccctgcccggtatgtagacatcgttgtccaagtttcaccaagccccgtgtaaccctaggtgagtctactagtacaacccagtcaccaatgcatgcactggtttgactcgatttgagccagagcatgaaatgcataagcatgccgaaacaaccaccgccacctcattgcacaaaaccacaaccccacagttttgtacattttaccttttggtcttgaccctatctaaggtatcgttcaccaccggtgagggctacaaatattggacatttgtattgagccttggaggtcagtatacaaggaaggtgctagagataaggaaagactctaatcaaatcaatcatatcctgaataatggtgcagaacaaaattattagtggttggatctatttcttgcatggggacgattgtgtcggtctaaccggcagtcagaggtgcggtcggaccggccagatggccggtcagattggtagtctatgtggtcagaccggtctgatggttggtcggaccattggtctgtgcggtcagaccggcatgatgaccagccatatcgacgataggagagccggtctgaccagtaaaaggcacggtcggaccgcccgcagaactatggttatcttcgctcccggcatattgtgttgccgctccatcagttgtgctatagatgtgattaacatagacttggctagtacctgcaaccgaattaggttacaaattgcctgtgagagccgaattcggaactcataaattattcaattcttttataaaaataataactcatagcatactcaggtttattataaaagtagcggtaaaggattcatctacggaacttgctacaagcttttgagcaggacgagcaatgtcatcaacttttacctcattgacggtgacttggggtgtaaggccggtgttggcggctattaaatgccaattttatgccgcccatacctacataaaacataagttctaacacatccaacatagtggtagggtttaattttgacagattccacgagtgttggtgtatatttggatgcgggtaataaactgctagagtggggagcacatctagacttaaatagagaagaactacatcaatataagaattgggctcacaacttcatcgaaacattagaaattgagcccaactaatatagaaatggaccgagggagcagatatggaggtccaggaaaaaagcccacaggctgaggagctagccagggttcagccgaaccctaggttcggccgaacccaaatcttggctattggcctcctcctttcacatggatgctctagatgactccaaaatgacagttgcgtggcaattcagacatttccaactgtagagccatcattggaagcctataaaagggcctcactcccttactttacacacatactccgagcttgagctgaattataagaggctctattgtactttattctatactagattagggagagaataaggtagaagaaatcggagaaattccggtgttgtcggtaatcttttcttactttttataccttgttaattactctgatttaataaaaatattcttctgagtaattaagattttgctttgtgagaattatctcttgtttagttcctattagcattcgggatcattgttcgctacattgaatatatagtgtttactttagtgaattataaacacgagagtagtaactaattgcttaaacgtggtgtttaggtagttaattttcagtgattgctgcgtatcccacatatcgttagaggttggtgtagaggtagtgacaacccttaagagcaccgtagtcctccctatctgggtacggagtaaagcgtgttctggtagcagcgagcaagccagtgcctgatattttcttataggattaaaccaagctttctatagacacagtttctcgctaggaaatcctctctaccattttcctatctttgcttcgtgtccttggttgaacctagagaagagttgaacacacatgttccttgtggaaatcgataccttggaatactcccgggtgaagcgctacatcggtatatccgtgcgcttgcggattttatatgtgaccttaagaaataccaatagtcgagcttaccaataactcgttgacgagtcttgacaaagcatcccgccaaaagggcctcttgcgtcgcgatgtctgttggtatttcttaacgacattactagaaatataaatcccagcaaaggcgcataaaaattcgtggtatattatggttatagagttcatccgcaagtgcacggatataccattgtagcatttcaccccagagtattcaaagggtatcgtatttatttaatcctgtgagaagatcatagtagagagaacctgactaataatttatatgttacttgtaataatcatagactaataaaagcaggggttaagataatctaagggtagagtgacacacaaataggggactactcattctcatactaaaatatctaagctaagtggaaataaaatagaaagagaatctattcctatacttctagtatacatagtatacatacattctagttatctgacatactagctaataccctctatccgatgcactcctggtacttcgagaagccactcctgactatcgagttccttacgatagcctgtcataactatacaaccggggctaaatacagaggagtaccctccacaggaaattaacttaagactatatacacgcacggaggaatacccatactaagctgtcaccatcagcggcccacctctcatccacagcatataaccccaaataatgatatcccgtaatctagacaccacacctaaactaccagatactactctaatatcatcgtcatgatataaagtaattgcataagcaaacactatacccgtaccaatgcatctcccaaataagctagcagtacaatcagtataacatgaacataatgtaaagttggcattcataaactcggtaagtatttcaataccataaatgtataaggaagagtattctaataaaagtacaaagcttacaaaagagaagagaagagctactagggccatacccgaactcttccgaaggcttccggactccaatttctactctattcctatttcactagcttgagaacactaaactaactcgagagaatataagagacctcttgcttaaggtgtgtgactgaagtgagaatgacaactccttttatagccttccaatgatggctgtgacagttggaatggtcggaaataccctccaaccgtcttgggggctaatccacaccatccaggcgaagccctggatcggatggcgctgaggagcctggttcggccgaacctggggctggcccaactagcccatgttttggctggcggcctcctctgttgcttctcttcgcagacctgtgtcaattctgagttcttggtccattcatacataagtctgattctcaacatcgtccgattgatttttcgtttgatttgatgtcgattctccgccactttatggttattctctacaaaatgttagtgatcctactagtggaatattattattctaacatggatatgcattgcaagcataactagttctcctctattttggtaatattgacgggcgaaacttatcgcaaacgaccgtcaataacgtcatttgatctcttgacattattcctcatccaaatcctccaaagtgatggggaggaagttgcttggattcacttcatgcttggccatgatgttgatgaaggcattccccaacggagtcgccaaaaatcgtgttggcaacttttatggcaagaagaaaatcacgatcgggacacttaaatgccttgtggtgatatcgagccaccaatcacttcaatctagtaaaagctagatcaagttaggggttttgatagattaaacaggctagcggagccaatttggagaaacaagcaataaacacccgtcttgtgtacgaacggaaggtttacgggatgtacaagggatttcgcactcccttagaaaaggtggacgatttacagtgcaaatcgacaaagatagatgaactaggctagacctagacaaaagtagatgcaatattgaaaaagtgattcaattggctaaatcgtattgggagtagattctttttccaattgaaccagccttgtcccatttaaagggttggtcttgcctcatacaggtcctcctccacgttcaacttaggatagaaaccactacaaacccgaaacatgcctccccgagcaagaaatccagagacccgacgaaaacagactcggaatcggacactatcgatctgatcgaccaaacaacgccggtcagaccgacccacaagtagcgatctgaccggttcacagttgacggtcactccagctccgtgaaggaaaccgatgctcttcaaattttggcaatattttcctaattcgactatagctaccaacaaatcgaagcttctattgctacataaagcagacactcggatgtgaattttttcttcttcttttttaacagattttcatataaataaaaaaaagccagtttattgtgtagtaagttatcaacgataagtatcgtccactttttgtgtgcgctatggatgactaaggtcatgaatacggttactcaagatatcaataaattggtaaataatgggtcaaaggtgattactagcagctattgactaatattttgattcaaaattttgattgaaaaatcctgtttttattatactacctccgtttttttcatatatgacaccacagacttttcatataacgtttggtcattcgtcttattcaaattcttggggtaaatatgtataaatatatgttaaggttagagttgctttgatgataaaataagtcaaaaaaaaacaagcagagagtgtttggtggctattgatttgaacgtgtggcaaagtacaagcctgatgatgaagacgacctcacctgccgacttgctgagctcaaggcccgtggctgagggatttcagtttagctgataccgaattggaaaagaagccagctgtaacgctccgcttttcgtgagtcgttaaaaactaattcggcaaaatcctaattgcgaaaatttccgttctttgtgtgcgagtctaagttgtatcgtggatctcaattcaatcccgttgttccctctcatcgaaatcaaatcctcctcctcgaaatccctattccgattcaagtattcgaaattcaaatcctctcttgaaaaccttgcgaaatatccgcccgactccaaaaatatccaaattcccattttgaattcaaattcaaactccatatcaaatttctatccaaatcagatctcccagtaaaattctattttgcctccttctaattttggatgggtcggatccccctctcctcggcccatctcctctctcagccgtccctcccctcccctctctccacacgtgcgttgcgcgtgcgccgcgctcgagagagagagcgctcgttctcttctcatccttgctccctctctctctctccgtttctctctctcccgtcgaagcttccccaccggcaccgattcccgccgccgccctttcaaatttctgccacgccctcgcatccgcgcgcgcgctcgcgcgtggccgaccacccggtcgccgcccgtgcccgcgctgccgcctgcgtcgcgtgctgcaacccgcccccactccctgtgcgcgtgcttccaaaacacggagctagagctcgcccccccccctctctccctccccaaaacggcatggtcaagcttccgttttccccattctttttctctctttcccaacctcaaccaccgcacctccaatgccgccgcttggccgctagctccgagcacgaccgctagccgagctcccatgaccacctaagtcggtttcctcccccaaaaccgctcgcgcccataaaacccgagccgagctcctccccctctatatccctctcgtttttgcctgccgcaccattgttgccgcccctgccctgcagtcgccctcgccgtccggcaccgaagcaccagggaaaccggtgcgtgcggggacgcgagacgaggactccgggcacctcttcttccccttccccggcccaaggccggagagctcgccccgcgccgtcgaccgtccatcactgcccgcccggctcggtagtgccttccttctgttccttttttctcgctcgctctcgcccctccttggctcgcgttgtagctcggctagcctcttgaacacgcgtagacgctgccgctagccccgccgccgcccggcatggcctcgccgccgttgccgcccgctcccggaggccgccgttcatcgccggccctcctcggtgctcttccaccccatccgacgccggaaatggactccttgaaccccggagatgctcccacctccttgaattgaatcctcgtcgcccctccgccgtttcccccttttctcgccgccggcgtgcgccgccgcgattcgtcgtcgccggcccctcttcgaaggatccaagccgttggctcatcccctcccgtggccccccttgtaccggtgaactccctctcgattgaatcgccgcgttgtgcttccggtgaagtcggccgccgcccgccgtccattttccggctggcctcgtcttcctcctctcgccggcccgcgtggcagccacgaaggcggcacgttggcgccacctcagcatggaccgggtcgggctaaccccggtcagccgcctccctccgctcccgctcgcacgcgcgcagtccaccgcgagccatgaggctgcgcgtgggcccgccgcacccgcgtccaccgcgcgccgcgcccctcccccaaaccctagcgccacccctcccgtgagcccttccttcggtgaacccggtcactgacaagcgggtcccactcgggaccacgcgaagtggacctagcccaccggctccccctccctctctcccttccgcgcgcctcctgggcggcctcttctcgggccggccagcccatttggctcggccgagccgcacctttctctcgggccacgcccatgccgcccgagggaagtctatttcgtatccctccttcctttgtcccataaatcagtgccttattccaaaattccatagaccatttcctttggtcccgcacgttggtgactgtcaataatattcttgagaatattatttctataaattccagaaaccattcctcttatatatatatatatatatagttcctcggccctgaagttgaagatgaagtgaagcgaagattagggtttcgtcctggttcccagccgtcgcctgtggtgttgggtgttagttcgttggttccgctgctgctgttgttgttggtgtttcctcgtccgcgtcatcgattgcattctcgggctattctgagctgcaatctaagttaaggtaaataagtcctctatatattttaaggattgcaatgaatcatatttgtcaccgtgggtaccagcactatgtcctgggactggtaccgtgatcgcggtttcgtaggaagcggttcgcgccgtttttcctacgacacgctcctgtcaggtgctgttgtacggcggtgccagattggggtgtgacaccagccagctagcctggcagccagcccaaacccaccagcctagcattgctgaaaccctaactctcgaacccccatccccagccgcacttgcccgtccgccgcttctcctgacgcgccaagccgacgcccgcctcctgccctcaccatgccaccttcgcaccaacagcctcctcctccgtcctcctgtcacgcatctgttgccgccgatagtccttgtgccgagctgtcgactgccgcctctactttttttcccccattgccccgctgtgccggtcaaagcctcgcggtgcgtgatgactggtgtgtgtgtgtggacgaggtgagggcatggactatgagcagtaccacctcagtaatgtttaccatactgtttttttttttggatttatgtgattatttttgggattattggtttgttgacgtttgatgtcacggttctggtatttgcatagtatggggatcgtcggtgctaggatatacgcgagactgaggtaaaagagacagagaagaggatttttatacaggttcgggcccctgagttgtcaggtaataaccctacatcctgttggccgaagccggtcgttgatcttattcaccataatcacaccagtacaatatttggggtagcctatctaattgttgtcgacatggcagtctgacaatctgactcgtagtcaacaactgggtagccttcctcctcgaatccgtgcccggcgagatcagagagagcgctttcgtctctcctgacagtatccggagacaccgtaggggactagccgtgcttatccctgaagtcgatatccggcggcgtgtcttggcttatgttcgcttctatgttgtggcttctatgtcgattgtgttctatggtgggtgtgtcccctctcctcctagggggtattgtatttatacacataggtgtccccttgtccaagtagaactagggaaaccaatatggatacaatccgagtagtccttgtcgttttcatgtagaactctggttatttttctttattcggaactccctcctatatccacaggttgtttccttataggacatggtatgtggtgtaccctgccgagatttggtcaactactattaggtatgtggtatccataacccataaccctgacatggttggtgtagttctgatacttatgctcgattggtttgttaaccaatctttgatttctttttattcgtccagcatccgtgactaggattttgtattgatgtctaattttctttttctttgatgtaattgctcgtgtgtggatggagggcgctgcttggtcggattgacggaaaaaaaattatcgtgacaattggaaatttataaacttttaactagttattaaggtggtgtttggatccagggacttaactttagtctctgtatttagacactaatttagagtattaaatatagactacctaccaaactaattacataaacgaaagctaatttgcgagacaaaatttttaagcctaattaatccataattagagaatgtttactgtagcatcacataggttaatcatggattaattagactcaatagattcgtctcgcgaattagtccaagattatggatgggttttattaatagtctacgtttaatatttataattagtgtccaaatatctgatgtgatagggacttaaaaagttttagtcccatctaaacagggtctaagatatagagtttcttctcctttcctcatctgcatggcccaaaagcccgtaatttggctgtacagcgcagcttgatggcaaaccagcccatgcatcaggttccgttttcctttggaataagcccacttggactaccttcagtggtggtcgaatctaatccgtatcccttaagcacagtaccggatatctggacccatcaactattaaaaccggtgcaatttgactcgctcagcagttttggagggtggtttcgctaacatggcgcctacgtagccgtgttgacctggtcttcgttccacatgacgttgatgtggcgcttatgagcattagaattaaaaaatatatgagggacccatttgtcatcctctctccgccccacatgtcatcctctctcctccccttctttctcctccctctctttatcccttctcagtttctctgcccatttctcttccccttcggactcacacggggagcgggggctggatctggcggcggtggcggcgggcggggcctttctgcgagccgtggtcggagctgcacgtctacgggtacaacagcaacagcggcggctgggtggacccgacgcgtgcagccgtgcaacctcgagcggagtggcggcgaggtggcctggacgcttcacggcaccgagaggcagagaagccggttgttctcccctctccttcctgccaccacggcgacaacgttgagatgacggtcagcccaaatagtggcgcaggcggtagagagaagctagcgcccagacgacgaccttcatctgctccacctagacatcaccatcgtgtacaccgactggtatggcggcacgtcttccagcttaagggtggacgtggtccaggtatacccacgggcctcgttggcccgtcccacgattttggcatcaatgggcagatgggtcggtccaaacaaaaacaatcagctctacagggtacccgggtcggcttcattaggacactgaacaggctgagcgcgacaccccttcctctggcggtggtggcgcgagcgccccttcctctcaccgtctcacggcggcggcgaggcgcccatcaagcgcggaggcggcgaggttcagcttcctctcatggtggcgccgctccatcgtgcctgtcggtcccccttccccactagcaccagcgtcaccgctggccgagccgcgcctcttcactaccatcctgtcgtccaccaacctccttgactccctacttgctaccctcctttgccacctctccctgcgcctatctccgccgcctccttcatggcgatggcgacacgacctcatctagcctcgatggcggtctccatgtcaacagttcctcctgtgtctggtgatggtatgttccaactagccaacaactcctcttttattgatttcaatccaagaaagcatgtttttcttcttaatttcgatctactgtttccttgccaagtattggcggattgctagctaataattctgtaattcttttgtaacgtgggaataagttcatacaaattgaattttcagtttcagcagaaatttttacagttcagttttagcagaacacttagttcagtttcatcagagagtttcacttcagtttcagaagaaattttaagttcagtttcagcagagattttatttcagttggctgatttcttgacaaatgtgcagaccagagctctgcacaatttcttcctcccacccttctgttccttttttatgctccttctgtgttttctatattcggcctggagtcctcatgttgaatacaagtgttatcttggtatgagattctaaagttttgtgtattacatctgtgatttgtatggattgacagagttgtgtgtattccatgtttgaaattgaatattcggcacttggtagaatctgatgatgctttgttgttcatcacgtgttaattacaaaaatcaatgatagcacatactgatgggccgacccattctacccaatggatccaatggacaatgggtcgacccactcggtattgttataaaccatttgggtaacatggtctaagtatgggtcgacctgtcccggaccacacccacccatgttccagctttgtggatgcacgagctcattttttttctttctttctacatatgcagtggctggctggttgctgccgtgccgactgctactgttgtgcaccagtagcatttcgtttgaggcttttcagctgcctgagcattagaaagaatccacatacgcccggtgctcgtttgttggttgccttactttactggactatggcgacgagcggagtggcgtctagctgcaggaccttgaatccttgatgcaacagcggcggccttagcagctcgaggcgcagctacatcgacagcgcggctgtggcaactcatccagcttcgaccctgtcggctgcctccagcttctgcctccgcaatccgctattcgctgccaggctcgaatccatcggcaagtccgcgcgccgccgcatgcccgcattcacggccctccggccacgaactgccgaggagccccaatccaggatgccattgacgccctctcccaggaagggctgagtacacggaggcgaatgacaaatgggtcccacgtaattttttcattatgatgccacataatcgccaaatcaacgccatgtggaacgaagacaaggtcaacactaccacgtagacaccatgtcagcgaaaccgcccttcaaaatcaccgagggaggtaaattgcaccggttttatagtttaggggtcgagatatccggtattatggttcagggatacgaataagattcgactgctagttaagggagtcgatgtgaacttattccttttcctttcccatttttttggtgtgctgtccagaatccagattgatcaagaggccgaaccaggcgcgatgatagctgcacaagagacaagctaaatcgacagtaaattactgcaccacgtgttccaatcaaattatggggattccaccggctttagaagataagactagaaaatctacgtgccaactaatttgcaccttggtttttccatatacaatattctatttacgtaaaaatcatacacttatcccttaactggatcaaacgtttagggatggatcgatgtatggtactccctccgtttcaggttttataaaatgttttgactttgattgattttaaactgctttaagtttaatcaaggttataaataaatatagtaatatttacattatcaaattagtttagttaaattagtaattaactatgtttttataataaatttatcttgagtcgaaaacattactattttttctaaacaccggtctagatgattctttaacagtccatcgaaatactgaaacggattaactaatttaatggacttttaaaactaaatattcaagctacatccctcacacccacatggaccaaactctgcaaaccgaataaaaagccttctgaccccttgagctcttcggctgattttgacttgttttaaattgtaccaaatatatcttcggtcatgttctcatattttctggttgttgttcatgtgtgtgccccagcttcaacaacctcttcctgaactgatgtctattatacactcacgtgcaccatcctctaaatcagatgcagcctatttttggacctttagacttcagcacccaaactttcttcctcggtgaactacctcttccttgtacaacagattgattcttgctagacggtcatccttgccatgtgactgttttgcaaaattcaatcgacttacattaatagccgattgtattttctgataagtattacaatcactagtagaatgatcaaacaaattatgccacttacaaaacttggcatatttatgaatattttggttgtttatatagtactattttaacttggcaattctactagggaattatttttataattctatatatttagctcttctcttatgtcagttatattacctaatagatataattaaatattactaaataattcatataaagtctaaaagatgtaaactcgtgtttatgcttcaactcaattatattgaatgcacgtgttggaaacttagactataaaatcaatactcctcatcgaaaaatacatgtacgaggacaaacttgttattcatccctactagtttatccaatattcctcgtatttgccattcattcttcaattgccagtggccgataaaaactgccaatctataactgtatagttagaacacccactaaaacataatgtataccatactaaccaactatataggcgcatgcaaggataccaattacatctaaaactcaagatataagtatgctaaatctcattccacatatcattttcacatctcaactccatataccatttgtacaacatcatatagattcatgcatatatattccacagtaaagcgcgggatgttgtccattatatataaaaagttacaccacacttatttatttggaatgatcacaattaatcacaaacaacccaagcgagcacacacaattttgtctagtttcacaacaataaatatacatgatatagactagccaacggacgtctgctcattgaagaatgagtaacaagttcaaggatagacctcgatgattgacctgaagcccatgactggcatgatcttgtagctactaaatccagcttcaacgaaaagtttcttccactcctgttcatctcgctcaacgccattgacaaacatgatgagcgcgtcaaacaagatctgcacatctctgtgcttttggtcagatgggccaactccgaccactatatccatgattatcacctttccaccggcgtctctagatgggatggcttttttgcagttccgaagtatcttcacacagtcattgtcactccaatcatgcataatccactaaatatagaggaaacacatatatatgtatcaataaaatctgtatgtacatgtatacttctattgataggacactttaagaatattccaattttgataaatggtgaaatagggaatatttttagccataaacattagtgggaccaaactgtaatgtcttaaaataaaatttagagtcgatatcaattacaaattgctgattactattggactagtcatcaaccttaatttgcacccacaagggaaacatagttttgtaagataaatttagagaatttcagtgtagggatatatggaattaattgcggatatgtattttgagagtttagggatctagatgacacaccccttcatatatgtgtcaattagtgataaaataatttacaacaaattaaatgactgattaactccgtagatagaagagatagaaatatacatagatagcaactacatagaaaaaaagttggctaaagtccagttaaacatgtggttcgatatttttagacaaaaaaaccaaaatatacttgagagaatttcgagccagaccagtctatgtaccttgaggaagacagcattggctgctggaatactgtcaaacatgtcgccggcgatgaactcgacaccggtccccctgggtgcgtcggcgacgacgtgggcgaggtccatcacgctacatttcacctcggggaacgccttcgcgatggcccgcgccgccgcgccgttcccgccggcgacgtcgaccagcgagctgatcccctggaacacctcgccgtgctccctgaccaggatgtccatcatgaaggcgctgtccgacgccatcccgtcgttgacgaccgtgttgaacgcggcgtcctcgttggtcatctcccagaagctctggccgtgcgtgtgcttgaacatgcacggctcaggcagctcgagctggagccagtcgctgatccggaagaagggggcgatgaagcacgggtggagcagcatggacatcatgtgtcgttggttcccggcgccgatgaggaggcgggacaccggcgtgagcgtgtacatgggcgcctcgtcggcttcggctgcggcatcgccgggcgccggcttctggacggcgaagatgccagagagagtgagcacgcgcatgaggcggcgcaggcacgggatcttggaggggtggagcgtgaccctggtggctatctgggccatggtggcggcgccgccgtggtggtggatggcgtcggcgatgccgaggtccaaggcggccttgagagccatggacttgatgacggagaaggtgttgccgtagagctcgctcagagcatcgagcgagctggtggcatgttgcccgttgctctgaatgggcgccatggcactaccaattaattttgtcttccttttagtttggaatgggtttatgcacaagatgcactataaatagaggtctcaaattactgtatcaatgcaactcgttctggaaacatagaactactatactaggttatcagagaaaatgaggaaaaatgtactagtttcagggattccaaaattccaaaaacaaccagcacaatatcctatgcaattatgtaaccaatttttaatttaaattatgacatttggcaaaaatgtaaatgcacattaaagtatttgctgttgtttctattatttattgtgttgcttccatttgtcaatatagatgaaatgaaacaaacatgtccgctagaaggatctcgcggcatcatctcgctggagactttgcgtattaggatcatccaaacggacatcaaaacattttagtaacaaaaagtgacaataaagactgtttcgtcatatgtaactttacaaacatttataactaaattagacatactttaatcccctgttgacctaatttaagttattaaaaataaatatactctctctattttatattataagtcgttttgacttttgcctagtcaatcttttttagtttttactatgtttagagaaaaatttagaaggatctcaaaaaataaaattattttcactaaatgtaaaattgaatatattttaataatattttttattgaaaatgatattatattttttaataaacttggcccaatgtaaaaaagtttgactaggtaaaaattaaagcgactgatagtatgaaacgaggggtgtactgaccatattctaactcttacaagtcatctaagcccatctccacactactttcgaagaaatcagttgagacgaccgtgaatgaaaagataagttctctttaaaataagtcaaatcaatacattgaaactgaactaaggctgtgtttgagggagagggaattgagaagattgggaagatacgtaaaactaggtaagccattatcgcatgattaattgagtattaactattttaaacttcaaaaatggactaatatgattttttaaagtaacttttctatagaaattttttttaaaaaacacactgtttagtagtttaaaaaacgtgcatacggaaaacgagatacaatctcccctttctcatgtgaacgaacgcagcctaagtgaagcacaagtggaaaccaacggccagcatatggcctagcaacgaacaacttgggtgtgttcgtagaacaagttaccatccgggacagtgatcacggaaaacggaacaatctattagcacgtgattaattaagtatttaatatttttttttaaaaatgaattaatttgattttttcaagcaactttcgtatagaatttttttttaaaaaatacattgtttagcagtttaaaaagcgtgtacacgaaaatgaaaataaaaggagatgggctgagaaaagaggcatcacaacacagccatatatgcgaagcttgatgcggactcttggcttagccagtagccacatcctagtgaagcattattaatggctcacaaccatcgatgtacaatgtggccaatgggtgctgaccagcaactattggccaaagggtggtgaccagcaaccattgagcatggaaaaaaggacgacaagatggcaatagtaatagaattatctttaatattataaactctaattaagaggacgacatgatgggagaaatgaaatttatattactagggtactataagtatctgtttttctgtggttgataatggaagccatcaacaatggcattgtatttggcagtggtagaattagaatggttcatattgggattattatgagcagagggatgagtcctccactactgttaaggagtttgcgaggtcatttggattgccaaaaataaatactatgcaaacaccaatatttcttttgaatacacataatatttggttctatgtttcgttaatattggggaatgcaaatcattataaataaatatattatacgattcatattatgatagaatatattctcggtattaattaataattcacataacaaaattagactaattcaaaccacaatcataaactttagtctatggcacttcagctgttacaattgctccgcacataggaattatattacatagttaaaaaataaacaagcagatgaaaaagtataaatataattccaagatatgctagctaactagccacacagctatgtggataattcatttgcttacatattatatacatatgtgtgagtgtatgtatgtatgtatcaaaggtccataaaaaggattttgaattacacaattaaagtatacatagtatgaattgttagaaaaaatatgcaatcgtgtctaacttttagtcgttctgtgaaccaagtgacattgtcccatgacctgcaagtcaaaaaattacaaaattgtgagtttgagaactcacaaattggtgtttgcggaacttaaatcaagtgagagcagtgtgtcagctaattcttcttccattagacctccttgccgcagcatcatgccaggcaccgcctggctcttagcaaaagtaagggaacatcgtcaactaaacatgtcctacttgcagtgatagtaagaacccaaagatccgcattattcctggtgaaaaccaactatgaaaaatataaatgtgcatatagcagcatagccaagcttctcctccttccactgtatgtgttctgaaggttcaatcatgtatatatacttcctatttggaaacaatgaaagttcatagctacttgtgccttctttggttggtttatagtaatttactgtttgcgcatcatttagttaggctcattatgtcacctccggaaattcaatagcaatttcatcactaatttgcacatacaattaatcatcgtccaaccatcaactgaggtatacacaaatcgataattcaatatagatccaagataataaaaacattaaattcttatataagaggaacttagtcctcacaaaaaagaaaacagcgacagaaatacaatctagcggtggattcagctcaactcccatgggcaactcaactagattataagccaagcgtcttctcgttcataatcattcttcaactgaggttgataattattgcaagaaatgtacatgcaatacttccacaagccacataacaattatgcaagtgtaatagtatgacaaaaggacatcatatgggggttcattcgcaaaagcagtatttagcaaatatttgacaatactaaaatagttgagtaattaaacaatattatatcacattgcacatcacaacaatgttgcacagttccaaccattttgaacaaccaagcccggttgcacagatctaaccccactcaaagagctaataaattattattaccaatttatttctcattaatgagttattgtgagagcaatcacgaaaaatattgttaggctctcccataaccactgccatggctatttgatcgttttttttaactctgaccagaggtgtacaaatttacccacaatacatgattccacacatcttttcatgtcctgaaatacccccatagtactacaaaggaagaaattgtgacaagactctttgcataacacgtcaaacaaaatatatacccactaattatctgtctccggtagggatagccagatacctagacagggagactacttagcacctaaacaactgtgaacatattatctaccgcttgttgacttattatctgtcaagctcaaacacacaccgtgacaccttccgttgggacatgtcatactacagatccaactattaaccatgttggcttatggttagtacgattaatacttcataacagtagctcacgaatcgatctttaattgttatgagcacgatcaacataaccatgtgctcacaactcaccattagttaagttttagttgaaattatgaacaaccacaaccgtcatcgtgatctttcattaataaccataattaatcatgaatgaatcattgtggccatggtcttgaaaatggcgaatgtgagagcatctggctagcgagcttgtggcatgagatgcacattgctctcagtgagcaccatggcactactggtttcgttttccttttcgtttcaaatgagttgatgcacgacgtacactataaataaaggacaaagggctcaaactattatcaccacagttggttctggaaatatggaaaaaaaagtattttttttattcttgggcaccccgggagtgcacatgttaaatcgtgtacggattgattgatacagtttggtctatttattgaaatagaagctagatgatatgtcaaatcaattctgcctttagcatttataaataccgctaattgcctctatattactagtagccaccaagtcgcattgcgcgactctaattaagtgcctacatgtcttcatttatatttatataatgtgtcgttgtagttgcgccactgtctatttgtgctgaatttctcatgaattcatgggcatgtttcatgagtaccatggtgaatgccagatgccgttatgtttttcagtaccgagcatataaaatttataaaattgacatcattgacagcattttatatattttcttaaagctacatataaaaaaggcttgaatggtggcttactataaattccgagtggcaagaggcaacatatgaaattgcatatagacttgatgtcccattattatatttgtaggtgtgtgtgtataatataattttgaagaccgaatagtaacagtagtacttgttagattgatctccctcccgttgagccgttgggctcaagggggacttgacccgcgccctgatcaggggcgcccagcccaatggctggtgggcccctatcaccctgcgccatataaagaggggtggaggccggggcggcgcacgacatcaggttcgctaccgccgccaactccacccacaaaccctgatccgatcgagagggggcgcaaccagtgacgggaaaacgccaccgccgcgccacgcctcatcgccacctacgactcccactgctacgaccaccgtcgtcgtcgagcacactgtcgccgccgtcctcgtcaagctgagcgacggcaacgacgatggccggcacttcctcctcatccaacgtgtcaaccggtcacatccctaaacccttttcccttaatctctattgttgttcaatcattcaaccaaatagaaccaacctgactagatctaaacctaggtgatcctagagagaatactaacaatggtatcagagctaccctagcgcatagatcggtttggggagagaaatccacaaagaaaaaggaaagaaaaagcaatgatccgctcggatcaaaagatcgaaaccttaacccttgaaccttaccttgtcgccggccgaacgttgacgccggcaaaggggtgaaagggggagggcacagggcaccgccaaggagcctctcgatggccgtgtgcgcacccgcaggtgcacgcgcgcgccggcgaggtggcccgtggcggcgcatcgccgctctctctctctccttcacttcacaggtggaggattagagacggtgggaggagaacagaaaagtgggcgcgccacagcgcgaggtcaccggccatggcgcgccggccatgatgcggcggcgcgaggcgcagcggcagtgcgacggcgcggcgatgcatgggccgtcaacgcagccacgcgcgcgaaagatagagagagagagtggagaagctagggtttcggctagctggcggctggggtcgggtttttgtccctccgatctcggcgcccggctgtctgatcgaaaccctagtgattggacggccggcggcggctggaccaaaatcggcccatgtggggagcgcatggcgggcggctttcccggctcaggcccaggttgcggccaagggaggggtgagggagcgcccgcgcgcatgcaaggcggcagtgggccgaccggcaaaggctgaaagagtctattttaggtccctcggggccgaagcaaaagaaaagaagtccattttttgtccttgtttcagaagcatttgcaattatagttattaaaatgtgtttatttctaagcaagttgaacccacgtgaaaattgtttagagaatagataaatgtgagaaatgcttctgaacatgtattttgtgtattttcatgcaaatttcaatggaattttgtatcgattttgcatgttttatatctgtttaaaatttgatccaaagtggtagtttttttacagagagtgaataacagaattttgttactgttcatatgaattttatatagatcttccgctgcaaatagataaaattgttaaaagttgtgtttttaaaataaattttgaaccaacgggagaatttaattttaggaacattaattttgtgctatgatgttgtaattttctgaccaacgttgataattgcaatgttatagttatggctctgtgttatatctatttttacccaacggtgatgtaggtctaatgcataatattttaatgttaattttgttctcacagctactccttgattggttgcattaaagatattccgacctgaaaggagataactacgaagaatggaaaagagaactcgaccttgcttttatcttgggagaggtggactgggtgttgactaccccatgtcatatagaacctgctgaacttgacagaggtgaaaaagagtcagatgctgaatggcaaaagagagagagggaccatgttcccctcatcttgtcgtatgacattgagcatgcgaaatggtccttagccaacaagaactgcttggctgaggtaaagaacacgattgagccaaccatattgggctcaatcccagagtgtgacaccgtctctgagtacctcaaaagtataaagagctagcttactagttcttcaaagacttatgcgacatagctgataaagcagcttgtgatagagaggtaccatggaggtggtgtaagagacgacatccttaggatgagcaacatagcttccaagttgaagccaatggatttgggcatctcagatgactttctggtccatctggttatgacctcattgccaaagcactttgacaactttattgtcaactatgaaataagtccaaataaatggaatttttaaagagctcatctctaattgtgtgcaagaggagaaaagaatcaaagagaccaatggtggctccattaaccttgttaaagataacaaggataagagccataggtcaccctcctaaaaagcaaaacagcctcagcatctgcctcagcaacaatagttcacagttgagacaggatcagtgtctccactgcaagaagacaagacattccaagaaagatcgtcctgacttcctgatagtgatcatggcaaagaaatgtgagaacattattacatttgtaaatgaatctcattatgattggttattctagatccacatagtggatttattctggagcaactattcatgcatgtaattgtttaaaggcattccgttcgacgaggactacgcaaagaagcgaaagatccattagagttgccaatgaagcaaaagttgaagctgttggagatcttcacctagagctcgtgaatggcttcacacttttacttcgagatgttttttatgtcccatctttgcaaagaaacttaataagtgtatccaaattggattttgatggatatgattgccattttggaaatggcaaatttgaactatggtataataatgcatgtattggtcttgctgtgttgagttcctccgcgaggggttttctcgttctcggtgaacccctgtggagatagatggcctggcgaagtcgatggcgccgctgacggagaaggtcttccagtcgatggattggcgttggccttcctggtagttcccatgtcctgtgtcaaatgtcttaggaaaaaagtgtaatatagttatggattttgatgggattgtaagaaatacttgtggaatatctaactaagctttcttactctggatgtagtgtgtatgagtgtcttctcacttcgcgactttgatcagtcgtttgagttatacactctccctagcccccagccttgtcatcggagaattcttctcggaagataaggctcttggacctttgacctgccttggttgaacaagcactgatcctagcccccagccgtgaagttggaaagtttatttccgattacacggcttggttaatacacacggcgagaactcttacacgaccagatcttacatggtctttcgtctctacaggatccgacaagaccttatcggctctgggcgtccccagccgaagttcccttaggttcctcggaggccttgtcaagacggcgtaaagggacatgaggataggtttcaacgctaggtgtcatctgggtaagggatcatcgggaaggaacactttgattgtagtctatacctgaaaaataggctttattgaggctgtaagatgtcttacaagtatggatactattgacttatacatagaatttacgtaattgatcaatgttccaggaatttgccaactcgcgaccatcgctgtctgcgattttgaatgcgcctggccgcagaacttgtgtgatcgtgtacggtccttcccatttgggtgagagcttgttgcgccctgcttggctttgaacccgtcggaggacgtagtcgccgatcgaaagtgtgcgtgctcggatgcgcttctcgtggtaacggcaaagggcttgttggtagctggctgctcaaacggcaactcgttcgcaatgttccttgaatagatttacatcgtcgtatcgctgctcctcctgatcctcatcgaagtacttctgtactcatgtactttgatgtcgtagctcggtggggagcatggcctctgagccgtacacgaggaagaagaatgtctccttgttggaagttgtcggtgtggtacgcacggcccatagtactgatggaagttcttcgacccacttcttgtcgtgtgacatgagcctgtcgtagacgcgggtcttgattccttgtagtactatgccgtttgccctctagacttgtccattgctttgagggtgagaaaccgaggcgaagcagatcttgactcccagcctgatgcagtaatcctggaaatcggcactgatgaactgggagccattgtctgttatgatacggtggggcaatccgaacctgcagaatatccctctgatgaatttgatggcgttgtcggccttgatttcccccgtgggtatcgcttcaatccacttggtgaatttgtcgatcgccacgaataggaacctgtagccgccctgtcctcgtgggaatggcccgagtatatctagcccccagcacgaaaacggccaagtgagagggatagtctggagtgcttgcgctggcaactttgtgtgtttactgtggaattgacaggcttcacaccgctgaaccatgtcgcaggcgtctttgagggcggttggacagaaaaactcttgttggaaagcttttccgactaatgtccgaccggcggcatgttacccacagatcccttcatctatgtcgaggaggaggtgtctgccgtcgtcggacgagacgcattttaggagtaccccattcgttgccttcttgtatagatcgttgccgatcatacaatagacttttgatttatgggatattttctcggcttctgcgtcatcctcgggcagctctttgctgcatatgaatttaatgagtggggtgcgccagtcgtctgtggtatcgatatcagcaacggcgccctctgcctctgtagcccccgagctgatgttgggggcgtccgggctatcttcgccggttgcctttttaactgatggccttgttaggacgtccagaaaggtgccaggttcaagtggttctcgtctggacgcacgtcgtgctagatcatccggtttattgttgtctttgcggtatacatgtcggacctcgatcccatcgaaccttttttctagcttcctgacttctgcgagatacttggataactcgggctagagcacttgtaatctttatgcacctggttcgcaactagtttggaatcccctttcacgatcagtcgccttactccgagtgcagctacaactcttatcccggcgagtagtccttcgtgttcggctgtgttattggttgccctcaagttgaggtgaattgcatgcttgaattgagtgcaataaatgcctcttcggcctcctgtgtccatacaaatttgtcttgctttttcagcagagcgaagaaaggttgtcctcgctctcccatcctagcgacgaacctgcttagtgctgccatgcatccggttagcttctgtacttctttgagtcttgtaggcgactccatgtcctcgattgctttgatcttctcgggatttgcttctattcctttgctagagacgaggaagccgagtagcttgcccgatggtactccgaacgtgcacttttttggattgaccatgaggcgatatcttcggaggttgtcaaacgtttcccgcaaatcgtcaattaatgagtccctttgcttggccttgacaacaatggcatcgacgtatgcctcaacattgtttccgagctggtcgctaagtgcaccttgaaccgtgtgcctgaaagtgtttcctgcggttattagtcccaacggcatcttaatgtaccagattaccccgaacggcgtgatgaatgttgtcttctcctcgtcctctttcgccatgctgatttggtggtaatcggagtaagcgtcgaganagctcaacaactcgcaaccggctgttgagtccaccagttggtctattcgaggaagaggaaagtgatccttgggacacgccttgttgaggtcggtgaaatcgacacacattctccatttttcgttggccttccgcaccctgactggattggctagccactctggatggagtacctctctgatgaaaccagctttgagaagcttgtcgagctcttctcgtatggcttgttttcggtctggtgtaaatctccgcagtttttgttttactggcttggcatcgggtcgcaccatgagtttgtgctcatcacctccctgggtacccccagcatgtcagactgctgccaagtgaacacgtcagcattgtcatggaggaaggtgatgagcgcgagttcctatttctctcctagtgatgccccgatcttaacggtcttgttggggttggcactgaagagtggaacgatattgattgcgccgtctggttttggcgtcttgtttgtcttgctcactttcttgggtggctctgctgtggcaggcgggctgggcgtatgctcgaccatgtcgaggctccgcttgtaacattgtactaccagcttagcgttcccttgaatagtgattgttcccttcagtcctgtcatcttgagcacttgatacgcatagtgagatgcggcaatgaacttcgcgagtgcagttctcccgatgatggcattgtatgctgtatcgaattcagcgacatcaaaggtgatttgttccgtttggaagttgtttgcttggctgaaagtcacaggcaacgtaattttacccaatggtttggacgatgactgaggagtgattccatggaagggttgatcggtgggcatcaactcgcttcgtaggatccccattgcgtccaaagtgctggcgaagagaatgttgattgagctgccgcagtcgatcaagactcatgcgatctttatattacgaatagtgggttcgaccatgatcggatatcgccctgggatgatagcagtcttggggtggttctcttctgagaattctatcttctgctcggaccacttcatcttgggcgcagccccctgccacgtcgaacagacttcacgttccgctttcttgtaatctcgctttgaggagtatgccgtggaaccttcgaagatgtgtgagacatggagatcggaatctgggtatgctgagtccgattcctgagtaggcacctcaatgtccttctcaaccacgcgtactcgcttgcatttttccgatgccatgtgttttgcaagcgactttttgaagacgaggcaatcttctagagagtgtctgtccgacttgtgtatagggcaccatgctttcttcgtgtcgctgccttgtgggtctgggcgcttaggagggtccgcgtattctgttgcgagaacttccgattgagctttccttttcccactcttgcgatttttcttcttgcttgactcaggtgcgtacttggctggtttcttctctcctccggtctttggtttgtcgttcttgcgtctcagtgcatcatccgcatgagcgcattgattgacaatttcgaataatctccgagtagtcgtgacgcgccttgttgccaactcttgagtagtatagcgatctctgacaccggatttgaaagcgcgaattacagaagcatcggtgatctcggggattgtgtttctgcactcgttaaagcgccgaacataatccctcaaggattcacctgggttctgtgtcaacgcatgtaggtcgtcttcgatcgcatggcgcttgtaagttccttggaagttggctacaaacttgtgccacaagtctgcccatgaagagatcgagtaggggagagatgcatcagccatgaacgtgcagagcctttcaatgcggttggtaagtaattcaccaacgcgttgtcgcccgctccggcagcgtagagtaccgtggagtaaacttgaaggaactcttctgaggtcagtgctcccatcgtatttctctattgctccaggtcggaatctttcaggccatcgggcatcccgaagtgaacgaccgaaagctctacacccagcgctgggggcggtggattgtcggctatcatacgtccttcgtggatgtctgtctgatgatgaagatgacgaggatgatgacgatgacgatgggtcgcttggttccggcgtacgattacgaggatgtcagccgggttctcgagaatcctgttgtcgtctcccgttgttgtctcggcgccgatctccatcatcgtcatcattatggcgacgtcctcgaccagtatcgtccagcacctgccgttctcgatcgtcgtttatcacggtcttggtcttcgcttgaacggcctcctcgatcttcgttatcgtgacgctgtgaagagacatgacgccgggaacggttctcgttgtctcgtgtgcgtcgtgcctctcggcggccgttcaggtgatcgcggagatcgccggtgccgcgaggtggaggggtggctcgatgaggcgattcccggcgttcagggttttcaccattagcaacgctagttggtggctgttctgggtgcgctgcggcagcggcctcttcgaatgcgttgctgaggttggtcattgattcccgtagtcgttctgtccaatgtgcgagatcgtcgttcagaatgggatcgtaaggggtttccctcagtattgcgttgacggctctgatgtgctgggccggagtagtcacttgattctccgcttccgcattggtgcgcgctgacgtgccgacatcgtcgatagccaatacctcacgcggcgtactcgttgttgatgatccatagtcttcgatcaggtgcaagactgatggttcgtggggatcgatgtcgattaccccaacaaatcgatctgaaatcggcgtcactccttgttccttgtccttatccctgatggggatgcgtgactgctgtaccttaggaggtggcgtcttcatggcgctgagaaagacctggcagctcgagaggtcgtgattctttgtcttgtgaataggacaatagacatcatgagttggagaggtatgttgaattccacgctctttgcaggcacgaatttcagcatggacgttgagaaagacccagcaggcttgcagggagtgtttcctggttttgtggatagggcaccaggaccttgtcacctcggaagtaatccttgtcagttcgtgattcctgttggaaagacaaggcttggccgcactaggatccttctcgggttcggatgtcgccgacgtttcgatctccgcttcggcgggaggatccttcgacacggagtcgccccgggttgtagccactgcgttttcgtttcaggccattggcggaccagttggaatcgacattattgtgtaaaccggaaagacgatttcgccgacttgagtccacaccagtgttgttgaaataggaactccttggttgaggttggtgttaacgctgttgtcgacgaagctggatgtcatagtagtagaaccttgagcaacaagtccccctacctggcgcgccactgtcgacgggggatacccgtagaccagatatagagggtattggggtacgctggtacgaggatctacgtaatatgacatcgagcaagcagaaaacaaaaattatattggttcaagccccttgataggtaatagccctaatccagttgatatgggattatatgatggaaaccacagattacaaagggaatagtggaactcgacgataccgacgagatcgtaatcgagttgattcaactagatcacccggcgattcggctctcctgtaagctccgacttcgtaggctgtagtggatgtgttggctctgagattcaatggcttcggtcctcccggggggtccgttttataccgcaggtcaactggtctccaaataagactcggagacatcggacccgacacaatacaatgacgacccagttctattcgagtaggactctttccatctgtagactccatgatggacttccttaacttatgctgaaaacgtccgtatacgcgcaaacataccatatcgatatgtgacgtatatcgaagggtggaaggtataccttacttatgctgagaacgtccgtatacgcgcaaacataccatatcgatatgtgacgtatatcgaagggtggagggtataccttacccgtaaccctgacacccccattaaggaaattcgttttattttttgttccaccaaaaatgttgcagtgaactgaaacattctttcgctatttatgaaacattgtttttatataaggtgaaacaacacccgatttaaacgagggaaacattttcaatctacttagtaaaacaattacgatatatctggtggaacatcgtacaacatttaaaaataattcaataataagctaaatatttttttcgtcggaatatatccatgtgtggtattgttttgaagatttaattacaacgaatttaatggtgcaatcgaatcatgatttggataaataatttaagagaaaaatcagtttaaattagttttgcacgtaaatcggacgctgagacgtcagcgcccgattttcccctacccatggtagggtgcccgatttgtagaggtatatacatttaaaaagaattgatgtaaacatatcatagtcgtagtgcaaacctgcaaactcactgtggcgctcagccgctcacagtcgcttgatcggtcggtcagtaaactcgctgccgcgccaaagttcgcttggatcgacagtgaactggctgccaaattaattgctaatgaaactaattaaagaaataacgaccaattgctaatagcgcaagttaattaattgtgcgagtttgctccaaagggatgcgaacctgctacatgtatctattgaagtcgcgcgctccccgcgcgaactcgcgatgacacatcatgaacacgttacaaaaccacacactcaccgtatgacctcactgtgaattcgcaccccattcgcgacagtggtatacttcaaccaatttctttcaaacctgtatattgctataaaaccggtgaaaagaaaagatagcaaatcgtgtgtggcacgatcatatgacacaagaaaaaacagcttttgcgatgcatgcactaggagagacatgatctttagtactagttctcaacccctattaattccagttgtagcaaccgagactaaagatcttgatttttagtaccggttgaaagaaccagtactaaagatatgcactaagtcaaaaaaaaaaaatatgtgggatgtagaattcaaactcaagatttatcatctcaaccctcacgcgcattatcatcctatttactacacacattttttaactaaccctgaacacatctttaacaccggttggtaacacccgtactaaagagtttttggtaacaccgggactaaagatatttttggggacttgggcttttagaaccggtactaaagagtttttagtaccggttcttaatacatccggtgtatttatggtttggggcattagataaaagatgagttttgt

SEQ ID NO: 27427 - DNA, 9553 bp, Oryza sativa
ctagatcccgtgctgaatgcggactcagatgcaactgacgaagtaggccatgctagcacatcatgtgctatgctagcgatagttggatactttgagtgattggtcttccaccaatttaggatgtcaaatttgttcccaaattgctggatatgattctatttgaggtacatatccaattcagtatcaacttgctcagttaattgtttagtgatgtgttgaacccaatcagcaataggatcattttctgagatagccatcacatgttcagcttggcgcagagagttagcattgctatccttgagtttatataagtactccttaaacaacatgttcaatctcttcgtaattttgtcaatcctttctttagcattttcaccaaaggcttgcccaagccgaaattccacaaccatgaatttgaatcttgggtcaaaaatgacaggaatgcacagatatttgtaagacttaagccaatatttgtcaaatttatccttcatctttttagccatacttcccacttcagtgtcatagttagaatgttccttttggtgccaaatttttagggtcggcccgtgaacctaatgggccgatccctatgcaggctgaatcccatgcttttagttcacaaccacaagttgatagtgcagctattcccagtactagaaaaacgattttcacaggcgaggttcatgttactatgcatggcggccgaattttcgaccccaaacggccaccagcattattgtggatcgggggtgcaatggccatcctgtaacaccccaggtaaccacgtacctagagtgccacagcaaaaaatacactcaaaatcactaactctcaaaattattagaaatttcggtagactctcccctaaaaatacggacatccatgacagacagtgtagcatcctgaaaatgtgtcattttctaatcctgcatcatgccgcttcttatgttcttaataattacctaagcctaggacaatataattagagggacctcctagaactaactcgcacaaaacctctcaagtatttaatttattttgtgtttttcatttaaaaatatagatttggttaaattgaggtatttcttgatttggtttaaaaccttcttttgactaaaatttttttatccaaatttagtttgaaaaccccttttttacttttatgaattatggtccaagaaaatcctccaaaccaaacctttcctattccaatttggaatttattgttaacccatcctttgatattaaacctatgcttaattctccttccaatattccaatattcaaattccaccttttgatctagccaccaatttaatccctgtagcttgatttcctcttcggcacaagaatagcaatattataaatattcgtatgattgctcttgtgctaagaagaatagatttttattttatcctcctcttccaaatcaatttcctttgagccacaaataattttctagaatccatgccatatattttacggctcaaattaaaatcttttgcctccacctattttcctaccacattcctacaaatatatccaaattaggagccttattattcatggtattatttctatttgagtgcttccaaaataatttccctcaaattccactctacctctaaatttactgcactcaaataaatttgaattcccttaccttcaaatttatctccacatataaattcttttcaaacttagccacccaaatcccttctaaaatttagaaaaaccaattatactcaaactgggccaaaaccctttccctcctctaccccaagtcggcccagccaccacagccgaagccgctcctttcttctcccctttgggcgccgccactgtgcacgccatgggcgtgccgccgcccatggcatggcgccatcgccgtggttctcctcctgccaccgccgccaacttgccaaccacgccaggtcgttgccatgccgtgcccttctcctccaccgcccaactctaccacggcttccacgtacgcgcgcggcaaacgtcgaccaatcatactcgaactcttccgaagactcccggactccgatttatattctattcctactccactagcttgagactactaaactaagcttgagagaatatgagagagctctttctagaggtgtgtgaagaaatggagagagtgaggggttcggctcgacggctaggattgatctccaatgacggttggtgggtattaccaacctttccaaccgtcataaacatcattaccagccaagtctgcatccatcggtgctacggctggtttggccgaaccctgggctggcccaaccagcccagttcctagcaggcggcctccactcctgttcttctccgcaaacttgtgaattttggcccaatttgttgtgtcatttctgagtttttggcctattcatgcataaatctgattctcgacatcgtccgattgattgatcgtctggtttgatgttgattctccttcacttcattgttattctctgcaaaaggttagtaaacctaacactagtggaatatttttattctaatataaatatgcattgcaagtataactagttctcctctatttttggtaatattgatggtcgaaactgatcgctaacaaccgttaacaactctctcggttcaatctctctctcgcacttctctcctgttactggtacctccctctgttgctgtgctgctactctacttccctggttctggtctcctgcgcgcataggagatcaggacgagcagggccttcggaaccttgccctcctgacgatctgcacgggtaggcgggaaatcagggttttggggagccttcttcaacgcaactactcttctctgcatcctcaccatgtcggtggacaacaccaatggcgcggatgggaagggtacggctggacaggatggtactggaggcttcgtcaacggagacaattctgcctcacaatcccgtggagggccattcattgggtataatctctctatactgttgtttactgcgttctttcttattgtgtttctgtttagcgcaatgtttttgatgcattgccgtatgatggatgtctatggttattatatattaagcatgatccgttcgttacatttgtttaacaattgcactagtttattccttgttaaagtcatgattattatcttgataatttggattaaaatatgccgaattgtgaccatatatccaacatcaaggcccatatttggtccggtcattgggttgcaagtttaggctaaaatccatacatattagggaatatccaccttgcgcaaacggttctacctgcgtatggagccctgagaacgcatagggcccccaaggggcggatcaaggctagggatctcctgtgtcatctccattgaaataaaaagcagtataggatagcataaatagttaacctgaataatagagttgacccagctaacctgggatttagaaaaagaagaaattaatgttatccctcaaaatccatgtatatattgagctttatgctttagaggtttctctgatttgaggatgctagacttatggcaggcccctgcccccttaaagttaaatatatttaatggcttccaagcacagataggattcagccagcggttgaaccgcaaaaaaagaaaaaaattggtagtgctctgacttctgtaaattttgtggagatttagaaccatcccaacatattgttttcaattgccccattgcaaagtttgtttggtgtatgcgtagagatgccccgggcgcatgaagccccctctgattttgaacatttttacaagctggtaagaggtagagctggagtaaatcagaatggagttataattacattactagcaacagtgaggtgacaactttggttaactagaaacaatatgatggttttctagatgtatggttcttcgaggtaagattatgaattttcccttaataattaattatctttcaaatggtgtttcttctcagtcgatagaagaccctgtaaagcctcaataaattgaattcatatagaggcagtgacgctgaatatattacaggtcaattctcaacttcaggcctacactagaacggataccctcatctcaatcgggcggtaagccccatgtcaatcgggcacagcgtccatcacaggctagaagtcactgatgtgaagagttatctcaattgggcaaacggctgtcacgaatgaatatatctcaattgggccctaagtaaagcccgtcatcgataactttgacccagacaaccagtcaaactatagcccgtcacagataacctatctctatcgggccacaactagcgcccgtcacagatgactactaaccttatcgggcctaaactagagcccatcacagatgatactcatctcaatcgggtctaaactatagcccgtcatagatgactgatgacctcaatcgcgcctaaaatagagcccgtcactgatgactactgacctcaattgggcctaaactagagcccgtcacagatgacaactaatctcaatcgggcctaaactagagcccgtcacagatgacctcatctcaatcgggcattttgttatggcccgtcacagatgactataatccaaaaaaaaataaattttgttttttggctagcctcaggcctttgctagccatgcccgctgcaaaaatgacagaaacaatcacagatatccaatatccccagctccccagcatcacccattcatatacatatgcattcacatacacaaacatcaacatatttcacacaaccacacattcacagccatctcatatttcacatccattcaaatatttattatatttcacctgcaaaaccgagttaattggataaaatatttatttagcaagtcttaacataaacatatgaaatatatacataaatatgaacatcacagttacatcatcacagttgcataataagtgttcatcattgcctaaacataaaagttcaacattgttcatcattttagtttaagcctaaacattcctttggggttaattatttcgcggaggatgaagctggctatctcctcgcgaacctcctcaaagctggtaggcagagacttggttattgtgccctacattgtcataattccagattagttgatcgatcatatataagtactaaaatgtagttagtctatcacaattgagaccaccgacctcaaactcagccaaagtcttcaccttttctctatacagaaggcgcatgttgtggtacatatggaattcgcactggtcacctatttgttgcttcacctggaagtcttttttgtggatgaggttgtcatgtcctgtcttcctgaggcctcctcttcgcacgtattgggcccacgcttcatctatcgctagttgaattggggtccaatcatatgcgttcttatcaattctggagttcaggtagtgatatgtactccacttaggtgttatgaccagaaggatccaatgggcactgcggcattaatatagtgaaagttaattaagtactcaaggaatgtgtcatgctgttgtgtatatttagttaacacacttactattaattataggcgcacataatgtactccttgtctcggtgggaccacaaggtgtcgtagatgtagttgaccattccttgacggtcattctggagatttgtgacagtgaccacttttggatcaaggaaggcaacttccggtgcatgcttctaacaccattgccaacttaacctacacacaggataaacgatcttgtaagcaagttaaaccgattgttattaccagattgagttgggcaacaattcttacaaggagtagcacttaaggaggcttgtgtccaccgctcggagcctgtagaggtcgaaaagatccttgaagtcgaccacgatataatttttggaccaaggaatggctttccatcgtgctctccaaggatatcggtagctttattcagcttcctggcgttagatttctccatgtagtataagtgaaggtccttgcaagtggtgcccattgcggcaagcacgccatctccaaccaatggcatgcctagttggaactcctgtggagcgacgtattttttcttgccctctttgcccttagtctcttcctgacccttgccgagatctagcttccttggagctagaagcgaggcctgcacctttcctccccttcctctcccctttgcttcgggtttatcgagagtaattctttgaggggaagagtgtgccttcctgctattcttcatcggtgggggttcatgaatcgccttgctgtcggcctctgttcggtcctccccaaaatccgtgtcgtactgcaactacacatcgtaagattgtgcatgacgatcttgagaaggaggtgctgaaggagcagaggcgggtctctttggtggacgaccgcctggtgcagtggttggcctcgctgtaaccctgatctcaatgtggtccttgggccattggatgaaggtatcacgggcatttcctagtgagaggacctcgtcgttcggtggatacttcagagggaacagctcgtattcgggcttcaccgagtcgacttgaacttttgaacagtcggccctgagttgcgctccatgcactcttgtctctggggtcgacttgtacgcaagtccctcggctgctggaaccatgaaggtcggcatcaccctaactgtgagggtgcagctcgttggttcctgcgatagattaatcaattttttttagaatattatatatcatatggattcgttatgtctttcatgtattgagtaagttcacggttaccgttatgtggtcgactgcactgtcgaccgatgttggattttccgccaactcagtcgatgcgcaactgctgcgttttttggtgggacttcctaactcttcgtgtgcaacagtagcggcggcctgggggttctgttgctcttctcggatctcttgcctaatcttggccctcatcaactcgggcttttcgtcgaattcagatgtcagctcagctcttatcgacgcctggatcttggcttcaaggcttgtatctttctccgccttgttggaagtccgcttcttgtactgccacgcgtagtctggaaatccatacttccagggcacagaagacccaacgccctgtgtgcgtccacggtgttccttgttgcccaacgctttcgtggggaggtcgtcctctcgtctttgagagcaggcctcttgcgaggcttgttgctcggcaaccaactctttctgcattacaatttagtggggttaaatagactgcacgataggaaacaatgtgaacatctagtttgactagacacttactatagcttcgtatagtccttgatcttctgcatttggcatgaagattgtgccatcatcattcttctggtacctggccctggcccagttcctagcccgagggtgtgggatatcgccaaacacgagcggtgtgcacgattcttccgcttcttcatcctcacgctgccattcctcttccttaccggcttatccggcggtgccaagctagtgcggatgttggttcctggtctagagcaagcgatatgccttgcttctagctcttgactctagggtcgacttcttcacatggaatttctctcttggatctggattcgccgggttgtagatgaactcgcctactagcttagtcttgaagttcttctaagcattgcccataaccttgaaagcagcccgcctgagacggtcctcatgctccgcaggataatcaaaactctccttgaacgttagccaagcaatgtccttctctgcggcgggcacgaacttgatgtcatcttgtagaatactgaatttctgcctccctatgaccccgcagatagacctaaatcggctcaatattttccttggagttgtcggataccctacggcgtccaccactgttatgcggaaccgttccttagggattttgttccctgtcctaggagtaggtgcccttgaggacccactagttgtcgtcgatattggttcgccttgctgagacatcgtctactttttttcaaaataacaaaaatacacaattgagtgctacaatctattacaatgaattgaatgtcacttataaagataaatgaaacatataaataaactaaattgcgcatctcacagtaataaaatgaaccacatttcacatatcatccacatccacatttcaatgacatgtcattcacagttagcagagggcggtgcgatggaggactcacctgaggatggccggtggggctcggtggaggcggcgccgggctcggtggacggcggtgccggtcggtggagatgccggtcgggcaggtcggcgccgggtggtcggcgtcgggctcggtgggggtcggcggcgtgcgtcggtgaggacgcgggcggcgacgacgaggaaggccgacactggtccggtcggtgtagaggctcggtggtggcggcggcgggcttggtgggggtcatcgttgaggaggcggcggtggtccgaatggaggaccgaggaggttcggtggcggcggccgtgggctcagcgtcggttgcgacggcggcaggcttggcgagggaggatgacggcgttggcggcgggctcggtggcggcggcgccgggcatggtggagggcgtcgccggtcggtggaggtggcgccgggcttggtggaggcggcaggctcggtggtggcggcggcgggctcggtggcggtctcggtggtggtggcggcgagggagacgacggcaaagtaggagttggcggcggcactagggttctaaggaggcgggaaactgtagcgggacattgaaaaatgttcgatccgatctgagaaaccctagttatagtagagtgatgagtcatctcaatcgggctttgccgtagggcccgtcacagatgactcatcggtgacgggttccatactaatgcccgattgagatgacattcaggcccatcacggatgacttatctgtgacgggccctaagataatgcccgatagagatagattaatctctatcgggcttgaactaaggcccgtcaccgatgactatttttctatttttccagataagtctttatatttgtgagtacaaaatatatagctgctatataataatttattttattagtcataatacattttcagatagtaaatgatttcaaatcgaaatatggtcaataacaaaattgtagtggttatcaagatctacaacttttattttggtcacttgtctatataactttgtttccaacagcttgaaattgactttgacaatatgataaatctaaacagtatttgtaaatactaaatgatttcaaatggaaatatggtcaaaaacaaagttgatcctctcatcaggatctacatcttttattttggtcatttgtctatataactttgtttccaacagcttgaaattgattttgacaatatgacaaatctatacaacatttgtaaatactacatgatttcaaatggaaatatggtcaataacaaagttgatcctctcatcaagatctacaacttttattttggtcacttcttcatccgacaaagtgatagttatactatttacaataatcacattt

SEQ ID NO: 27428 - DNA, 3664 bp, Oryza sativa
gattgagatagattaatctctattggccgtaaactaaggcccgtcaccgatgattcattttccatctttcatttgttgtgagtgcaaaatatatagctgctgtgtaataattcattttattagtcataatacattttcggatagtaaatgatttcaaatggaaatatgttcaaattttgttagtcataatacatttcaaattttgttgtagagccgttcaagatctactagttttattttggtcatttttctatataatttttttcccaacagcttgaaattgattttgacaatatgacaaatctaattaaccgcatttgtaaatactaaatgatttcaaattgaaatatgttcaacaacaaagttgatcctctcattaggatctacaacttttattttggtcatttataataaaacaaaattagccatattaatgactacacatatcaagtctttgcaataaaacaaaatacttcattcatttcaatagataagtacaaatgcatcagtcacaaggttatgccttccgtatgacctgaacgagcatatgccacaggctcttggggatcatcgtcaaggtcaatgtgaggtcttacatgaagattatggttgtattcttcttcatcgacgacgttgtcaactcctacaattcggcgctttccatccctcacgatgtacatcttcttgtttgaagggtctattatgtagaatatctgctcgacctgtttcgcaagtacaaatggttcatcggcgtatcccaccttagatagatctactaaagtgaaaccttcattgtcggctttggcaccagtgcgtagattcacccaatggcagcggaacaaaggaaccttgttcttgacgtagtttagctcccagatctcctcaatgcggccgtagtatgtgtttgaccaacttgatcctggaatgcatctatacggacgccgctgtttctgcactgtgcttttgtcatcttgtttaacggtgtaaaatgtgtatccatttatatcgtatccttgccatgtgtctacggttccatccccaacaactgtactgtctcatttgggacatccgtgtacattgtcacacgattcttgaaccattcgttaaaccgagaattatgttctctgttaatccatgcatcagatcgccccaagttctcatctcggattttcgctaagtgctcctcaaagtatgggccaacttctgccatatgttggagcacagcgtaatgagcctgcgcgtacgacgcttgatcgggcctaattcttttccttccgattgtgccaacacctgacaaccttccctcgtgacgagacgcgagaactccaataggatcggcatcggacatgtaattcacacagaactcaatagcctcctcggtcgtgtaacattcaatgatgctccccatgggtttagctctgttacgaacgtacgacttcagaactcccatgtacctttcaaacggccacatttcgcttagaaaagctgggccacatagttttgtttgcttcaccagatgaacagggagatgaaccattatatcaaagaaagacagtggaaaaaacatctccaggtgacagagggtattcacaatatcggtctgcagcccatctagatcttctggatctataaccttctgtccaattgcattgaagaaggcgcacagacgttggatcgtgtgacgcactttcggtggtagaatgcctctggtagcaactggcaagatttgtgtgattagcacatggcaatcatgagacttcattcaaacaagttctagatcgtccaatttaacatgcttacttatcgtcgctgaatagcccgatggaactttaatatccttcaagcataataacattgcgatcttctcatctttcgacagtgtgtggcaggctggagggaggtacactttacctagctgtgcatctcgtataggctggagttcactgtagataaaggcgcgcgttcaacccgtcctttgtcttcccggaaatattcaacatcaggccaaccaaactctcacacacattcttgtctacatgcatgagatcaatgcaatgacggacatcaagatctttccagtaaggtagccgctaaaatatggattttttcttccacatacccttctcctttgtcttgctacgttttcttttcttcccaaactcattgcttatgtccttgaccatattgtggacctcatctccggacaaatctttgggagcaggctgaagttctctcttaccgttaaaaaatttcttctttcttataaatgcgtgacgtagcgggagccacctccggtgacccatgtataccatctttcgtgatttcttcagccaccggcttcgtgtatgttccttgcaatcggagcatgccttctttccttttatagtttgtccggaaagattaccgagtgcagggtagtcactaatggtgcagaacaatagaactcttagcttgaagttctcctgaccatatgcatctcaagtttccacatcttctttccaaagaatctccagatcgtcgataacaggctccaggaatacatcgatatcattgccgggttgccttggaccttggattaacaagcacaacataatatatttccgtttaaagcataaccatggcgggaggttatagttcgcaataagaactggccaagtgctgtgagtactactcatgtcaccgaaaggattcatgccatccgtacacagacatatcctcatgtttctatggtcggcagcaaagtctttgtgttttcgatcgatattcctccattcagtcgaatccgctgggtgtctaagcataccgtcgttccttctctccgtggcgtgccaacgtactaacttcgcttcgttcgggttggcaaagattctcttgaaacgatcaatgataggtagataccacacaacctttgcgagaccacccctctttgacttatttcctttgtcagcacttttctttcgcttgtatcgagaagccttgcagacaggacaagcatccaagtccgcatattgcttgtggtacaatatgtagtcgttgggacaagcgtgaattctacggacctctaaccccagtagacacagaacctgctttgcttcgtatgtcgtctcgggtaatgtgttctcaacaggaagcatagccttcaaaattccgaaaatatctgtgaaactcttgtctgtccatccactacttgccttcagcttcattagggccaaggtaactgacaacttagtgtgtgttgcttttgcatccagcgtacagaggcgtctcggaaccacttaccaacctgctgaacttcattccatctctctcattctgggctgggtcctcaacatcacgtaacatgtcttgcagtagatcgtgatctacatcaactatttcaccgcccaatggagaaggtataaacatgtcatgctcatcttcatcttcctgattatacgcaccacttctatctgctgctactccacttcttgattcttgctctccatgcttcacccaacatgtatagcccttcatgaatcctcgttgtatcagatgaccgtgtacgtcctctccgctataaaacatattctcattcttgcaatctgcacatggatgtcacgaccggaaataacccaccgggcgtctcttacgtgcgtgtattattccttgtcccatgaggcaaggt

SEQ ID NO: 27429 - DNA, 10603 bp, Oryza sativa
  unsure (1)..(10603): unsure at all n locations
gatctgacccttcactatcagatactctgccgccatggcttacgaggtgctgggtcaactgtcgtgcacctcggaaggtatttcctctttgacgtctaggaatagttatccctgctggaggccattcggtgctggtaatagtcatcttatgtacttcttcttcagttcgcatcggtgcttttctcttctgattcttactcttcttgcctttggcttgcttagtacgtgaccccatgtggtacgaaaggctaggaggaaagcaattctcgggattcaatggattctctccattgggctctctactttgcacactaggctgcaagcttgacttgctgcgaggaggctggtttagcgatgtctgccctgctaaaccaaaggaaggggcttctttggcatatacccatggacaattcagggcatagtgtcctcgttctctacaatcgtgacaaaaggggacatcctcttctggcattggaagctcattgacctgggtggcaaatgctcgatcaaacacataccgattttggtcttgacttccaaccaatggtagctgtgaactaagcagcatgcttggaatggaccaagggtgtgcccttgttaactctcttgaggccagtggtggattgagttggaaacttaagttactggaggcatacccgctgacattctttcctttttctctgttaaacatctgtgatagggattgaggtgagagaggaaacaagccaggaaagaatagaccagaactagggacaggaccttaaaggaactaactcttcttgttgatgtgttgtttgtttcacttattctgcaagttgattaagcaaacaacctagcatggttacatcacacaccactgatgcaaaccacgcgctacacacacaagcaaaggagcacacgactaacgaaacactagagggtggcttaggttctgcgacgggttctccaagatcttcactcctgcttcacagctggcttcattgcttccttcgcttcgctagcggaccctgcggtcttccggaccttcggcgaacaattgacgacatcttcttcttcgtaaaactaaccatctagtactagctgaaatttgaagaaggaagaaagagtaaacattttgcaaatagcacaggggaaaggaggaaaaagggactttcgcaaatagtttcgtttataaaatatgtccttaggttttatccacttggcttatcctacagtcgagatggctctgataccagcttgtcgcgaccgggaaaattgccttttcccgaacgctagtgtattaattcccgtcccaggaaaagccggggtacaccacacaaacatgatataaaagacacatctttattatatcgataatatttacattattacaaaggcgcttcaggcctggcaatcaaaaataaacagcagcggactagcgggcctacggctccatcttcacaggcgctcaactggggtataagccaggactccacctaagacatcttctccaaagcttctcttactgaagaggggaaagattgagcaagaataagtacaaccacagtactcagcaagccacaccggagatgcataattattgcaagggagtacaaggggataataatataggggttaagttttgcagaaaacagcatttaaaagtcacttagttgcccaaagccattttataaagacgatcctagagttacacagtgttattaatcaaggccgtgaaccctcacgaacctgccttaacccaaggcctacgatgattcagaccgaactggcaacccgaccctgggtcctagctcgtcccaagccaacccaggccaaccattccacattttagttgttaagcaggttttaagaattaaaacactaacttgggtacattgctcggcttgcccataaccgagggcgcggctattcgaatagattatactctgatcagaggtgtacatctttacccacaagacacatcttcctcacgtgtaaccatgtgccacataccaccacggtatacggacggaagacatgacatagtttccaacccatcctagccataaacaagagtaccgacccaaccccacctacggccggaacccccgggacaggtaggcaggactgagcccctaacagcaggacaccggccctgtgccatgacatctcgactaccgggccgcagctcgtgtagccttcatttgccctagagatgtccatcgactccgacttcgtccatctccatccgtgtacttttgtttataaccagactgagccacaaactaagccttacccgctagacatgtggaagtacggtagtgctttgcaacagaggcccgaagaccgatccttatatggccgaggtgctactatcaaaaccatgcaccctgagccttgcctaaaaccattttgagggttttgaatagagggggaggtgtgaatccaattccacaataatccaaccattccatagtgtcaaggtgataagagtattcccaaagtctagagttgtaaaaccacctaatgttgcctaattaacgagcgaagcatctacctaaaatcataccagtggtaccatgagtagagtgtccactagttggggttttttttaatctagggtgaataaggtaataatatcaataacaataataataaggttataacaaaggttaataggcatggctaaataaaacagtgataacgcgggagtttaaataaagcgataatgcaataatttaaatcaaaataattttataaacaaggattcaatatgtacaaggacgatgtgacttgccttgctcgctttcccaaacgtcggcttcaacctccacgaagagcggatattccgaagctgcagcgtctacacgaccaacggaaaataatagggcttttactctaataaactccatataacaagtaggaacaaagcacaaaaatgggttcttgacttcttaaggaaaaattagagacttgaacggtccaattccgagttcaaatggccaagttatggccatttgaaatttatatgctctttaaatgaatatttgcgaatttcttcatttaaattttaatttaaaaagtgtttattgcgtcagccgaggggagggggcgcgcggaccgggtccacgggagtggggcctacgcggcagcctcacggtccacggtggaccgggcgcacccgggctcacaccggccggcgtcgttggccccacgcatcagccgcacccgagggcgcgggcggctgacggccgggccccacgcgggagccactcggcgcgcccgagggcagccatgccggtgcggtcggcgggaggcagcgcgtccgcgccccgatggtcgccgccggcgaccaccggcacggcggagcggcggccaagagaggggagggaagggggaaaggaggcgacggtacacacccccggggcgacgacggcgacggaggaggcggccggagcggagggaggcggtggcgcggctcgggtcgatggggacggcggcgctccggcggtcggcgaccgaaacggaggggtggacgaggtcggcgaggatgcggcgaagccgaaggaggcggcgccgaggtgggaggcggctcggggcgacggcggcggcggaccggagctcggcggcgacggcggagaaagagagcgacgtcgcgagcttgaatccggcgaggaggaagggcggcgagaggcggaaacggacggaggaggtgcggggagggtttaaatagggttggaagggggagagagcggccggaggggaaggaaatcggcgcgggaggtccagccgccatcaatggcgccggcgagatttgcgggggcaaatccgcccgtttgaacgcaagagagagatggaaaaatggggggaaagggagagggaatcacggggaatgattccccccactttattgcacgcggggacggcgggaggcggcgggatccgcggcggcggcggtgctagggcacgggggaaggaggcgggagcggcgggaggaaggggatgacgggtgggccccacccgtcagcgagggtggcgggcgggcccgcccgtcancggcgcgcgcgcgaggagaggccgagagggccgcggggagaggagagagggagaggggggagaggagagatgggccgggccggccgaagggagggaagggggacttttagggtttttctttttataaaactttttcaactttgtttatttcttaataattattatttgtgctctgaaaattccactaaaacttatttacacattttaggcttttaggaaatatacaaaaatcctctaagccttgtttgacttttactttgcacattttaatttttggaggctttcacccggattttaattattctagccataatttaaaagaatatattttagggtcgttttgggacgtgacagtggacaacacatgtaatcattgtttcttcttatccgatcctcctccgcggcgttcatataatttattacgccctttctgtacttcgtagaatgacgtttcaaatttttcgcatacatccaacttcgatcaattgctacaaaataaaaaaacaaattagaggcacatattataagatcagtattgcaaaagtaagacgtgatgaaattgttcaattaatgattaatattactcacttgattgatccattttgatcacttttgggaatttaatttctgttttcattggaaaaaggacaaaaaatcgccccctacagcctcccaccaaaatagtgaacagtgggatacagttacactaggtggtggggggtatttatactgtgcaacaaatatctgtaacggccctaaaacaatcaaccgtgacgggcatacaagtaatctctatcgggccttaataaaaggccgtcaaaaaaaagtgtcatctatgacgggcactaaacttatctcaatcgggcctctagttagagcccgtcacagatgaccctcatctgtgacgggcttcttttagggcccgattcagatatggaaccctcatctcaatcgggcctcaactatagcccgtcacagataagtgtcatccgtgacgggctttagttttatgccgatataccatggctgtgcgaccatatctcaatcgggtgaaacttcagcccgattgagattactttcttgtgtcggcccgcaaattccagtcttgttatgggccgtcacagatggaaagatctgtactagtgctataagatctggaattggatagtcccggcgctagttttcctttcctgcttgtcgagttcttgtttaaggtttggctcagcttcatggtgtttgtctggcctctatgattgctataagcggtttgttgcttcacagacctgcttcggtgagtttcttaggttaccttatgttttgatgctctgtatggctagatggagtcctcaacatgactttttttataccctctcgatattacatggcatccttcctcaatgtcctacgtgaatggcagtatttttctatgctttgctgaaacaaaattatcatcacttttcaacaatcatcatcgaccatagagcattttatttgccctagaaagaatctagattctggtctccaatgccctctgtggcccgatttgcttataccacttttggatgagcatatctcagttgctttaatttcggtttgcttgttataagccatgtgagtgttcttccaagaggagttgaaaattgaatcgaaacaactatgaattcttatcgacttatcctattatactttatagaagataatattgtttagtagaagaaatcactacatatataatggtatatcatggaggggtgagctcacaacaactttagcctgaggccaccccaatttgccgacaagaaacatatataggctttggaactattgggaagtttcaaagcttttagcactgttctatttagtagacggtagtatatttccacgtagaaaattgtgtgtggccaaaggctattctgcaagcaaacctttgtaaaaacgaatgctaagcatgctgctctgttatctcttgaaggtgaaaactgcaccccatgcttcttggtctcttggatgccttctctaacttgccatgcatagacagattacctgcaaccagttgtacaacattattgcatggataccataatctcagggcatcagtcacacacgcacatatcaacattggaaagaaagctgcaaaaacatttgaactgagttgtctcatagttgtgagttgtgactacccaaaacattagagacatgagacatcataatttaaatagatcgtggtcaaaatattgacaaccatcaagagaaatggggaggaaaagaaggtcaagtgtcaagtgtgcggatgaccggcgagtaacctatcactactggagaagtgatctttgcttggtcagccaaaaatcacattagtcctggttcgagtaggaacagagagtaaaaaatatctttagaaccggttttaaagcctaggggtacgggactaaatatcatttttagtcctggttcaatagctattaggtccccaacaaactttagttccggttggtatcaccaactgggactagagatcagatctttaatcccggttggtgattccgaccggggctaaatatctctctcccacatccgctctctctcttccttatcttctcctctacttatcatctcctcctcttctctctctatctaccttatcttctcctccactccttcccttcccctctcccctctccagcgggcaccctcctccactcctccctcttccagtgggcggcgtctatgttaacggtcattatcgatcagtttcgaccgtcaatattaccaaaatagagaactagtgatgcttgcaatgcatatatatgttagaataataatattccactagtattaagattactaaccttttacagagaatgacaataaagtggaggagaatcgacttcaacacaaacgataaatcaatcggacgatgtctagaatcagacttatgcatgaatgggccaagaactcagaattggtacgatgaattgggccaaaattcacaagtctatgtatgagagcaaaagaggaggctgcctgccgaaattgggccaggtcggcccagcccatggtttggccgaaccattgggttcggccgaaccccccgcagcgccgtttgatccaggtttctcctggacggctgagatgactccccaatgatggttggtgggtatttgttgacgtaacacgaggcctgggagatctgcttaactccagtgcaggtccaagactcgccttcgggtatgcaagcgtgccagttgatttgatcctgcaatcaacaagaaataaagacgaagaaactgcggttaaacctataaacgatagccgatcggctaggtgccgatgacatatcatttatctttgagccgatgtcatatgtaaattgatcggcagttataaatagataacaaagaactaaatctactcgatcggctgtaggtatcaacaatatatagttcttatatcgatatatacttaaatcaagtgattgggatagatcggtcaccatgccgagacagtataaatcacttaggtcgaagtatatattaataacgggactatatgtgtttataacatagccgatcagatagatctagcatgtatcggctaatactccgatacaactctatgttaagatattaaaacaagcagaatataccaaacgaaagcttaatatgcttagatgcgataatatctttacataaagggcagatttaacatgtcaacgaagtatatagagcaaatatagttaaatcagataaaatcggctgaaactccgacactaccctaattggcaaccaagaagcaggctagagattaatattctaagtacgacttaatagatcaaactcaactgatgcagcattaagtatgaaaagaagaacaatatctagacaatcaagccactggaagtttcatagagtggtagatatcctatataaactaaacaacgtcattgtctaacctaatcggctgccctcttccaacagatgttagccgattgtaggttagatagcgatattgccaaagattatgtaagatatatgataactcgacggattacataaacaagattagagtatcataaagatggaagcactaatcccgataacacaagccgtcataacaagttttacctcttgttgaagatcgaaactgatgcagctcaacccgaaaacaagaactcgtcgaaataaatctaaagcaaaagggtggcgatgcgccgaaattgtattgaacgtgtgtgttaattgattacatggggttcggggtctatttatacccgaaaattacaaactatgtccataccggacacgactcttatctctaaaaaactctaagataccataagtctttgcggcaaacttttgcccaaacatatctctaaggaaattacataaaatatcctaattaatagatacagttgccttctcagtactctatccatgtacagtaatcatcttgaagtacctcaattcaacccgatgtcaaacaccaagtcgtattgttggaatcgtattgtccgactcagacccagccgatcctaatcgtagccgatctagagtccagcagactcttgctctgttcacgaatcgatctccgccttcgaatccacttcaatctaatcttcttttccgatgccgaaattaccaaatttggttgttaacacatgccccccaagtccgaaatatttggtaatgtttcggatttgctatatatcaactccgagcaattctcgcactttgccgttttccgaccgttattcccgtgctttaaatactaaccgccaccctcgagaaatcttcaccccgttacttccgttttcaccgccgaagccaaccttctcctttctctctccggcgattccttcgacgctcaaggcgatccccaagcgatttcgtctccggttagatctccgcccgcagcgatgtcgtcttccgccagcccatctaccgcgccatcagcggagtacgctgaggtaagttctcatcggctagatcccttttcctcgcatgaaatcgatttcccccttcttcatcttgtttttttcttctcgattcctttggatttgcagcacctttcccatctagttgtggttcccagcctgtcacatgaaaaccactatttccttggtccaatcggcaatcttgaccccactaattttatcattggtgaaaccaacagaatcctttttagattagccaaccctaatctgggtcattggaagaatactttcaagttgtggccatctcttgagaaaaccacccctgagaagagttggaccacatcgtaccagtgcgtatcggctactaagaaagttcactgggatgagatttggatcagccaagtgcttgccctcaccatagctaattccaccaaggacaaacctctgatggctgctgccacctatttctggtcccacaccatcaatgccttcttgctcaaccaagggccgatgactccaaatttgatcgacattaccatgatcaccggtttagatgtaacctcatcggctaatcccatgagcatgaacaccaaaaatcagtttgattttagaaccaaaagcataggtggttggtctggctatgtagcagcatatatgggccaaggatccgttactcctcgagaacatgtagctttcttaccaagtggctagaaaaattcctcttctatggatccagctgtggccctacaaccaattggcaatttgtagccgaagctctagaatcagagaaacaatttcccttgggcaaaatcctccttggctatctataccaaacattgaacaatgcatcggccaagatagccgtcggctcagtagttggtgcaggtggaccatggtgtctgctgcaaacctggttgaacctgatggtcatgaaagttgtcaatcggccatctgtgacagaagctgagttcccattcccagagccgattgtaggagttgatggaaaagaacgcactcatcgcagatgcacatcatacggagaatatgcatcctcaccaaccgatcctggagcaaagctatcggctgagctactcaaggattggttctgcagcttctatgaaggctttcagaaagacgcccgggtttggttcccttatgaggactcagcagatcttgaacttccatcagactttagatttgaagatatcaatcacgaaaagtatcaaaaatccagggaagttcttacagctgcaatcagcccatgcatccttcctgtcggcattcatcagggaagaaatatccaagtttcttatgagttctaccacccaatgagctcagctagacaatttggactaggccaactcccaatcggcttattctttgccgacaagatctagtgccgaggagaaatcacatcaactctaatggtggatcgactacttaacctcccaggagcccctctgggcagcattgacaatattgagttggtaggatttaacagcagaaacttcaactgatggtggggtgaatggaagctgcacttgtttcatcaatcggcttcgatgtttatgacagatctattccctgatgtcataccccaggtaaatctcatcattattaacttgaatgttggtt

SEQ ID NO: 27430 - DNA, 1102 bp, Oryza sativa
tttcacaagagtaagcatctctcttcggcttcttttgtaattacctcactcttcggctaattactcatagactttgtgtttacagaagaagaaaactgctgtgaagaagaaaccagcagcaataattgtcaagtcggccccaccagtaagatatctttaattcttttactagtcaatctcaaccaacactatataacacttgcatattttatagccacctcctccttctcctcctgtacagcaatcgtcgagtgaccgggctctatcgactgtagggagtcatcatattgaggaggaagaacaaccagctgctcctactatcccagtaagtttccttttgataaaagaaattagatcggctatattgacctagctctcaaacttcctgaaattgttcctgcaggttctagtcgatctcttctcttttgacatcggagattatcttgatgaggcagaagaggatatttcaagcaaagctctagcccccttatctgacgatgtgaagaaaacagttgaagatatctcccgttggctagaggcctcttctttagatagcttggtggtcgactgtggatcgattaggacacgactacatgaagttcaagctctgattcccgaagaactagccgatgtcctaactccagccgcttatcttgaacaacatcaattcaagctgaaaaaagccaagctaagactagccgaacgccgtgagcgcaaggagattgaagccacaatccaggtcaatcggcagcttatgcatgaagaaaaagtcaaactcgatcagttatccgagggtccgattaactccaatattaatcggctcgaagctcgcaagattgatctcttggcacagctcgaagaatgcaatgctgaactagacatggaccacaaaaagctagccgatctcccaaaatctgtcgaagagcagaaagcaagactcaaatcggctatcaagaatgttgctgacatgaccaagtccctaaaggtcatttttggaactgatgctcaagatgcccaagccattgaagaagtagaacaaattaggcaaagggctattttggctatccagcaatacctgtctcaatgacttttgtgtaatagg

SEQ ID NO: 27431 - DNA, 1233 bp, Oryza sativa
tgaagtcgggggtcgatggacattctccagggcaaatgaaggctacacgagctgcggcccggtagtcgagatgtcatatggcagagggttggtgccctgctgctaggggctcagtcctgcctgcctgtcccgggtgttccggccgtaggcgggattgggtcggtactcttgtctatggctaggatgggttggaaactatgtcacgtcttccgtctgtataccgtggtggtatgtggcacgtggttacacgtgaggaagatgtgtcttgtgggtaaagatgtacacctctgatcagagtataatctattcgaatagccgcgccctcggttatgggcaagccgagcaatgtacccaagtcagtgtttcaattcttaaaatttgctcaacaactaaaatgtggaatggttggcctgggttggcttgggacgagctgggacccagggtcgggttgccagttcggtctgaatcatcgtaggccttgggttaaggcaggttcgtgagggttcacggccttgtttaataatactgtgtagctctaggattgtcttataaaatggctttggggcaactaagtgacttttaaatgctgtttactgcaaaacttaacccctatattattatccccttgtactcccttgcattaattatgcatctccggtgtggcttgctgagtactgtggttgtacttattcttgctcaatctttcccctcttcagtaagagaagctttggagaagatgtcttaggtggagtcctggcttataccccagttgagcgcctgtgaagattgagccgtaggcccgctagtccgctgctgtttatttttgattgtcaggccttaagtgcctttgtaataatgtaaatattatcgatataataaagatgtgtcttttataccatgtttgtgtggtgtaccccggcttttcctgggacggggattaatacactagcgttcgggaaaaggcaattttcccggtcgcgacacaaacactaataaattccacataacagcagaaacaaagcacaaaaatgggttcttcacttcttaaggaaaaattagagacttgaacggtccaattccgagttcaaatggccaagttatggccatttgaagtttatatgctctttaaatggatatttgcgaatttcttcatttaaattttaatttaaaaatcgaattattgcgtcagccgagagagagggcgcgcggaccgggtccacgggagtggggccc

SEQ ID NO: 27432 - DNA, 8850 bp, Oryza sativa
aagccgatggaagtgaccccgagacgggaggaagtccggagtgacgacgcggcgaaccggaggtcgacggcgacggcggagagacaggtggacgtcgcgagcacgtatccgatggcgagagcaagcggcgaacggcggaaacggaggagggaggcacggggagcaaatatatagcgccgagagggggagagcgcggccggagagggaggaaacggccgcggagatctcggctccattgaagacgccggcgacgattgcgggattcaaatcggacgaatccgagggagagagagagggaaaagagggggaaacgggagagggaatcgcggggaatgattcccccctcattatggcgcgcggggacggcgggatgcggcggaatccgcggcggcggcggcgctagggcacgggcgagcggcggacgcggcgcgaggagggagatgacaggtgggtcccacccgtcagcgagagtggcgggcgggcccgcctgtcagcggcgcgcgcgcgcgggggagccgatgggccggaggggaagagagagagagggaggggctgggccgagccggcccaagaaggaagagggggggaaaaaagacttttagggatttttctttttataaaccttttcaactttgtttatttcttctcaattattatttgtgctctgaaaattccactaaaatttatttacacattttaggcttttaggaaatatacaaaaatcctccaagcctcatttgacttttatctttgcacattttaattgttggaggctttcacatgaattttaattattctcggcacaattttgaggatgaattttagagtcgttttgggacgcgacaacggtcccaggatatcgagcccccagacagcaaatggccatgaaagtggtatgatctgcagggcctgggccggttgatggatttgcttggcgtggaattgacacgctctgcatcgccggaccaggtcgaccgcatcattgagagctgtcggccaatagaaaccttgacgaaaggctttgccaaccaaggtgcgcgaggcggagtgggctccgcattcgccttcatggatatcggcaagaagctcgacgccttgttcccgaggaatgcacttcaggaggattccgttagccgcgcgccgatagagggtcccttctaccagcacgtagcgtttggagatgcgctggacgcgttcactcccttcgcggtcctcgggtagagtcttatctgtgaggtatgcttggatctcagcgatccaagcaatcaatctaagggagctgggagcactcccctcgggtcccgaggcctggactccgacgggcctcgggggccggtcaggcgcgtccgtctcccctaaggggtcgggtcgcgccgacggctgggcaagcctttcttcaaaggcgcccggtggggtctgggctcgcgaggaagcgagccgtgagagttcgtcggcaatcgtgttatcccgtctgggcacgtgccgaagctctatcccgtcgaaatggcgctccatacgccgtacttggcgtacgtaagcatccatctgcgggtcagagcaccggtactccatacagacctggttaacaccaggaggcggcggatccccagtccagctgccaccctaagtcccgcaaggagtccctcgtactctgccatattattggtcgcccgaaaatcgaggcgaaccaggtatctgaggatttctccgctcggcgaggtcaacgtgacccccgcaccggcgccctgaagagacagggagccgtcgaactgcatcacccagcgggcggtgtgaggcagctgcgaggggcccgagctggcctcggggagtgagacgggttcgggagccggggtccactctgccacaaaatcggcgagagcttggctcttgatagcgtgacgtggttcaaagtgcaaatcgaactcagaaagttcaattgcccatttcaccacccgtcctataccctctcgattatgcaagatttggccgagggggtaagacgtaaccaccgtgacccgatgcgcctggaaataatggcgcagtttcctcgaagccatcagaatagcataaagcatcttctgggcctgagggtatcgggtcttggcgtcccggagggcctcactaacaaagtagacgggccgctgcacctttcggtggggccgatcctcttcgccaggggccgcatccctggggcgctcttcgtccaagcggcctcgcggggcgcactcgtcttctgtgccgacgacctcggggtcggaggacgacaggcgcggccttcccacagtggcctcggtgccgtcctgggggtcgggggctcctggcatcgtcggacaagcgggcaaagggccaactccggtcgtcgggggccttaggccaccgttcggctcgggggcctcttctccctgctctctcccgggtcgagtcggcacagggttaacctcggggtcagagggcgataggtgcggccttcccgcagtggcccccgggccatcctgggggtcgggggcacctggcaccgtctgacaagcgggcagagggccagctccggtcgtcgggggccttgggccaccgttcggctcgggggcctctcctccctgctctctcccgggccaagccagcacagggtggggatgcgcggaatgaggattgtcctcatcgcgctccacaaccaacgccgcactaactacttgcggggtcgccgctaagtagagtagcaagggttcatctggctccggggcgatcaaaactgggggagagctgagatacgccttcaactgagtgagggcacgttcagcttcctccgtccaagtgaacggcccggagcgtttgaggagcttaaataagggtagcgccttctctcccagcctcgatatgaaccgacttagggcggccatgcaaccggtgacgcattgcacatccctaagcttgctgggggcgcatccgctctatagctcgtatcttctcggggttggcctcgatgcctcgggcagagaccaagaacccgagaagcttgcccgcaggtacaccgaacacgcacttatcagggttcagctttatgcgggcggagcggagactctcgaaagtttccgccagatctgaaagtaaagtttcttggtcgcgcgtcttcacaaccaagtcatcgacataagcctcaacattacgtcctatttggctacccaaagaaattcgagtagtacgttgaaaagtaggacctgcattctttaacccgaagggcattgtcgtataacaataagttcctatgggggtaatgaatgtagttttttcctcatcctccctagccatgcgaatctgatggtaaccagagtatgcatctagaaaacacaaaaggtcgcaccccgctgtggagtcgacaatctgatctatgcgaggcagggggtaagggtccttaggacatgccttgttaaggtcggtgtagtcgatgcacatccgaagtttgccattcgccttgggaacgaccaccgggttcgccagccactccggatggatgacctcgcggatgaatccggcctccagaagtcgcgccacctcctcgcggatgaaggcttgacgttccggggcctgccgccgcactttctgccggatcggccttgcgcccggccgtacggcgagacggtgctcaatcacctccctggggaccccgggcatatccgccggtctccatgcgaagacgtcagcgtttgcccgcaggaaggagacgagcgcgtcttcctatttgccatccagaagaccaccgattcgtgtagtcttggacgggccgtcacccagggcaacctccttgaccgggacctcgtcgcatgtgatcatcctctgcctcggggcggcgggaacggaggtgccaagcctctcgtcgccaccctcgggcttggacgcagcggcgaggtgatccgcgcgctgctccatacaagcaagcgcgactttgaggtcgccatggacagagatggggccaccggggcccggcatcttcatctgaaggtaagcgtaatggaccgccgccatgaacttcaccaacgcgggcctccctaggaccgcgttgtagggcagacttaggtccgccacatcgaagtttacccgctccgtgcggaagttgacggatccaccgaaggtgaccggtaggtcgatatgacctaacggccatgtgtgccccggggtcacaccgataatcggctgggacggccagagcaccatccccggggccttgatggcgtcaaaggccacgggggaaaggatgttgagggctgcccccccccccccccccgtctatgaggacacgccccaacttcacgttgcaaacggtgggggaaaccaccatcgcgatctgtcctccccgggcaacacacggtgggtggtcggtctggtcgaaggtgagggcaacctccgaccaccgcgcccgacgcgtcgcctcatgagtgggggccgcggccagaagctctcgcttcatggccttgaggctccggcgagaaacgtgagcacacgctcccccatcgacagtggcaatggtggccccaggctcctgaaagcctaggtcatcatcgccgccatcgatgtcctcgacgggggccttctgcttggcctcacttcgccgattgccggagggtaccgccggggacttaccctctcggcgctcctgcctcctctcctcctcccactttctcgtccgctcagccaaacttttgactgcgcggcagtccgcgaggtcgtggagggaggtgttgtggacgatgcaccacttgccggttgggcgctccctgctgggagcgccggcctccttctttttgtcgctcgcaggcctcccctttcgggtggcccgcgaagcgccctcgacagtgaggacatgaccctcgtcgtcggaatgggctgacctcttcttcctcctcctgtcacgtcgccctgtctgagcagcggacccgggggcggccgaagttgccacaccggaaccggaggggttccaggtccaggcctcctccttacgagccactcggtccgcgagctgaaaaagctccgcggtagtctggggctccttggaggcgatcttttcgagcatgcggttgtgccgcacacccccctgaacgcgtagatcaccgcgtgtgcagggatgcatggtatggtgttgcggacttgacagaaccgctgaatgtatgagcgaagtgactcatcatcccttcgctgtactgcgtgtaagtccgcttcttcacctgggcgcggatatgtgccttgaaagttcatggtaaactgttggcacaaatcctcccaagagtggaccgacgcgggtggcaagttcattagccaaccccgcgcctgtctcttcagggccatgggaaagaaattcgccatgaccctgtcatcacccccggcggcctcgatcccggtcgtgtagacctggagaaactcggcggggttgacgctcccgtcatatttttcggcgatggtgggccggaaccttgggggccaacggacgttccgaaggctcgctacaaaggctctacagccgacaccaccaaccgggggcacggagggctgatccccgcgtccgtgttgaggtgacactccggacgaggaggcaccctccgttgcgtgggtagcacgtcgaccattacgccggcgctcgataccgatgcgggcatctggccctccacgctgatcttcccgggtcagaggtgctgacgagggagtggcagccgaacggcgagcaacagccgccgctcgccgcgccctccgccttgacgacacggagccggtggtagcagcgccagaggtcttggtggctgtcacgaccggaaataacccaacgggcattccttacgtgcgtgcatgaatccttgtcccaggaggcaaggtacaccaaaagttgatacaaatcagagtttaacaagcggaagcgtaaatagttaacttattacatgggcagcgaaggcccagcacacacagagacaaacgagaaacagcggaagactagggcgacgaccacaggcgcttgacggcaggcacgagctagacaccaaagccttcatcttcaaggagctcctcttctgggcttgggaaaaattgagcaagactgagtacaaccaccgtactcaacaagacacacccacaaatgcagaataaatgcaagggagtacaagggaattataatataaagggttagggttgcagtaaacagcatttaaagacatttagttgctcagggctattttgtaaacacgatcttagaactatacaatattattaatcaaggccgtgaacccacacgaacctgccttaacccaaggcctatgatgattcagaccgaactggcaacccgaccctgggtcccagctcgtcccaagtcaacccaggccaaccattccatattttagttgttaagcaagttttaagaattaaaacactaacttgggtacattgctcggcttgcccataaccgagggctcggctattcgaatagattatactctgatcagaggtgtacatctttacccacaagacacatcttcctcacgtgtaaccacgtgccacataccaccacggtatacggacggaagacgtgacatagtttccaacccatcctagccttagacaagagtaccgacccaatcccgcctacggccggaacccccgggacaggcaggcaggactgagcccctagcagcagggcaccaaccctctgccatatgacatctcgactaccgggccgcagctcgtgtagccttcatttgccctggagaatgtccatcgacccccgacttcatccatctccaatccgtgtacttttgtttatgactagactgagccacaaactaagccttacccactagacatgtggaagtacggtagtgctttgcaacagaggcccgaagaccggtccttatatggccgaggtgctaccatcaaaaccatgcaccccgagcccagcctaaaaccattttaggggattttgaatagagggggcggtgtgaagccaattccacaataatccaacaattccatagtgtccaggtgatatgaatatttcccaagtctaaagttataaaaccacctaatgttacctaattaaattgcgaagcatctacctaaatttaaactagggataccacgagtagagtgtccactagttgaggttttgtttactctagggtgaacaaggtaataataataacaataacaataataatatggtcataacaaaggtaaataggcatggctaaataaaacagtgataacgcgggaatttaaataaagcgataatgcaataatttaaatcaacataattttacaaactgggattcaatatgttcaaagatgatatgacttgccttgctcgctttcccaaccgacggcttcgacttccacgaagagcggatcttccgaagctgcagcgtctacacgaccaacggaaaagaaaaggcttttacactactaaactccacataacagcagaaacaaagcacaaaaatgggttcttgacttcttaaggaaaaattagagacttgaacggtccaattccgagttcaaatggccaagatatggccatttgaagtttatatgctctttaaatggatatttacgaatttcttcatttaaattttaattaaaaatctcatttattgcgtcagccgagggagagggcgcgcggaccgggtccacgggagtggggcccacgcgtcagcctctcggtccacggtggaccgggagcacgcggctggcggcggtcggcgccgtgggtcccacgcgtcagccgcacccgcgggctcgggcggctgacggccgggtcccacctggcagccgcgagggcgcgcccgaaggcggcctcgccggcacggccgaaggtagggggacgcgcccgcgccccgatggtcaccgccggcgaccaccggcgcggcggagcggcacccgagagagaggagggaagggggaagcgaatggagcggtcttcggctcaccccggtcgacggcgacgacgggaacggcggccgaagcggaagaaggcggcggcgcggttcgggacgacgaggacgacggtgctccggcggtcggcgagcgaaacggaggcgcggacgaggtcgacgggaacgcggcgaagccgatggaggtgacgccgagtggggaggaagtccggagcgacggcggcggcgaaccggagcacggcggcgacggcggagagaaagtgcgacggtgcgggctcgattccgacggggagagtgagcggcgagtggcggaaacggaggagcggagctcggggattgattttatagcgacgggagagagagagggcggccggagagaaaggaaaccggccgcggagttctcgggctccattgaagacgccggcgacgattgcgggattcaaatcggacgaatccgagggagagagagagggaaaagagggggaatcgggagagggaatcacggggagtaattcgcccctctttatggcgcgcggggaaggcgggatgcggcggaatcggcggcggcggcggcgctagggcacgggcggcggcgggcgcggcgcggggttggggatgacaggtgggccccacccgtcagcgagggtggcgggcgggcccgcctgtcagcggcgcgcgctcggggaggagccgatgggccggaggggaggagagagagagagggagggagagaagtgggccgagccggcccaagaaggaaaaggggggggaaagaagacttttagggatttttctttttataaaccttttcaactttgtttatttcttttcaattattatttgtgctctgaaaattccactaaaatttatttacgcattttaggcttttaggaaatatacaaaaatcctccaagcctcatttgacttttat

SEQ ID NO: 27433 - DNA, 4535 bp, Oryza sativa
tttagccattgggctgaacaggaaaagcttggcgcacacgaaagagtatgagagcttagaaaaacacacgcagaaccccctacatggcgcgtcagatgacggagcgtggggctcctcaccgggagaccgcgcaggtccccctttgccggttcggccgggggccctgggtgaggttctaagctcctagtctgtggaatgttcgcgaaagtggaaacacacaagacacgggtgatgtatacaggttcgggccgctgagaagcgtaataccctactcctgtgttctggtagatctgtgtacgaagaagctacaaagagctggagaaccagagagctcaaactctagaaacccctttcctcctttttgcctctcgtgggatcttctcctggatcctccgggagtctccaatctctcctcccctggtcctctggtccggatcccctccctaagtgggcaaggtcctccttttatatctcaaggggataccacatgcaccacttctacctatttctctttttggtggggacccatcctcttttcactaaaacttggctcgcctttccttcataaatgggcggagatttgtaatggttgccgtccgaatgaccttctgatgggacggcccatacctacctccactttcgccggaagcaggtgcgacgtgggaacatggctgtctgccgacgacatgaccagtgtcagaccggtcacaaatcggtcattcttgtccaccacgcgtcagtttatcaatctgcatgttcacccttcttcatacaatgtcttgcttgtaacggttgggatgaagcctggcatatatctgaccgggaccaacgtgtcatctccaggagctagcacgctggctccggctagggacaagtgcctggaggctcttatcctgacgggatggggcgaggcgtgtgtcagaccgcctgttgccacctaacccacgatctgaccggtctgtgaccggtcacagaccggataaacgagcgcgctgcactgcgttacatgcggcgtgacgcgctcgttcaaaccgcaataaatgcggttaggtgagccccgccgtgctcacctaacctatacacgcggcgcaaaacccacaaggggtcggggcgcctcggccctcggggccgaaacgggagcggtccgatccctcggggagacaaagagaggggcggcctcatcaccttcgggcccgacccccccgagggggtcaggccacgtgggtgattgctcctgcccaaacctctagtcatgatactcccggtcccatgtcaccgacatcatgcttcccgaagaaaccatgatgaatttatcatggttacaacagaaacatccacatctacataatggtagtactagtattgttctattctgcacgtattacattctgtgtgcggaactcaacacgtactgctcgagtacaatttctgagcagaggacagggaaatgaaaagaatgcctaccaggtatagttaagttaagggtgtgtttagttcacgtcaaaattggaagtttggttgaaattgaaacgatatgacggaaaagttgtaagtttgtgtgtgtaggaacgttttgatgtgatgaaaaagttgaaagtttgaagaaaaagtttagaactaaacaagggttaagaagaaataaaataaaactatgaatatatctgctagtattgtacagttatgctacgagatgttgaattcaaatctcacatactattatttttttttacttagtatgcatctttactacatgttgtttcaattggtactaattaaacatcaaaaagtttagtctcgattactagtctcgaacaggtattaaagatcgtttctcgtgcatgagcaataaaaactgatataacaagaggaagctccacgagaaaagcaaagaagacggaaagagaatctcatatcacctgtgccatggattgatgtcacaaaatcgccgttgttcgctctgaatcgcccgttgacaacctgatttatcgatcagggctgtcgagagggatttatatgcgagctcaacattgtttcgattttccgattaccgcggacggaaatttgtccaccgcgtgtggatccggtaacgggcttcatcggggcttgcttcgatggacggtcaataggagcgggagtatgtactccctaggagtacccattttcatatatatactgtactcgaaaaattggctttgagttgaacctgactcttattttgttcttctggattttaatattttgtaaactattttctcaaagataatttaccaagttgagctatcattcatagcaagatctctcgctgcaacacccagggtccttttagagaaaattgcaatattgggacaacaaacattagggcttcgctgtcttgacactccgagtggatgacaaatgggtccatatgtgtctatgaaatatgtgtccagtatcattatagcaaaggtcaatgtttgcagtgtcattattgcaaatctcccgtcatttttaccccgtttcatagaaaaatattatatcttatgaaattaaatcttataaaattaatagacgagatatagctacattggtgtacatctttaatgcatgccatccaattttagattaccatattactttcgaacgaatggagtaagaaatgctcatctggttggcatcaatattttaggcgactggtgatatggaagatgttctccggggttgattacagccgtagttcctcgttccatgtcgtagacacacagcgctttcccattgaaccccgagtagtagatacagttccctctcaagcctgttgtccgtgcatcaagtgacgctccaaaacagcctatctgaacgaagaacactctgccacctagcgaatccaccttcacccacgctgatctttgctcctgcgtcgtcgccatgctcagcctgtaaacgccaacaccagcgacaatccgatcacatccaatcgggtgagagaagagaatggagtgcagctccccgttcgattccacaaagatgctggtacgtttcatgtacaccgccggcctcctgtcgtcgtcgtctacggcggtcacggtgaacgccggctccagtgagaactcgaggacggcgacatggtcgatgagatcggtgtagaactcgccgtccatcgccgtgagctggcgtaacgccaggatgacgatgccgcggtgctcgtggtgaggcggcccaggctggaggtactggtgctgatgcctcttcacccagtggttgtcgccggggcggcaataccagagcaccgtgtcggcgtggtcgatgacgagcacgacgcagctggccgggtccatgggaccgcagcacgagaggaggcacctccggcgatggctgctgccttcggcggcgaggacggtgccgtcgtggtcggggggcagcccgacacggcggccggtgaaagggtcccacaggaaagtgcacggcgagccgcggcgcgccatgagcagccagccctgcgccgtggtccaccaccggtggcctctcatcatgtcgtcgacgccgccgtcgcccaccctccttggcagcagtgctctcgccggcacgctgtacagggacgtggcgtcgccgtggccgaacagaagcagaggagcaagcttgggatccagtactgctgcagatgcatcgcctgcctcctccatgattttgatggccgactgtcccacaggtaggatacggccggtcaattgaaaacgaacgaatttggcggtgctttataaacgaggagaggctttgagcagtgcaattactggcatataggaaagagaagcgaagaaatctgcacgcctacgacctacgattactagtaccaattaggacatgaattcctacacgacatcaaaattcaaacaaattatagtactagtactttgggccggtaaatcagtaaaaggaaacagtaatctgggccggggataaagagggatcaccacatatgcatctatggagattggatagcaaccaacaaaaaccaaccgtgccgggtatacaaactacaagcagaagcggaagccgacctatatatgagtccggaggaaacacgtcaagaaagcagagctccgtagcagcacaaaacgcagcgcgccaagcaggccattgcggtgcacgaaccctcgagattcgccaagcagatagatggaggccactgcgacggcggcgcagggactacgggactggtcgtctctcccgttggacatgctcgtgctcgtcctggatcggctcgggtggtcgacccacccgagcttcgcattgacgtgccggcactggcgctccgccgtgtcgcccttctacccggcgtggatcacgcctctcctcctgagcgccgccgacatcggcgtcacgaacgtcaggtactacagcccctactaccacaggtgtttcgagatcgccgacacgctcctcaaggtgcccaaaattgcggctaggatctgctgctccagtggacaacacctcacgctgtgtctacctagattgatcctccaagccgatctcgtagccggcaccatgtatgagctgccaga

SEQ ID NO: 27434 - DNA, 1560 bp, Oryza sativa
gtggtttgttgtatgttcttggtgaagacgggaagatggcggtgtatgatccatgcaaccacgacaataattttacagttcccgataaacctaagggctttggaatcaaacaccaagttgatagccacctgtttgagtccgaccaaggcgcgctcatggctgtcctcgtcggctacagtggtgcgcctatccatgtcgtcaagctcaacgaagagacgatggagtgggagaagatgcggtcattggaaggacatgcgttgttcaccgggacatacacgacaatgttgaggaagactaagcttagattgatgcaaaacaaggtgttcctcccgaggctgtatgactggcctgagactatccatgtcgacattgttacacgtgatggcgaaacagcatttgtaccaaagtcatccagttcgtctaacaccaaggagatcacctcggacataaatatttggttctacgagtttgggcagcaagacgcaagagagttttggggatcggagagagtagattatagtatttgggttgattttagtactaattgacacaaattgacgttgttagctcttatattttcatatagtgaatcatctcacaatgaagttactcttctttcaggccaaaatcaaaatcgacgcaaatgaaatttgatataatatttctttgttggttgaaacatggcgctattaatattatgcactcagccaatgcaatttttgcatgaattgatattgatatttgtgcacagtaatttatgaggatttaagggaataataaaattataggcttggatgattttctcggaaaatttgaatttttttgggagggaaggatttagggtttgggtgattcacaaggatttaggcaagttttgaatttcaaaattcgaaccttgggatttgtaatggaactttgggatgaagtttttgggatatcaaggagagacccaccgagatcttttggcacacttaagtccttgaggatacagaaagatctaaaatttttgcaattaggatttcgttttatacaaaataagttagaaaaataattcattcgactgtgagttgctgaagatatggtggtgttatcggaagacttgaccgaatagccatcactgctaaatggtggcatggatctacttaatccacaaatagactttcccattaaaccaaccatatgactgattactcccttcatttcaccaacatccattatccaatgcatgaatcgatttaaaaccaaaacgtatcacatagagctagaagaatgaggaaaacttcaccaaaagcaaagtagttaacgtacaggtgcaagtagttaacgtacagtatcaatgatactggttggtgacgttggctttcatcatatacttggttatcttcttcttcgccttcttgtcttccgactcacacgtcttagcgtgagccagaagtgggtttctcgccctggccgaagaaggttcaagaagaatcttcttgtagccttttccgcagatccaacacttctttgggtcgaattcctcctgctgacgcacggccacctgatggcccgttgcag

SEQ ID NO: 27435 - DNA, 661 bp, Oryza sativa
ctctgaaactgtctttggttgcttccaattggttacggattccacgttactaggatcgacggcaactcctccggctgagatgacgtgaccaaggaatttcacttcggacaaccaaaattcacacttgctaaacttagcatacagttgatgttctcgtagcttctccaatgcaagacgaagatgttcctcatgctcttctttggttcgagagtagataagaatatcatcaataaagaccaccacgaacttgtctaggtattccataaacaccttattcatcaagttcatgaagaaagcaggggcattggtaagtccaaaagacataacagtacattcgaacaacccatacctagtggtaaaagctgtcttaggtatatcttcctctttgattctcaactgataataccctgatcgaagatctatcttggagaaaacagtggcacctttaagctgatcaaacaaatcatcaatcctgggtagtggatacttattcttgatagtcacatcgtttagtgcacgatagtccacacacattctctgagtatggtctttcttttccacaaaaataaccggagctccccatggtgatgaactcggtctgatgtatcctttctgtagcaaatcatctacttgcctcttaacttctgccaactcattggct

SEQ ID NO: 27436 - DNA, 683 bp, Oryza sativa
gaatgaatgataaaatcagtatatatttacatcctcctaaatcatctaatgataggttaattgatggaacgattttacaaaaggaaagtgccagagccgaatagtgctaacaatgcatgtaattcatgtttggatgatataaactgggaagatgagattaaatatgatccaggattaagaaaacaaattgatgagtaccatcctaatctcagagagagggtgagaaggaaatacttggagaatggcccttgtcaacctcgcacatttgcttttcctatgacaggttcaagaaggtttgtcccggaatggtttgatgagtttggaagttggcttgaatacagtgagtccaaaaatcgagcatattgttttttctatttcttgtttagagaaaagaaggatggtggatatgaagcatttgttaaaaatggttggaatggttttcatagaaaagaaaggttgaaattgcatgtaggtgatgtcggtggttcacactatcaagcaatgaagaagtgtgatgatttattacaaaaaaagacagcacattgatgttgcttttcatagtgtgagagaaactggtaagagggactatcttactcgattgaatgggtccattgatgttgctaggatgctagtaaagctaggattgcctttccgaggtcacgatgagtcaaaggagccctaca

SEQ ID NO: 27437 - DNA, 2316 bp, Oryza sativa
tcgcttgtacagaggagtggttcctggagcaagatctatccggaactcaatctctcgcttgggcggcataccaggtagttcttccggaaacacgtctccgaactccctgactatggggatttctgacagtcctatctgatgaagttctgaacttctgacagaggctgggggtgcaaagaaaacaaccggttgttccggccctcggtacagagtgacagtgcgtctcgcgcaaaccactactccttggaattgagccaaccaattcatcccaaggatcacatccaacttcttggtgtctagcagaatcagatccgagggaaaaggaatcccctgaatttctatagggacggcagggctataatactttgctgtcataacccctccaggggtggtgatgagcagagggttcctaagcctttctacccccaactgatttctccccacgaatggcacagatataaacgagtgggaagctccagagtcgaacaaaatggtagcagggatggaatgaacgaggaacgtaccaacgatgacgtctggagttgtcagcacgtcctcggccgtcacgtgattcacacgaccccgaatgacgtccttgccaccgttgttggagcggggaggcgcttggccttgctgacgccttggcttcgggcatttatccgcaaagtgcccgggctcaaagcagttgaagcacagacgctgctgaccttgagcgtccctgtggccttgaccaggctgcacggctggcgtaggaggacggggcgcacgagtcccttgttgattctgctgctgctgcggctgtgggacgcgcaccacgaattgaggtcgaggcgcggagcgaggttgctgctgctgttgttgctgctgcgaggaggatccccctggatagggattggtgtagcggaccctttggttagcaccctgttgattgcggaaattcgccaagcggcgcttgtgcgactccagttccttgtgcttggcttccaagcggatgctcttgtccaccagacgttggaaatccggatagtccccagagactagacggacggacagctcggggtccattcctgccaggaacttctcttgcttctcctcatcttcccgcacatcctccggagcgtaacgggccaggttgttgaactcatgcaaatactccatcacggagcggttgccttgcttcaactctcggaattcccttttcttgagggccacgactccggcgagcacatgggttctccggaaagcggcggtgaagcgagcccatgtaataggctgtccctctggctgcgtagcttggaagtggtcccaccatagagatgcgggtccctgcagctggtgggcggcgaagatgactttctcttcatcactgcactgcacagtgtccagcttcttccccacggcatgcaaccaatccaacgcatccacggggttgttggagctagagaaggtaggtgggcggatgcggaggaactcggcgagtttagagtgttggggaggtggaggtggagcattctgttgtggcggattttggaggtggtggaggaaagtagtcatcatgttggcttgctgggcgaggatttgggtgagaatggcgttggtgtctggtggtggtggcggaggcggaggaggaggtggaggtgggttgccctggtggttgtggttgctgccttcaggttgattgccatcaccggtaacagcatttctcctggtcgtcaccatctgaaaaccccacacagaaccagcaaacagagagagagaagctaacaattaaaactaaccacccacgactaccataattcttaaatttattactgctattaaattggttcattaaagttcaagttgcttaggcaaataaaataagacaggctccgacacagttatgccacacaccggcataaccatgccccacacgactcaacaagaagacaaacgaggaagaacacacgcgcaagcctactaactgctcgtctactgctgcgacgggccagggcggaaggtgagcaacagcgcatcctccgtgctaccaacgccggaggcttccccctcctggggaaccacgggcgcgggctcggcacgaggggtctcgacgaagcaggtccacgccagggactgacgaacaagctcaggcctggaggtgctcttgcgggcggtgatcttctggctgcggcagacgcggcgacgcttggggcggcagacctctccctgggcgatcttgagctgatgcagctgcgcctccaccgcgtcgaggtccttcttgagctgcaggttctcctgccgcagctccaggatcttcatgttgttctcgaccatacc

SEQ ID NO: 27438 - DNA, 2778 bp, Oryza sativa
cttttcttaagagccacgactccagcgggcacatgggttctccggaaagcggcggtgaagcgagcccaagtaatcggctgtccctctggctgcgtagcctggaagtggtcccaccagagagatgcgggtccctgcagctgatgggcggcgaagacgactttctcctcatcgctgcactgcaccgtgtctaactttttccccacggcatgcaaccaatccaaagcatccacggggttgttggagctggagaaggtaggtgggcggatgcggaggaactcggcgagtttagagtgttggggaggtggtggtggagcattctgttgtggcgggttttggaggtggtggaggaaagcggtcatcatgttggcttgctgggcgaggatttgggtgagaatggcgttggtgtctggtggtggtggcggaggcggaggaggaggtggaggtgggttgccctggtggttgtggttgctgccttcaggttggttgccatcaccggtagcagcatttctcctggtcgtcaccatctgaaaaccccacacagaaccagcaaacagagaaggagctaacaattaaaactatccacccacgactaccattattcttaaatttatcactgctattaaattggttcattaatgttcaagttgcttaggcaaataaaataagacaggctccgacatagttacaccacacaccggcataaccatgccccacacgactccaaaaaagacaaacgagaaagaacacacgcgcaagcctactaactgctcgtctaccgctgcgacgggccaggacggaaggtgagcaacagcgcaccctccgagctaccaacgccggaggcttccccctcctggggaaccacgggcgcaggctcggcacgaggggtctcgacgaagcaggtccacgccagggactgacggacaagctcaggcctggaggtgctcttgcgggcggtgatcttctggctgcggcagacacggcgacgcttggggcggcagatctctccctgggcgatcttgagctgatgcagctgcgcctccactgcgtcgaggtccttcttgagctgcaggttctcctggcgcagctccaggatcttcatgttgttctcgaccatcccgcggcgtaccatctgatggaagtcgatacgagccgcgtcgtacgcctccaccatgcgtgccaggtgcacgatggtagcgtcatcctccgagctagcatcccggaaggtggcgtagtcgcgggctcctccgcgacgagggtggtagcggtagggcgagtgctgcaactcgtccgggtagcgctggtgaagggtgccgatggcgaggagagcggcgctctggcaagcggcggggaaggagtctccacccgcggtgactgccaacgaagcccgctcagaagagccggcgaggatcactgcggtgacctcccacccagcgtggggctccgcgtcgtctccctcctgatccggaagcggcctggcctggtaatccactccatgtggataccccaagaccacgcacatgccccgcagctccaagacgaagccagtcatgtgcaaaccacgacgggtgacgctgccggccatctacaaacaaaaacaaaaagaaaacaacatttaaaagatcagattttggcgataaatgaagcagcaaggcagagagagactagacaattttcacaaataaccaaagatttttatttttgaaaatatagctaaggcttgggatctacggctcgtcctagggtcaagggtggctctgataccaacttgtcacgaccggaaataacccaacgggcgttcctgacgtgcgtgcattaatccttgtcccaggaggcaaggtacaccaaaagctgatacaattcagagtttaacaagcggaagcgtaaatagaattattacacgggcagcgaaggcccagcacacaaagacaaacgaaaaacagcggaagactagggcgacgaccacaggcgcttgacagcaggcacgagctagacaccaaagccttcatcttcaaggaactcctcttctggacttgggaaaaattgagcaagactgagtacatccaccgtactcaacaagacacacccacaaatgcagaataaatgcaagggagtacaagggaattataatataaagggttagggttgcagtaaacagcatttaaagacatttagttgctcaaggctattttgtaaacgcgatcctagcactaaacaatattattaatcaaggccgtgaacccacacgaacctgccttaacccaaggcctacgatgattcagaccgaactggcaacccgaccctgggtcccagctcgtcccaagccaacccaggccaaccattccacattttagttgttaagcgggttttaagaattaaaacactaacttgggtacattgctcggcttgcccataaccgagggcgcggctattcgaatagattaaactctgatcagaggtgtacatctttacccacaagacacgtctttctcacgtgtaaccacgtgccacataccaccacggtatacagacggaagacgtgacatagtttccaacccatcctagccatagacaagagtaccgacccaatcccgcctacggccggaacctccgggacaggcaggcaggactgagcccctagcagcagggcaccaaccctctgccatgacatctcgactaccgggccgcagctcgtgtagccttcatttgccctggagaatgtccatcgacccccgacttcatccatctccaatccgtgtacttttgtttataactagactg

SEQ ID NO: 27439 - DNA, 1891 bp, Oryza sativa
gagacttgaacggtccaattccgagttcaaatggccaagatatggccatttgaagtttatatgctctttaaatggatatttgcgaatttcttcatttaattttcaattaaaaatcctatttattgcgtcagccgagggagcagggcgcgcggaccgggtccacgggaagtggggcccacgcgtcagccccacggtccacggtggaccgggcgcacgcggctggcggcggtcggcgccgtgggtcccgcgcgtcagccgcacccgcgggcgcgggcggctgacggccgggcccacttggcagccgcgagggcgcgcccgagggcggcctcgccggcgcggccgacgggagcggcgcgcccgcgccccgatggtcaccgccggcgaccaccggcgcggcggagcggcgcccgagagagaggagggaagggggaaagcgaacggcggtcctcggctcaccccgggacaacgacgacgacggaaacgacgaccgaagcggcgagagacggcggcgcgggtcgggatgacgagggcgacggtgctccggcagtcgacgggcgaaacggaggagcggacggggtcgacgacaacgcggcgaagccgatggaggtggcgccgagtcgggaggaagtccggagtgacgacggcggcgaaccgaaggttggcggcgacggcggagagagaggaggacggcgctagcacgaatccgacggcgagagcgagcggcgagcggcggaaacggaggagagaggcacggggagcaaatatatagcgccgagagggggagagcgcggccggagagggaggaaacggccgcggagatctcggctccattgaagacaccggcgacgattgcgggattcaaatcggacgaatccgagggagagagagagggaaaagagggggaaacgggagagggaatcacggggagtgatttccccctctttaatgcgcgcggggacggcgggatgcggcggaatccgcggcggcggcggcgctagggcacgggcgggcggcggcgcggcgcgaggaggaagatgacaggcgggacccacccgtcagcgagggtggcgggcgggcccacccgtcagcggcgcgcgcgcggggaggagccgatgggccgcggggagaggagagaggggggggagttgggccgagccggcccaagaagggaaaaggggaggaaaaggacttcttttagggttttctttttataaaccttttcaactttgtttatttcttctcaattattatttgtgctctgaaaattccactaaaatttatttacacattttaggcttttaggaaatatacaaaaatcctccaagcctcatttgacttttatctttgcacattttaattgttggaggctttcacatgaattttaattattctcggcacaattttgaggatgaattttagagtcgttttgggacgcgacaaacctaccccccttaaacggaatctcgaccccgagattcggaagaactggcgaagagatcgggatgggctgccttcagctcgtcttcacgctcccaagtagctttttcttcggcgtgattgctccactggaccttgcaaaaacggattacccggttcctggtcctgcgctccatggtgtccaggattttcactggcctctccacgtaggtcaaatcttcgcgaacttcaatttgctctgagtcggcctgctcggatggcactcgaaggcatttcttgagttgcgacacatggaacacatcatgcacgttgcccaaggaggcgggcagctccaactggtaagcgacttctccgcgtcgagcaatgatacggaaaggacccacataccgaggtgcaagcttccctttcgtctgaaacctgtgtacacctcgcaatggcgtgactcgaagataca

SEQ ID NO: 27440 - DNA, 2493 bp, Oryza sativa
ggaaacgggagagggaatcacggggagtgattcccctctctttaatgcgcgcggggacggcgggatgcggcgcaatccgcggcggcggcggcgctagggcacgggcgcggcggcgggcgcggcgggaggaaggcgatgacaggtgggccccacccgtcagcgagagcggcgggcgggcccgcctgtcagcggcgcgcgcgcgcggggaggccgatgggccgcgggggaggagagagagagagggagggagaagtgggccgagccggcccaagagggaaggggggggggaaaaagaacttcttttaggattttctttttttttataaaccttttccactttgtttatttcttttcaattattatttgtgctctgaaaattccactaaaatttgtttaagcattttaggcttttaggaaatatacaaaaatcctccaagcctcatttgacttttacatttgcacattttaattgttggaggctttcacatgaattttaattattctttgcacaatttcgaggatagattttagagtcgatttgggacgcgacacaagctaacacaacgatctaagacaacgacttaacaagtcattctagttcttccgagcataggaggtcgattgaaggctcgttcggctcatcttcctcatctttgatagctacccactcaaacttggaattgttgcgcttgggttcttcttcttcatcactacttatgatgatgaccggaggatttgctggggcaacttctttctccaccacgcggacctttggcgccaattgatagcgagggacaaacaaagctctcttccttgcggtaagacgaatcctagccttctgcggcggtgcttctcccttcaatgcggctaattccttctccaaacgatccaccttgtcttctagcttgcaaatcttaccacgattccgatcttcacgatcttgagctgctaacacagtctccgcacgactttcatccatagcccacaacatctcaaccaaatgtcttgtggtaacatcattctcaattccttcagtctcaaggtaactgccacggtcacttccctggggttggcgaggatgatagcgatactcagtgtcggccaactgatcactgtagcgatcacgaagctctcctatggcaatccttgccacctcctgacatgcatggatgtagtttcttcctccagcttcaaacatcactgaggggatatcttcactattgctgttcaaggtgactttgactcggcacttttcttcatgacgatcatgacgaatctgggcataaaaaggagcattcccaaatccaatgacaaaggacatcgtacgcaactcctggacaaaaccttcaactccaaacaggtactcaggcttgtaacacggcatctaaagacaagtgaaaggagagagttaagacatctatccaattaatagcacaagtttttggattaatttgaataaagtttgaaaatcaaagtaaaaaggtaagtaattaaagtaaaccaagctttgcgaaataaattaaaacagttggaaacgagatcataaattttgtaattttgaataactggtttcaaaagaaatgaaagaaaattataaaatcaacatggtaaatttattttattgcagcaagattaaataaaacaatattgtaaaacttttgctgataaatgagccattagtacagtaatagatgtacagtactaataacactggaataaatttttaatgagaaccaaaaaaaaattatgaagtgcatgtgccattagtttggttaattaaaagagaaagggaggagaacagttctacttttccaatatttttagagggcttctatgggtaaccatttggcataacctagggtcaaagaggctctgataccaacttgtcacgcccggaatttctatccaaaattccaaacgcttacatgtgtgtgaaccctcgtccaggaatcagccgaggcacacaataacaaattgataatagagtacaaatattactctaattaataagcgaatagaatgtcattacagaggtagatagttcctctcaatcaataaagttctaagcagcggaaaataaataaacggcgtagacggctccactccacaggcagcttgaccaaggctacacctaatcctccacaccatcagcctcattgtagaactcttcctctgatgaatgattgcaaggtgagtatatgacatactcagcaagccacgcagcaaatatgcaagtgcacaggataacaaaggatggcataatagggtttcatttgcaaaagcagcatttagcaaacatttgagaatttaacaaaacagttaagtaattaaacaatattaagccaacgctatacaacataccctgttgtataggcccaaccattctgaacaaccaccccggctgcacagttctatctccaaaccaggaatgtaccattccaaaccaggagctaatcaaattattaccagttatagcatcttttagggctgcag

SEQ ID NO: 27441 - DNA, 1142 bp, Oryza sativa
cgaagtacgccgccaaccaggggggcctcgcccagcgcctctcggagatggccgggactctccaacggctccccgaggagctcgagaggacgattaagtcatcctcgagggaccttgcccgaggagcggtggagctcgtactggcgagttaccaggccagggaccccgacttctccccatggatggcgctggacgagttccctcccgggactgaggacggcgcgcgcgcgcgggtccaggacgccgccaaccatatcgttcacagcttcgagggttcggcccctcggctcgcgttcgccctcagctccgacgaggagggcgatgacggcggtgtgggcgacagtggcgacgaggctggcgactcgggtgcatcggagtgagcctccaggtccccgccaatctttaaatacgtctttcttcttttctttcttccgaagccttcgggcctcctttttgtatagattaacttactctgcaatcaaaataaagaaatttctgtgtcaatttcattttactgtgtgtatgagaacgaggatgatctgtgccatggttcttttgtgtcttagctcgaacaagggctcgtgcccaggtcccagtcctcaaatggctcgggtcggggctagtgcctggggagatccacgtgtcgagactggccaggccgggagcgtggtgaccgagggttatgggtgacccggttgtgggtttttgccgattcccccccggagttaaccacgccccggggcacggctcggttctgggccccttttggcgattttagccgactcgagcccccgagggcaggatcgagcacgagtgacctatttcaagtcaagattcttcaaaaggaaacaacagcacagacacagcctttaggaaatcgaaaatgcttttattgaaatacagatagaagagaaataagaatatgcatgtgtggtagcccccggccaaccctgcacgcccgaggggggtacggggttggcccgagcccgaaacctgacacccgaaccctattaggggtagaagcgacgaaggtgttcgatgttccacgggttaggcagctctgtgccgtcgcccgcggccagccgaacggagcccggccgggggacgctgatcactcgatacggaccctcccacattggtga

SEQ ID NO: 27442 - DNA, 641 bp, Oryza sativa
ggatccggaccagaggaccaggggaggagagattggagactcccggaggatccaggagaagatcccacgagaggcaaaaaggaggaaaggggtttctagagtttgagctctctggttctccagctctttgtagcttcttcgtacacagatctaccagaacacaggagtagggtattacgcttctcagcggcccgaacctgtatacatcacccgtgtcttgtgtgtttccactttcgcgaacattccacagactaggagcttagaacctcacccagggcccccggccgaaccggcaaagggggacctgcgcggtctcccggtgaggagccccacgctccgtcacatgatgtcaataatatgaaatcgaaatgtttcttggttgtaatgaaagcgttcgaaagttcgagcttgttttcgaatcttatagagaatcatgcactcatgcttcgtatttggcagttggttatactcgctccttccgcttttgatgcataattcgactactgagaaaagttagttaattgctgtatcgaggaaaagaagcaagttagttttatagcaggtacaatagcatactataagagtaagtttaatagtatagtccactactagctccaattcatccatagccaatctaatag

SEQ ID NO: 27443 - DNA, 668 bp, Oryza sativa
agcacagcatgtgtggttgtcatcagaggtaaccaagtgattgttggacatgttggtgattctcgttgcgtactctcaagacagggtggcctggtatagtgattgtttccctattgaatttctggttaatacctaatttgcaagctcgttcattgtggcgcctaacatttgtgcttgtttccattttgtcaataggctattgatttatccttcgatcacaaaccatgcacaagaactgagtctgaaagagagagagttcaaaatgcaggagggagatctcttggacttaggtgtgaacaagtaatggggaattatgtagtcaaggaacaatgggtcctcggtgattttgggggaggtgtaacaatctcaagatcaattggtatagtcttgtctggatctgtttttcattgattgcatgtaatagcacaaaaagaagcacattacactgtgattggcgttttacctacttacatttcaggtgactttgctttcaagaagaacaaagatttagatcgtgaaaaacaaatgctggtatgtgatccggacatcctcgctgtaagtgtaactaagtgtaaataggtccgtttggtagaatatgaagttcagttttgccgggttgggatctgatggaaaattgccctttcaatgtcaggatgacataactgatg

SEQ ID NO: 27444 - DNA, 944 bp, Oryza sativa
gtctcaagtctcaactcttcaaatcgaacaactgctttcttggatccacatcaacaaaataggatgtctacggtctacctaccaagatcagcgctagtatctacttcctccgtttcacaatgtaagttattttaacatttctcacatttatactgatatgaatgaatctagatatatatatctatctagattcattaacatcaatataaatgcggaaaatgctagaatgacttatattgtgaaacggagggagtacttccttgtcaaatcttcgtgccggtgtggaggccgacaccagcagagggaggtgacaagtggtggcgcgggcgtagagcacgggagtataggggatgtgccaccgtcgatccgtcgtgccggaaggtggatggaaaaaggaaggaggcgcggccgtcgcgccggctcgaagtacgcgaaaaaggaggaggaggagggagcgtcgtgccatgcgggctgtaggcattttgtgcctgaaatcggcccatggtctgaagtaggccgtagcgggctgcttcttgggtcacggttactctttcagctcggcaacagcaatagactcactcactcacactcacggtcacaccgatttctccctaggcgaccataccggaaaacccgcgactccccaactccgacgagaacgacatggacgccggcggcgaggaggcgaagcaggagcgccacctggtgctggctcacgagctcttcctcctctcccgccccgacctcgacgacctcgccaatgtcgccctccgctccgatgccctcgacgccgtcaagtccgatggcatggcgccgctgttcgagtcgctggccaccgcgggcgtgctgctcaagccggacgacccagctgctcgccgagatgcgcgcgcggatcgacgaggaggtccgcaagctcgacgagaagtgagtggggctgcaggaat

SEQ ID NO: 27445 - DNA, 1370 bp, Oryza sativa
gcagtggtcttgagatatgttgataaatatggaattgtgagagagagatttgttggtcttgtccatgtgactgaaacaacttctgcctatctcaagtcttctattgatgctctatttgcagaactgaagctaagtctaaagcaagttagagggcaaggatatgacggtgctagcaatatgtgaggtgagttcaatggtttgcaatcattgatcatgagggaaaatagttcagcttattatgttcactgttttgctcaccaactccaataggttcttgtggctattgtgagaaaacataaaggcgttagtgatttttttactaagatttccatcttactgaatgtggtgggtggatcatctaagagaagggatttgattagagatattaatgttaaagaaatgagtaaggcattgggttgtgggcaacttcaaactagaaccgggttgaatcaagagcaatgtcttcagagacctggggatactcgatggagttcccactataaaactctcaaaagtttggttggcatgtttgctacaatagtcaaagtgctagaaattgtggaaaaagacaaaaatgattggaaaattagagatcaagcatcgaatcttttggagtacttccaatcttttgattttgtcttctatttgcacctcatgttgactatattaacaatcacaaacagcttgtcactagcattgcaacggaaggatcaagacatagtgaatgctatgaaatgtgtaaagtcaactaggctcaatttggatgagcttagaagagaaaagtgggagaaagttctagatgaagtctctgacttttgtgacaagtatgatattgtcaaattggaaatggaagatacatatattgatcccaagaagcgtaggcacaaatctagaattacaaacaagcattactatcaagtggattgttttaatgatgttattgattggatacttcaagagcttgacaatcgcttcagtgagacaagctctcaattgcttatttgctcatcggcttttagtccaagagactcatttcatgatttcaatctagagaatttgatgagtttagcaaaattgtatcctagtgattttaattctggaaatttgagggaccttagccaccaacttggtctctacatcgctgatgtgagggatgatggtagattctccaacatacaaactattgccgagctttctcaaataatggtggagacaagaaaacatctttgttatccattggtttatcaacttttaaaacttgtacttgtattgcccgtcgctactgccacagttgagaggtgcttttcagctatgaagaatgtgaaaacatatttgtgcaataaaattggtgatgagtacttaagtgatag

SEQ ID NO: 27446 - DNA, 1277 bp, Oryza sativa
ggggggggggggcggccgtacccagccaaccaaccaggaggcataaaccaaaaacaagggtagcagaaaccaactattccgatcctaccaaagcaaagttctactactacgatactagtgctacctaggatcagtatcatcctgcgcatgcagcggtgcacgcatcatcacacatcatcttcgaccaggacaaaattgagtgaagaatcgctggtgtgcagcttgctgccggccgtggcgctggtgctgccgttggtgaccttgtcgtcggctgcgacagtggcagtgggatcaacctcctcgctggctcctcgctggtgttaatggagtagtagttatccacgatggtcgacaacaacgacaccacggtggcttcgtcagcagccatggcggtggtactgccgccggcgacgacagcggcgtcgaccttgacctcatccgcgacggtgttgttggcgctgggagtggggacggcgagctcgccgctctcaaccctggcactgccgctggtgtagacctcgtcgtcggtgtggctggcaacgatctcagcgtgccccctgggattgtagctgtcagccgtggcgttgggatcgacctcgtcgctgtcgaccgtggcatcggcgctgccggtgctggagtccgcgtcgtagcccataacggtgggcctggcagtggcagcgtcatcgacgccctcgtcgcttgtgtcgctggcaccagccggcgcagcactggtgctggcaatgttagagacggcagtgccaaatccagcgggatccaccagctggtactggaaggcgccgggcttgaactgaaccaggatgacggtagtgttctcgcccgatgccaagccgaactcaacaacctcctcacagatgacacgcagctctgcaccctcctgcatagcaatattaattggtcacagcattattggtaacagcagttttaacagcgaaagaatcgaagtcaaagcagatggcagtttgtcagccaggcatgcatattcagtgctaaactaacaaatggttttgtgaggtttagggcttacacagtttttttttaaaagaaaagagaaaatcaggatatttacattgcttgattgaagtcatttcctagaacagatagcatgattaacaccactaagatatcttgtcctgccaagaagacaaactgagggaaagaaaagactcaccaccgataaacggtcatgtatgtaagaaaccacgtccgcactgtccacgcaagacctgcagggggaaaatatacaggggctgcaggaa

SEQ ID NO: 27447 - DNA, 1699 bp, Oryza sativa
ccatcttagctctgtggtgttcatatacaacagtatgaattggggagacagaggatacactaccatcctgcttttgacatcggactctccagtcttgtcgaagtgtcacagagttcagaattgattgaagtaatctcttcacttggccagttgttgcttgatgggctgaataaatattatcaattatttgtaatcttgtcaaggacgacttcagtgcaggatggatggtgataaatctttgaaactttcttagcatcgcactgccgtacctcagatgatcaatgtaatttctaagtgacttgtcaagatgcctaaaaaggcctggccatttaccacctacctcatactctggaagaacgtcagtagcaactctaagaaaatcatgtgcctctgttttacatgccgcttgataagtacatggcaaatcgatcttaacatccaacgagtcactgaccataacatgatccaaatcccaatggccattccaagatctacctcccttatgagaccttgttatcattgtcaacagattggttaaaatgattctccaatctgggtggtatctatcactggcaggaaaaaaccatcacatctaatatggcggggcttggtcagatgatacccacgtagcttcagaaatgtcctcaacggaatccatctgcaaatatagtactctattatttattcctaataatgttaacatcaagccattgttattgaccaaatttaaatggactcaagtaaaatacctatccggtttgggcatgtcacatatgcatattactggattttcacaatgaaaacctggtaagttcaaatcatgaataaatgtgcgcacagcattttcaagattcttctgaatcctgcaaaaaatatagaaattaagacactgactctcatatgaagatgatctaggacaagaaagtcaccttgggtagcattggcacaagtcatgtgcgagttcaggagcataactccaaatatgatcgaaatgtatgtgcatctcaggagagctcagggtcttcatagaatcaacaattgctccataatatggtatattgttccgctcgaagctgattaaaaaacagatcagatgctgctttgatttcataagccataaaacatatttcctaagaatgatagatttttaccttcttaaaaagtcgaggaacatgtgttccagcttttggtcttttccactcatgaaataagacgcaaaatctgctctcactgttccaggagagggaggcctggtttctagctgcgcattggtgggtgatggccttggcttaacactggagctgctaccatgttctcctgccatacgggaatgccgtactggaggaggaccttggcttgactcaagtgacgagcttacgctctagaacagagaaaaaaaatgatgaaggcattttgctagatcaaatcaactagatgaatatattacatggttatagcaatatgagtgtttacaggtaacatcaaaaagaccgtgacaatagaagtggctttgaacacagtagatttgccactaaaatcctacaatcaaaggaatgcatatttctagcaacatgctgaagtaacatggcaattctacatttagaacaacaatgtgctaagcatgggatagcagttaacatttaaggcaacaaaaacgtacatgatgctgggtttgcctggcactgtgaggcttcttctt

SEQ ID NO: 27448 - DNA, 10837 bp, Oryza sativa
atagcaatatgagtgtttacaggtaacatcaaaaagaccgtgacaatagaagtggctttgaacacagtagatttgccactaaaatcctacaatcaaaggaatgcatatttctagcaacatgctgaagtaacatggcaattctacatttagaacaacaatgtgctaagcatgggatagcagttaacatttaaggcaacaaaaacgtacatgatgctgggtttgcctggcactgtgaggcttcttcttaaagctttgcttagcaccttcaaaataattgccacttttcaacacagaatgttggtcccttgagattgtgatatcatgaaccaacacaccgctttcaccaggctaattatttttaaacaaaaaaggtcagtaattaaaaaaatgcactgcttaatcaaagaaagtggcagaattactaagggcttacagaatcaacagatcgccaaatattttggtagttccggaagcccacatctgattccagaacaaaaaatcttccatggtactgaaaagaagaaaatagaatgaaaactagcataccaagcttatttaaaaaaaggcaggtatcacaactcgtaaattacaataccttgtatacaacgttgaagtgctcgttttgaaagaaaatgaacaacttcctatcaggagttgctgctttcaaagtgtgtaaactgtgattttaaaaaaaaatgtcaatagaagaaacaaaatgacaattgtatttacctatagctagcatgcatacccaaactctgtgacttgtccaggattatctttcaagaacgtgtgaatcaactcatctacaaataaacaatttaaaaacagagcattagcgatcaaagaaagaaacatatttgcatccgtaaatagttgacaggtgaaaaatgtaagatcgttacatcttctagtttcagcagcatctatcataaaatcagcatctttctttgagttgtatttagccctatcgatattcagctgattgtatgaacgtccatcaactgcattcaataaaatggtgtcttcctgttcacaaacataccacagaagaaaaaattaggcaaaacccaagaaaaaaaatattaacatgactacaacactaaattaatccatgtaataagtagccatggttcaatcatactaaaagacatctccagtagcatacctgattgttcatgtctagtacccaggcatgatataaagggatatccaggattctaaaaagcccatactgaggggtgtcctcaaacccgtcgacactgcgcataccaattacacatcaaaatatacaaatggaggctatattattgcttaagaactcgcttaaccacaaaccttgtgcaataaatatcaatatctagtcctgtagccgtttgttccaccgttgcctgtgcagttttatagctgtcatcctacacattgcaatgtgattaataatcttcaattaaaaaaatggaatatattgttttgataagtggatcagatcgaaccttcattttgctgaaaacttgactaaacacacggtcaactaaataatctaggtaaacaattgtcatggatggtggcaaggagagtttcctggtaaggattagataattgcctgcaaaacagagtagttaagctacatgggacagtttatcagcgggtatagtataaacaacaaacaaaatctcacatatggctatcaaggagcagggtccattcttggactggaggatgatcttatacccccggcccagaaaggatatgagttttgtttcacaaaaatctctgggcacacgaggcacttgcggtggaggcaaagtgctctcccctccttcatccttctgtacacactcctcttcggtctcctcctcctcgccctcctcgtcctcctcatcaccctcctctgcggagtcaccagcggtctcctcctcctcgccctcctcgtcctcctcatcaccctcctctgcggagtcaccagcggtagagaaggacagcgagcggtcaacctcgaagagctgcgaagctagccggccgaacaactgcgggccggccaacatccggctgacggacacctgaccgatcggcttgaaggcctgaccggtgctcagcctctgacctatgtcgcggaagggagtgatcagaagccgcggcggtacccgctgccgaccgggcggaggatctccccgcggtggaacctgccgctgccgaccgggcggaggatctccccgcggtggaacctgcccctgccgatcgggcggaggatctcgccgcggatagttggatcccatcgtagagaaggtcttctaggggagcggtgggaactgaggctccaccctcgccgtcaacctcgacgcaagcgcgcgccgacgctcccccgtccgaccgagcggaggacctcgccgcgaccgatcttggcggcggatctcgcgaatgtttttttttttctttttcttttttttcgagaggaactcgcatgaaccctaaaccctaggaggcggcggcgtttggtttgaatggtggagttggctcgagtggaatggcatgacctattagggtagtaggtgcgaggaggcgactgcagtctactgaagtcggcctgtgggctgtggtccgaacggaccaagacggcccgcgtcttggactacggagtgttcagttgagctgcaagttttacaggatttttttattattgtttttctaaagatttataaaaattactctaatataaattatcgttccaaagttttgcaaaaatactctccttcggcatataaatcaccctacaataagaccatctatgtgacgtggcaccccgtagaaggggcacatcgcgacaattttgcaggcctcccgttgggcgatttatcgtcgggaggggccacctgcaaaattgtgaaactttgaaatgattttttttacaatagggtgggaggagtatatttctataaaacttcaaaatgaaataaatataaatattaaaaaaatgttttacaaagagtaaattttacctagactcatgtattattatactttaagttacacaagaccacactattgatcatttcgacttttatttatcacagttttgaattctacaataacatctcaaatttatgtgttctttattcatcatataaatgatctacatccatgtaactatagccttttaaaattttgatatgtgaatatgtcaaactgattagtgacgtggttttatggaacttggaccattaatatcttaagttatatgtcacgtgccaaattttatgtggttttgtgcaactttgaccattataggtgaggttttgtaaaatttactcttacaatctagccttctaagaaaaacttactccgtatttcatgaaaataccattagtaagacttatttctggaaatgtgttgatacctcggtgccaacgttggtatcttttacattagatgataccccacacgctgctacaggtttattattataatttaaaatacacatattagtatgatctattaaaatactaagctgcataaatgttataatttgaacacaaaagcggtaggaacacgctgctacgggtttattataacaactagttgggtgcccgcgcaattgcgcggctagcacccatacaaaagtaaatatttttatatgattttacttaaaatttattaaatatttgtctcgttgtcttaagactttgaaagaccaaaccttatcatccatgtgtttctaattttataatttttaaaagtcacaccagttgctaccccttacttctgtcatatcattttttatttgcttgcttgatctaccattgtttatatttctttctccttgaaacctttacaaattggatcttatagcttttagagtttattgtccagttgggtcctctatggtccgcccgctaccccttatttttattgccaataggattttaacaatcgaacaaaattatcattggggttctttttctttactttctagaagttcggtcaaacagtcatcagctccaccactgtgatcctctatggcccacccgctaactcccctcgattttaaaaatcgaacgtaattatcattggggtttacttttttactttttaaaagtccagccaactgtagtgaccgtgctatttaagtatttaacgccatgctcgtcgtccctcatcttaattgtcattggatttctatttgagattttgtttatagtttttatatgtctcatcatgcatcatcaccctactcctctattaacttattgtttttccctctttattatcatttatcattgttgtgttctatatggacctttttttaaagaaaaatcatatttttcattccgatgttctgttatttataaattttattcatacttgcactcttatataattattttatattttcaaattttattttatttttattttgatttttaatttatctcgtgatgggttctagatgatcttttctttcaacaatcttttctttaatttcgaattttggttatttataaattatattcctatttgtactcttctttttcttttttaattgtgaaatttattttattttctattaatctcatactatgtctatatgaattattcttctaatattttttattttttattcctaatttcagttgtttgtaaaatgtatttttacttgaactcttatatttgatttttctaatttctaaatttattttattttttattatggattttaattaatctttaattgtgttcggcatgaactcttctttcattttttattgtgttatttcaaaatcaaataaaaaatccgtgcacatgccgtcatgcttttctggttgctgacgtgcatcacccaaatccggctcattgtgcagccgcacggcttgacccgctgcttcggatttccgtcgctcgttgctagcatctatcttcatatcaacaaaaacgcatccaaattacggttctacagtggttcgttgtctgctacttcattaatatatatgtattatagcctaatttatctagaacctaactctggttaattggtttaggaaatcggacaaaactcttttgagaccgtttgcatgtaaaggtcctagctagagattgattctaattctgcacgcgtataataagatagatagattgatagatttcaaatacacatattgaacacgctgctacgggtttagtatatatgaacgatcttcttggcaaagatgatcgttttgattggaggatgacgtaagatataatgtacatagctgaagatataaatgtcaactgttcataggacgatggtgtaaaaggagacaacctggacgaaagcaacaagcaaaaaacttcaaagaaattataccgcttgctcaaatgtgttcactcttttatttttcttcggtggatatccttactgacacgtgtgaataattatatgaactgttcaaaggagaggatggtgtaaaatgaggcaaacctggatatgaaaacgacaaacaaaagttagaggtagccgtctgaatgtgctagctctttattgttctttcgtggaactcctcgcttttacctatttacgataaatctgatgatgttttgagtgggagggacaatggaaggaaccagaactccttttccgggtcggccaaatattggcaggccaatctcattatgattggaggaaataaagttttaattataactatatgaaggatgtcgcgctggtctcaaacaaacttaaagacggtaaggaaatagaaaacaatgtggcaagccccgcctctgagtgggattactcgccaggctgggaaaagatccctgctgccctccaaactacgatttccttattgatgccgtttgctagcaaatcaaccgacttggcgatgtgctgaaagatcctaacattccgctctctccaaataagccaacaaatgagcatgaacaaactatcgaaatctgtcctgtagccgttctgaaaatgccgtcttgtcgcgatccaagtggcctgccatcctccgcaggaattgcaatgttaatgttgcaccaaagtcttagcttacaccagaaaccagaaaattgggctgctagcttagctcaattttgtttactcttttatgttactcatggaactgctcactaacgctcaattttatgttagtatgttagctgtaaataagttcttaactacctctgatgagtatgatgaaaaaatactattgctgagtaattttcatccaacaacatagcatatcatgtgcgttgaggaatgaggtggtaatggataatcccatcccattcctcaaaccaaacaactcatcaagaatcaagtgatgaattaaattcattatctcactcaaactaaatgctaggccgacattccaaaaaaatgacttttgtgttgaactcaaagcaaacaatcactggcaatgtgcccaaatactcgacaattgccgagtacacaacggatgcaaaggtaagtcaagatacataaataactcacattgcatctgtacctttattatagatagattcatcaaccctccctccagcaagcttgtataatgcaacaaagcaacccccaaaggttttgatcacaaaactatatatgcccatcaacagtacaactccttaaaatcccatcaagataacaaattattgggcctataatactcatccgggcccactgcaatccaggtcactggtggacactggggttcacaccttctacttggtggtttctgcctactccttaggttgtccaactcttgtatctaaatcaaataaagtagccagtaaagcaagagttagtacccttttcaatgaaggggaagagcattcatgttgtccgcaatgagtacaatagagaaagcaaaaacctaaggctaatactagtacataaaactattcaagttggctttggttaatgccttattacttgttgtattctcttgtttggaaattggcatggtcccaatgtactttgattattactactttatatttaaatacatgctagcaaaatatatagaagcataattaatgataaggaaatagaggtggagatgactatattccgttgacaaagttcaggcctcattttccaactatggttagataccgaagggtttttcttaaactcacaccgaacagtatactgtgtaatgtctcttggtactgctctggcattgtattatatcaacatataaagcttaacgtcctaaacgaagttcactaagttactgtgttctaatcttagtttggttgacgtatatatcattcataccatgctaaacaaagattgagctatggcaatttactgcccatatgcacatgatgctgaatttgtcagggatctgcaaataccatttcttggatgcatgtatatcctctataggttagtaaattgtcaagaaaaaaaaacatttccatacatttaagccgttttacaaaactgaaagttatggattgtggtctattttatactgcaaattagcagccttcctattctctggataaacaaccgacattatatttttttaaagaaattaaaaaaataaccaatagctgcattaaattactgcaactgttcaatttttttggtgttgctttgcactatcatgatcatcaagagttaaatcacagtgcagcactgcagctaataaaaacccctatgatcccaccttactataacttgagaccggcttgcaaataacattttatcgatgtattaatctttgtcatatagtataaacatatacaattgacaagtaccagagcacatgcatatgatagcaaggagaggtaaattaagtacctgcagtaggagtgggatgtttggagatggcagttgcgagatagcatctcatggagaagagggtgttcttttttccgtcaagcttggccgctccttgaatctccttcttcctgacatcaagggcgatcatcactcctcccatatcacaatccctgttggcagaattgcacaagaggtaaacaacatcatcgtcgtcgatgctcaaggcggggtaagacatagccaggcatcctagggacaagctggaccctttggcttcctcatcatcgctggtgctgagcatgagtgtggagattatgggtaccccatacccacacggcatggttatccgactagtcataggggatagcttatatctatggaatatttaaccgatcatgacttgggtattacgtttccttttatattatgaagcggcctaaagtcctgatttgataatattgtaaaatagatttaggaaaccgataccgtattggttaaggtttctatcttgtaatcctgccccccatcctatataaggtggacaggaggccctctagggggcatgacacaaactgatcgtcagatcaatatacacccggcgaattcaaatccccaaacaggagtagggtattacctctcatcgagagggcctgaacctgtctaaatcctttgtctccgcatccatccacttttaggtctcgtatgctacccccttttcatattgccgaaaatttgtttcgacagttggcgcgccaggtaggggtgacgccgagtttcctatcaacgagtgcgatggaaatcaacttcagaaagaaaaaagatcaatgtcgatccaattagcaacgtcgccgggcgtttgcacgttcagcgctgatgatcatcttggcatgcatggatgcactggtccctggattctcgctcacaagatgtgtgtgcgtgctgcacgccgtgaagccgccgactgcttgccagggcaaccaatcatgagtgtgcatgcagaccggtggaacgataaagaagcttgagatcaagatcaaccggctagctcgtggccataatatttggcatcatcacatatatcgatctatacaactattacctggtttggctttccactttaattttatttagattgatccctaatcacatgttactctacgttgttttctctccttgatttcatgcatgtactgctgagtgcgtggtgatgtcatactgccatcatgctatcacggtgatgatcatatcgaggctgaagcggagtacaggacacaagtcgctgcgcaactcgccggctgcatgtcttgatccatgcattttggacgtcacgttactctatacggccgtcgcacgttcgcatggtgtcatgatctccaccaattgcggcctcacgcgctcatcaatggatctaacaccgatgactggattggattgtcgaccatacccactgacggccatatccgtcattgtcgaccgggcagatcacacccctattaaattgttcagatatcgggttagctgttccaattcatagattattaaaattaatctttgatttatttatttttttacagatcaatctattatctgtatatatttcctgtcgtcgattcggccgagtcctttgaccatgcagttgtacgtcgaactactcgctgaacaagtcgatggttatacaagtcctgtacagggacggcagctgccggacagaacgaggagccaatgaaccacatgcaatcgtgcatgcgcttttgtgcttatggttatgcaggcctctctatcaagtgccaatcaagccatgtgtttggatctattgattattatatcagttatttttttttacaaatatctaaccacaggttgatgtgcaatttcttgtctttgcatgtatcatcgcctgtacttcatcactgaccggctggcctttgccaccgccaactggtgtttccgcctgcacggctggcctattatgccgtcgttgttgggcgtctacgacttcaccggcggcttgcctccgtcgccgccgattggtgtcctcgcctatacggttggttggtcacaccaccgttcatgggcgtccacatcttcaccgaccggctggccttcgccgccgccgactagcgtttctgcctgcacggctggcctattatgccgctgttgttgggcttttacgacttcaccgccggcctgcctccgtcgctgccgactggtgtcctcgcctatacggctggtcggccacaccaccgttcatgggcgtccacactttcaccgtcgatcgccttcgtcgccgccgacgggtgtcttcattattattgatggacgactttgttcccacattggccacctctgccataatcaaggggaatatgacaaagctaagtcatcatttattttattctttatatgatattttgccttttcctttgcctcactacatcaactggttcgccgttgactagtgagtcgggggctacagatgttatatcatattttttaaacaattttcataatatttatcttgattgcttgcgacatattctgaatacaaaagtgcctatcgagttatggagttccatcttcctatgctttccgtttggtttgccaatggatagttgcctttgggccgattcctagcacctaggggcttgttggatggaccgaataacgcaaggtgctaagtattattcggaataaatcaaaagcatagagataagataatttattttctgctcttaataattgcaaaagtacccgagtagtaaactccgacccatgaaactttgttccattaatgacgaactcatgtcactcatatgcatgtttgggaagtgcttaggccgactcccggtgcttgatggctatgactagtcgggcagagtgtttaaacgtaatgagtcatctgctcgggggaatcaaaattgacaagagaagaaatacatatttataaatattttaaaatacttgaatttttctcgaagtattatatttacatcagatactactcatcctatatgttcgttctgcaggatccagatccagatatgcataaaagggattcatggcttt

SEQ ID NO: 27449 - DNA, 667 bp, Oryza sativa
ggaccctctatccgcccgcggctaacggaattgttctgaagtgcattcctcgggaacaaggcgtcgagcttcttgccgatatccatgaaggcgaatgcggagcccactccgcctagagcaccttggttggcaaagcctttcgtcaaggtttctattggccgacagctctcaatgatgcggtcgacctggtccggcgatgcagagcgtgtcaattccacgccaagcaaatccatcagccggcccaggccatgcagatcataccactttcatggccatttgctgtctgggggctcgatatcctgggaccgtttaggcaggccccgggcgggtttgagtatctgtatgtcgcgatcgacaagttcactaagtggcccgaggcttatccggtcgtcaagatcgataagcactccgcacttaagttcattaagggcattacagcccggtttggggtgcctaaccgtattattacggataatggcacccaattcactagtgaacttttcggcgatcactgcgaagacatgggcatcaagctctgcttcgcctcccccgcccaccccagaagcaatggccaagtggagcgcgccaatgcggaaatcctcagaggccttaaaaccaagaccttcaacatcctcaagaagcacggcgattcgtggatcgaggagtt

SEQ ID NO: 27450 - DNA, 2073 bp, Oryza sativa
ctgtgtgacttgccttgctggccttggaactcttcaaactcttcttccgcgaaaacggactctccggaaacgacggaatctaagcagaaaagagcaaaatcaccaaaacagcacataaacaagcatgaacagtacatgtggatatttttaatgtgtagatctcaattttagaaaaatttagagacttgaaccaactaaatcggagctaagatgaattagttatgaatttttaaagattaaatcggattaaaacacttaaatcggtttaaattgaattatgacgcaataatgaattatttttgaaaaggaaaaggggatttattgcgtcagcgggctagggtttggtggaccggcgcatgggcggcggttcacgcgaacggacggccgagattgatccgatccaaatcggacggctgagattgatcgagtccacggcggttcacggcggacggccttgatgacgccagcaatgacgtcaccgacggcggcggcggctcggctcggcagacggctcgggcggcgcacgctcaccggcgaacggcggcgctacggcacgaacggaggacaccaacgggtagcggacggcacggcgaacacaccgacgaccaaaacgacggcggagaagcaacggacggcgacggcgacgagaaggaagcggcggctaccttcgggttgtcgacggcgacgaagctccagcgggttccgacggctgcgaaggggcggacgaggacggcggcgacttggcgatgacgacggcggtcttcccgagcggcggcgacagctggagcgacggcggagcacggctgaagcggcggcggcgacggcgaagctagggcacacggcgctagagctactccggcgacgagaggcgaaggcgagggctgcgacgggtagaggagacaccgggggtccttttaaaggggctcggaggcggcggcgaaggcccacggcgacggcaacggcgaaggaaactcgcggcttggaaagagggaaaaccgatccgaatcgaactcgattccaaagctttccaaagcgatttaaccaaagattccaaaggagaaaaggtagaggagatcccggagatcatttcccctctattgattcggccggagaaggaaagaggcggccggatttggaaagcggcggcgacggcagctcggcggcgcgaaactagggtttcggcccgaggaagacgacgactgacgggtgggccccacctgtcagcggccgaacgcgcgcgcgcggctgcggactgggccggctgggccgaggagagagagaagagaggttttgggccgactttcggcccaaagccaaaagaagactttttaaaacctttttcaattaaaattatttcttaaatgcaattccatttattaaaaatactttcttagctcaaataaatcccagaaaaatctaggaattatagaattaagcaaagtatttaatgaaattttatctggcccaattttatattggaatttattaattaaacatagattttcttttcaagacttttaaaattatttctaaaaattccatttaaacaacaatttatatattttgaattttcagggtgtgacaaacctaccccccttaaacagaatctcgtcctcgagattcggaagaactggcgaacagaagcggatgagctgactttaattcatcttctcgttcccaagttgattcttcttccgagtgattactccattgaactttgcagaaacggataactcgattcctggttcttctctcatttgtttccagtatacggattggtttctcaacataagtcaaatcctcttggacttctatctggtcaatattagcttcttcggtaggtacccttaaacactttttcaattgcgacacatggaacacattatggactcctgccaaggattgaggtaactccaactgataagcaacctctcctcttctgctgacaatcttataaggtcccacaaaacgcggtgccaattttcctttggtctgaaaacgatgaactcctcgaagaggcgtgacacgaagatacacataatctccttcttcaaaactcaaatctctgcggcg

SEQ ID NO: 27451 - DNA, 556 bp, Oryza sativa
taagtctgtcgactatcacccaaatagagtcatggcccgatgacgttctgggcaaaccagtgataaaatccatacctatttcttcccatttccattcaggaatcttcaaaggttgcaacaaaccggcgggtttctgatgttctgccttgactcgctgacaaacatcacatactgctacgtattctgcgatttcacgcttcatacttgcccaccaaaatctttccttgagatcctggtacatcttggtactaccagggtgaatggagtataaagtatcatgagcttctttcagaattgcatcctttaagtctttgttgtcggggacacagattctttcacccaaccatacagttccgtgctcatcttccaagaaaccaatagcttttcctcttctcatattcttcttgatctcttgaatatcaggatcattaatttgggcttctctagcttgatcaattagagtgggcttcgcttctaaggctgcaacgaaacctctattgacaattcccaaatttaatctttcaaattccttgcataattccaatggcaactgtcg

SEQ ID NO: 27452 - DNA, 1271 bp, Oryza sativa
gctgtatgaattcacggtgatgtcgttcggtttgaccaatgcgcctgccttcttcatgaacttaatgaataaagtgttcatggaatacttggataagtttgttgtggttttcattgatgacattctgatatactcacaaccagaggaagaccatcagcaccatctccgtctggtgttgggaaagttgcgggaacatcaattgtatgccaagcttagcaagtgtgagttctggttgtccgaagtcaaattcttagggcacgtgatatctgcaaaaggagttgctgtggatcccgaaacagtgaccgccgtcaccgattggaagcaacccaagacagttacccaagtccgcagtttcttaggtttggcaggatactatcggagattcatcgagaacttctccaaaatcgctcgacccatgacacagttgttgaagaaagaagagaaatttgtgtggagcccgcaatgcgagaaggcgtttcaaactctcaaggaaaagctggtttcctcgccagtgttaatcttgccggatacccgcaaggacttcatggtgtattgtgatgcttcgcgccaaggattggggtgcgtgctcatgcaggatggtcatgtggtagcctatgcctcacgtcagctacgacctcatgaaggcaactaccctacacatgacttggaattagccgcagtagttcatgctctaaaaatctggcggcactatctcattgggaatcgctgtgaaatctataccgaccataagagtctgaaatacatcttcactcagtcggacctgaatcttcggcaaaggagatggttagaactcatcaaggattatgatgtgggaattcactatcatcctggtaaggccaacgtggttgccgacgctctaagtcgaaagagccattgcaacactcttaacgtccgtggcattccacccgaacttaaccaacagatggaagccctgaacctaaacatagttggtcgtggatttttggccgcgttggaagccaagcccaccttgctcgatcaaatccgcgaggctcagaagaatgatccggacatgcatggactcctcaagaatatgaaacagggtaaagccgctggtttcacagaggatgaacacggaaccctatggaatggaaatcgggtatgcgtcccagataacagagaacttaaacagctgatacttcaggaagctcacgaaagtccttattccatccacccgggcagtacaaagatgtacttagacttgaaggagaaatactggtgggttagcatga

SEQ ID NO: 27453 - DNA, 2793 bp, Oryza sativa
tcacctaacctatacacgcggcgcaaaacccacaaggggtcggggcgcctcggccctcggggccgaaacgggagcggtccgatccctcggggagacaaagagaggggcggcctcatcaccttcgggcccgacccccccgagggggtcaggccacgtgggtgattgctcctgcccaaacctctagtcatgatactcccggtcccatgtcaccgacagtagcccccggcgttatgccagggcgatcaccctcctcgagggaagcggtcgggcgtgacgccacttacttaggcctggtgacaagtggggctggtctctacagttgggcagaaacccaacggtcgcaaatcacgcacatcggcaatggtaactcgactgtcaataatgagcggcctcttcaagactgccacattactcgagtagcacacgaatcgggacgagccggttcgttttgcctggagatatggtgatggcacttcggtcggcgagtgcaattaacgcgcgcacgatatgttccatctcgactgccacagccgcatattcacctcatgcgccgcaagcgggcgaatgggattagtggaagcgtgggcgcgagaaacgagggagcgagatagtgggcgcgagaagcgaggagccgggcacagcgttggcaagggtataaagacaccgaggaagagatttgcttccttcctctcgccattattccccttgtcttcgccgcttgcgccctaactccttgtttcctgtgccctaccctcgccacacgcgctcgctctcaaacatctcttcttccggcgtcatggcacggggctctgctccactcgatggtagcgtgctgccgctttcccgcatcgtgagcgagaggcaggccgggctgccgcgccgcttcctgccggaatctgccaccggccaggagatagttacgctgggcgagggacgcccggcgccacgctacccggggcggaccgttttcttcctccctttcgcaatggcagggctggttccgctattttcttctttcttcatggatgttctggagttttacgatctccagatggcgcacctcacccccaacgcggtaatgacattggccatcttcgcgcacttgtgcgagatgttcatcggggtgcgcccatcccttcggttgttccggtggttcttcaccgtacagccggtgtcgccgccgtcggtggttggtggctgctacttccagccgcgggggccggtgctgaaccgctacattccttgcgtcctccacaagaagtgggatgactggaagagcgactggttctacacccccctcgccgacgaagcgcgcctccgacttccgaaccagcccccggcgcaggcctccagctggcgggcgccggtagatctgggagatggctacgacgccgtcctcgaccgcctggcgggcctgcgatcccaggggctcacaggggccatggtgtacggcgactaccttcgtcgccggatcgcaccactccagcggcgcgcccggggtgcctgggagtacaccgggtccgaggactgtatgaggacccaccggggggtcaaatgggactgggtccctgaagacttcaaggtaatgatccaacgggtgctgaatctcagctccgcggaggcatcgctcatcccccaaggagtcctccccctctgcagcgatccagatcgcgccaccatcctgaccatcatgaaggcggtcggggcctcagaggagcaggctcctcgaggccatgatggcgcgggcgggagctgcaggggagaacaatctaccccaggagggggtcgtgcttccgggctccgtgacgggggctcggggggctgccgccctgccgacgcccgagggaagaggaagcaagagggttcctcctccccatctcctccccgagggggcggggcggcgcgtgtcagcagcaggcgcccggagggggccgcgccgacgccgcagcccgagggggagcggaagaagatacggcttcgcaagatgggggggacagaaccatcccggggaaaccttatttcccctccaaggtagtcgtttaaccgaccccctcgcaggttcgtcccacgcccattgtggctgtattcattctcccaacgcgagttttcactcacccatcttgtttgtcttctggtctttcttctgtttcagcgagatctcgtcgcgtccctcccgccattccaagtccggccagtctgaggccgaggatacggcgaccgcggaggcccggaggcgagaatctgaccggcgagaagccgcggatcgcctacgggaagccgaggaggccgcccgggaggccgtccgggctcgccaggctgaagaagccgcttgggaggaagccagacttcgccaagccgaggcggcgacaacttccgaggcagctcgcgacgaggccgcgggcacatcgcttgggcccactccctcgggcaacactcaggacaagccaggtccgggggacgtccccgagcccggcacgtccatcggcgggccgggccgcgcggcatcctcaccgaggcggctctcccccacgccttccgttgccccactgagcgcagagccccttttgcaggccttggccgtcgcaaacaccacggtgttggacgggttaagtgcccagatggaggccctgcaagcagagcgggcggagctcgacgccgcatgggcgcgcgtcgaagaggggcgacactcggtggaggccatggtggaggtgagccgcaaggcacaccgccggcatgcctcagagctcgaagcccgtcggaaggtgctggaggagatcgccagggaggtggagg

SEQ ID NO: 27454 - DNA, 1061 bp, Oryza sativa
ctgtcggttacaaaaaaggtcctgtccaattctgttttcctgctcgatgttttggtgcaaccatctactgtttcagttcctggaagttatcaagctaggaaacaccagaaactaccaagatacactggtgcaccgtgatctgttcctcttgcaggtgacttcttgattcatgaaacttatcaccagttgaagaatcattttcttttttcctctgtaaaacttgtgttcttggcctgattgcaatggcagatgtacaatggagtagaggagagcagtgcaggaacatgttcagagctaatctttgcacccatcgatgcatcgttcagtgatgattctccgctgctgccttccggtttctacatcatccctatcgattctcctctgtaagtaaatctcacacaattagataatacactagcatttcgaatcaaattttctaaaatttttatgctataaaaaacataattcttctggattttctttccttgcaaatgttaggacacatctagctcgaactgcatgctagatctcgcttccatgctcgaagcagcgacgccatggagcaggatcagcggcatcaatagcagcggcgagctccaaggcggtgatgacgatcgcgttccagttcgcgttcgagagccacctgcagggcagcgtgcccgccatggcgcagcagtacatgtgcagcatcatctcatcggtgcagaggattgccgtggtgctctcatcctcccgcctcgtccctcccggcgttgccgccgccacgcagcacgcgccggcgactcggtgctgcccagatggatttgccagagctataggtttgtggcttcgcagctgcttgtaatacagttcatatctgtaagattttttaaaaaaaaacagttcgcttttcagaactcatgatgctttgcttatgcagatttcattttggagctgaactcatcaaatctgcagatgccaacagcagcagtgaatcggttctgaaagcagtttggcatcatcccagtgccatactctactgctctctcaaggcttcttcagcctctatttttctttttctg

SEQ ID NO: 27455 - DNA, 2876 bp, Oryza sativa
catcgtaaagcagagcagctgcagatcatcctgtggtgccatccgatccatgttggtgttgatgctgtgatgctgttgaaggcttttccatcttttgccgcgttgccaaaattttgaattttgaaacctgattctttttttttaacaaagtttgtttttcagcatttggcttttaaatcgctaagtacgtaactagaagtttatcatatttttttcctaattaagccagtattaggacaaccaatgtttccaaaatactataaggaagtgaatgatttaaattttaaattcttcctcgcaaaatagtacaatagtttatagtatacttgtttgattaatcatctctcttttattgtcttaatccaagtaccctccaccccttctccatggctcctccttaatctcttctcattatattatgggggtggtgccatggagacagtaactagaattggacgatgcgtctgaacagaactctgaaataaagcaatttttttttcatatagtatagttggtccgattacaaaaaatatgtagttcaaactttaaaactatagtgagatacataaatttgttcatgtctaattttaagatttaatttgagtaatttttttaagggactctagttgacaaacagctgatttctcttatactcccaccgtcccaaaataagtgtagttttgcactatttacgttcaacgtttgaccgttcgtcttatttaaaatttttttatgattagtatttttattgcattagatgataaaacatgaatagtactttatgtgtgactaaatattttcaattttttcacaaattttttaaataagacggacggttaaacgttcggcacggatatccacggctgcacttattttgggacggaggtagtaggtttcagcagtttttcttgaccgtacgatacccacgtgtcgcccatcgctcttgtcacgggcctgttcagaatctcgttttgttggttgtagtagaccttgctacttttgtggcccacaagccacagtccagaaaaggaatgactttatgccgactttgtataacatccctaatctaatattagaaatctttaccccttaattatatacccgtcacaagtacaagtagaatgcatgtcaatgagggtagaaacgccatatcgtgtgcctggctaggataagacggacggaaaacgatcgagaattgacggaagtgttaaaaatgggaacggggtgaactttgggtgctattaaagtgaaccggtatctttcggtgctataaatcaaaaaacgtgaactttcgatactatataaccaattttgccttattatataataaaaccgtataatttgggtctctgttttcgttgagtcagcaaaataaaaaaacaaaaagattatgaggcctacatgtaaatgaggtggatggtgggagatgggggaagagaagaggtggcggcggcgatggtcccatcctcctaggtcgaccgcgactccgcgagaatggtagatcggcagcagcacgcgcacatccgacacagcgccatgggtaagctcccgcggcggcggactcgtcgtctacgacactgctctggcgggtgcaaacgcacgcgcccggcccaactccacccaggtcgttggcttccaactccacccaggtcgttggcttcctcacgctcaccgtcctcctgctcccgaccaggctcacgctcaccagcaccgtcgtcgtgctctgcccatcgtgctgctcactagccccatctgggtgcatgtcgccatcgtcgttgcagacgaggcagcaacaaccttccatagtttcatggtcaaaaaagaagcactgaagacatcgttgccaaggccaatcatctgcttcagcgatcgatgtgtaagcacatcattgacagttcgacagttcgtaatcaaacttgagcagtaattgaaacaatttcagccaaaaaaaagaagaaaaaaagagttcgagcagaaaacggactctgtttctgacgttctgcaatctgcattggtggccgggtgaagatctacagcggctgccagggatagtacaggttgggcccggagggcgcactgcgtgtgccatcggaggcggcggcggtggaggcgttctgtggcggaccgtgcctggtgcttggctgcgtcgatgccatcatggacagcttccgcctcacgctcgaccttggttgtggggacaccggtaatcccatgtgttatacagtaccacttcctggatcagtaggtggtacacacatagcacagtataatattataactgacatcgtttaccggtgtttctataataataatacaagggtaaccttattgggtcccgaaatagaccaagcatgatcacttacaatacaaaataccaaagcaatagatagaacagcggaagcgaagcaacggcggtccatcgaactccacaagcaacgactggtgaacctatggtccctaatccatcatcttcaacacgttcttgacagcagcatggcataaatctaatcgacgccaacttctttctaaaagatttaattaagcaagagttagtacatacgtactcagcaagccaccactacaaaatgaatctaatgcacacagggttcaaggatggcttagtttatttgcataaggctagttttcacgattcatttcacaagcctattggcatagcagttttaactgaaaaacaacgttattgttgaagttgtaattatttaggtttcatccacctctccaagccctgcttagttcggtttaccctcatatttcgtcttattaactctactatactgaccttcccactctatgggcaaggttcacatgtctctcataactactctaagcagtattcaaatctataagtctagtca

SEQ ID NO: 27456 - DNA, 26838 bp, Oryza sativa
ccacatgtatgacaaggatatctatgatagagttttgggatggtaggtatttttcttcttctcaattgtttgatttcaaaaaagaactgccttgctctctgttatatttgcattatttgttctgcaggattgatgaaatattggagaactatgaactccttgagttccctaaaaggtacgtattcaatactactagactactctacacactattgtgctttggtcttaaaaataataaaatggtagactggtgctgatctaagggaacacatcctatgcacacaaggctttttcgtgtacacaccaactaacaaatatcacaaaaattctggaaaaaaatgtacatgaactttaagtcgtattatatatatgtgtaaaatctcaacttcaaattcattatatatagggggtaacaaaaaagacaattctggcatatttactcttaaaactgtcagagtttttatcttatttgttacgtctaaaatgtattgaatttaaagttaagactttacatataagtgtaacactaatggaaatacatatgtacaatgttttctaggatttttggtctaatttgttagttggtgtgcacggtgtgtatacggaaatcttatgtgcacaggatatgttccattgatctaacatcatcaatatatttcttttagttgttcaaatctaaatattctgctagttaaggaaaatacttgtgaaacatgtaattgaaagcgaagcttctcaagtaagaaaaaactttaattacgttcattaactggtattctccaaaagtttttctaacataaggcgcttgtgttccagctatgaaaatcaagacctcaaaactactgaacggtatgaccttaaggctaaactcattctccttttgctttctttgtgtatattcttcattgttgggcttgcgctttcttctctctacctttacacaacctgttatcaaacttaaggggcagtttggcagagctccacctccacctctcctagagctggagcccaacctaacagtttcagctccacccaaaaagggagtgaagttgctggagtgctctcacaaaatgaactagagagttagagttggagtggggttcaggctgctccgcaactatactccaaacccaactctgagttaaatttaagagttggatccctgccaaacgggccctcactatattatttctgctcttgctcaatcattaatgacatgtacacccatggattaacctctgaagaacactggaacagtaggtcataaagataggaatgaaatggcacagtaaatcctttgttttctggaatagatttgctgcagtagccacaagttgggtgattcattttgatgttgccgctagctgtgtcattttcttagactattttggataagttggcaaagcattagtgcaatgctatatgtgaggtaaagactacaaataatgaatgctcgagtcttttgtgaacagaatgccattcgaaggtagcaatgagccaatgattgtgatggattttatctgtgattattactgaaattatctttaatgttttttatgagccatcaaaatttaatgcagtcattttaaggccatactactctttcatgtcttgtatttcttgttattactgtgatactgaactaacattgtcgcctacataaacaaggaaataacaagagaacaatacactcgtgcatattaaataaagtgtttagtgttcatatgtcagctcggcatcaacatgttaggcctagccagtagagataatatgtacttaaaacaactataaggttactttccaggtttcactggcaactataagcttatttccagttttcactgaatgaagcctttgcttggtccttatatatgaacttgtctgttcagtgcattcatgaaactttgtgattcattagtgacttactgatacatatgtgaccatgtgcgctggatatgaaggttcattccaagcactagtcatatgtaaaaaaaaggtgcaatatgcacctgataattgtagtgctgtgtatgtacatttaatctaacatagttagtagttcattagagtaattagagtggttcatgatattagttcattagttactctaaacatagttatatgatgtgatctttcttgtgatttctgttgtgttacacagttacggcatagattttcctgctataactccaacaggtcacgatgatgccttccccgatcctcacaggttcgtctccaatcacctaaagtataggtaaatcatactcacatagttaatagtttctgtttttgtatgcagtggtattggtggtggcagcagccagcatgttggtaatatgacacccatggaactctcaaaaatatttctttttatgtttctgcatctctacagtcttgttttaccacttatttatacaacagatccaaatgatccaagcttctttccttctaatcccttgcatgtacccttaagtggcacagggtaatccactttttctttttattatcttgtcattttagtacacatgaggtcatttttacttatgaatggactttaatatttgaaaataggagtgctccaccgagtggtcattataatccaattggtccaccagatgtgccagggcttgagccttcttgctctgcgaggtaatatagttgttgaggaacagtatttatacacaatattcttagcaaatctgtaagttccaagattgccagatactgtacttggctgcgtttaaaacccatgaccaacaaatcaaccttctttttcatatacttcaatttctggcccaacctcctgtttccttagcaaaggactatttatatctcacctcctgttgtaacaatatagtaataatgttggattagcactatcctacataattcttatattcccttggcattacaaagctctaaaagagtgtccatttacatctagttaaaactgtcaaaatgattttgggtgataccattttgattgggagttgctcatcctctgatcaacaggcaatgctaacctaatatagatttttctttacatgcaggcgtccaaagcaggaggccccccttcaaaggccaccttcctaatcgtatttgaagcacttcgaactgctagattgcaaatagcttatcagacattgcctgtaaaaacgtatgcaaactcctgtatttatcatacccttgcacaccatatgctcgatcacagtttacacacatatgcaatcgtatcaacctatttccgttacccttgcacacctaatagcgacctgtgggatggaatgtaaagcacctctcgcagtcgttcgaaggtgcatcatcgtaaagcagagcagctgcagatcatcctgtggtgccatccgatccatgttggtgttgatgctgtgatgctgttgaaggcttttccatcttttgccgcgttgccaaaattttgaattttgaaacctgattcctttttttttgaacaaagtttgtttttcagcatttggcttttaaatcgctaagtacgtaactagaagtttatcatatttttttcctaattaagccagtattaggacaaccaatgtttccaaaatactataaggaagtgaatgatttaaattttaaattcttcctcgcaaaatagtacaatagtttatagtatacttgtttgattaatcatctctcttttattgtcttaatccaagtaccctccaccccttctccatggctccttaatctcttctcattatattatgggggtggtgccatggagacagtaactagaattggacgatgcgtctgaacgcgcctgaactctgaaataaagcaattttttttttcatatagtatagttggtccgattacaaaaaatatgtagttcaaactttaaaactatagtgagatacataaatttgttcatgtctaattttaagatttaatttgagtaattttttttaagggactctagttgacaaacaactgatttctcttatactcccaccgtcccaaaataagtgtagttttgcactatttacgttcaacgtttgaccgttcatcttatttaaattttttttatgattagtatttttatcgcattagatgataaaacatgaatagtactttatgtgtgactaaatattttcaattttttttacaaattttttaaataagacggacggttaaacgttcggcacggatatccacggctgcacttattttgggacggatgtagtaggtttcagcagtttttcttgaccgtacggtacccacgtgtcgcccatcgctcttgtcacgggcctgttcagaatctcgttttgttggttgtagtagaccttgctacttttgtggcccacaagccacagtccagaaaaggaatgactttatgccgactttgtataacatccctaatctaatattagaaatctttaccccttaattatatacccgtcacaagtacaagtagaatgcatgtcaatgagggtagaaacgccatatcgtgtgcctggctaggataagacggacggaaaacgatcgagaattgacggaagtgttaaaaatgggaacggggtgaactttgagtgttattaaagtgaaccggtatctttcggtgctataaatcaaaaaacgtgaactttcgatgctatataaccaattttgccttattatataataaaaccgtataatttgggtctctggttttgttgagtcagcaaaataaaaaaacaaaaagattatgaggcctacatgtaaatgaggtggatggtgggagatgggggaagagaagaggtggcggcggcgatggtcccatcctcctaggtcgaccgcgactccgcgagaatggtagatcggcagcagcacgcgcacgtccgacacagcgccatgggtaagctcccgcggcggcggactcgtcgtctacgacactgctctggcgggtgcaaacgcacgcgcccggcccaactccacccaggtcgttggcttcctcacgctcaccgtcctcctgctcccgaccaggctcacgctcaccagcaccgtcgtcgtgctctgcccatcgtgctgctcactagccccatctgggtgcatgtcgccatcgtcgttgcagacgaggcagcaacaaccttccatagtttcatggtcaaaaaagaagcactgaagacatcgttgccagggccaatcatctgcttcagcgatcgatgtgtaagcacatcattgacagttcgacagttcgtaatcaaacttgagcagtaattgaaacaatttcagccataaaaaagaagaaaaaaagagttcgagcagaaaacggactctgtttctgacgttctgcaatctgcattggtggccgggtgaagatctacagcggctgccagggatagtacaggttgggcccggagggcgcactgcgtgtgccatcggaggcggcggcggtggaggcgttctgtggcggaccgtgcctggtgcttggctgcgtcgatgccatcatggacagcttccgcctcacgctcgaccttggttgtggggacaccggtaatcccatgtgttatacagtaccacttcctggatcagtaggtggtacacacatagcacagtataatattataactgacatcgtttaccggtgtttctataataataatacaagggtaaccttattgggtcccgaaatagaccaagcatgatcacttacaatacaaaataccaaagcaatagatagaacagcggaagcgaagcaacggcggtccatcgaactccacaagcaacgactggtgaacctatggtccctaatccatcatcttcaacacgttcttgacagcagcatggcataaatctaatcgacgccaacttctttctaaaagatttacgtactcagcaagccaccactacaaaatgaatctaatgcacacagggttcaaggatggcttagtttatttgcataaggctagttttcacgattcatttcacaagcctattggcatagcagttttaactgaaaaacaacgttattgttgaagttgtaattatttaggtttcatccacctctccaagccctgcttagttcggtttaccctcatatttcgtcttattaactctactatactgaccttcccactctatgggcgaggttcacatgtctctcataactactctaagcagtattaaaatctataagtctagtcaagagtagtacaggtctcggcgctcattaaccgcgagcacagctattcgaatagatagatttactcacactgcagtggatgtacgcttttaatcccgcactccgtggcttgcccaacacataagcctagtcccaacatataagacttgccacggcacagcttttcagtcgctctcgcatttcggcacccgctccaaggactatgaacccccattgcgccccggcactcctaacccctctgccggatagtgaggggagtcctggcgctctagggaattggggatattatattatatatatagttatagggttcattttaagtttataccatggcctttacctttccgacactgcactcatcacaacacacttatacagaactaaccatgactgaggtgtcgccccacaagagcttcctaatccgctggtctatacccactgaagaaatgcggtcgtactctgttcgtttctcgtatagcttcctgactcggtccataactgactagggtcggcgactaaccgtttccagacccacccatattctattcatgccgccccagtcgaaatggttttgttgtattaagttttggttttcgcagaaggtttgtgtgtggcgggtggcactcatgtctccacccgcaaatcatcaatcactcacatcgagtgatctcacacccataatcatctagcataaatatagagtgtacgtatgtctataatagcatcgctaagcaatgtcaataaatgaccacacataaataaacgactcagctaatcaaaggtatacaacatgtataaaggtaatcaatatcaaatgtaggcataatcgagcatagatacgcactttataaatagcatgcaatttatttgtaaacaaaacatttataaatctaggatcaatatgttcaaggaagggagcgtagtgacttgccttgctataggttcctaatgtcttcgagatatccgcattagttagaatacccgcgatcgataaatatccgacacgtctgataaataaccgaagaatatccacgcataatcctaaaagaaataaaataaagcaacattcaatacaactaatggtgccaatttaatagatctcgaatttagagagattatggatgttggacggagtcaatcggggttatggtccaaaagatatgaatttccgaagttgaaaggttttataaaccgaggagggagtgctctcgggaagggaggtgatttagactttatgatagggctctgggctgaaatgaggatgtgtatggactttagtgtataggtaggccgatggtgggctctggaggataccaattagacttctgtaggtgaatgaatccctcgggttctgctagggggaaaagtacacgcaaggtccctcaacttgttagccatatacaaaatcgtcccttaaccgcaaaaccggacatccgacgtcccccaacttacaaaactggtcacaataggtccctcggcggttttcaccctggttttgtcccacgtggcggctgactcagcgtgggacccacgtggaccccacatgtcagtaagccacgttagcaccctatctctctttctctatttctctccttcctctcgctctttgctctcgcacaggcggcggcgcgcgcggccgaaaggtggtgcggctagcgacggcggctcccgggtggcggtgcgcgggctcagggcggtgcgagttcgccggcctccccgtccccctcgtgcggtcggcgatggcggcgcgcggctacggccatcataactgacgcggagagaagggccgatgcggcggcgtcaccgacgcggtggagaagagggtcggcacggccgacggggaagaatcggcggagaggaggagcggcggcaaagctggagccacacgcgcggccggcggaggcgcggggaggccggtgagctcctcccaagtccaaatccggcggcgaggcgggaggaacgcggtgacgatggcagggaggcacggggaggccagcgtcggcatcgaggcgggaggaatgcgtcggcgttggctcaggggagcaaggcggcggtggcggcggtgaggggagcaaggcggcggcgtcagcttcctctccgtgctcgccgacgagaaggagcggcgggcgaccgcagcggccaagctggtcggctgggcggtggcgacgaggcaggaggaacgcgtcggcgtcggcttggcggtggcggcgagacgggaagaatgcggcgacgacggcgacaccatgatggcgctcgaggaccgaagccgcgatgccctcgacggctgccacccgtgcccagctccttccccggtggctgaggctgggggagacgtcgacgccgtcttcctcggcttcatctacaaccacgcgccgctgccgcccttcacgccgcccgtcccatgccggtctgttggccgtcgcgaccgcgctgggctgccgccgcccttcccttctcccgtgtcgccaccgccgcgtcgccggtcggcggtcgtcggacctcctctcccgcctcaccccgacgacatccccacccaccgcccgggccgcccagcctgtcgagaggagataagtgagagagagaggaagggggaggaaagatagagagaggtgatgacatggcttactgacatgtggggcaaaaccggggtcaaaaccgccgagggaccttttgtgaccggttttgtaagttgggggacgccggatgtccggttttgcggttgagggacgattttgtatctggctaacaagttgagggaccttgcgtgtacttttccctctgctaggaggtaaatagacttcataagagggcctggtcctttggacttacacactaaagtacagggaagtgatttagacttccatgggggaagtcaactcagggaggaagggtctagactgcgggtcccacttccttttcttttcctctaaattttcttcctctattctctctctttcttatcccctttcttccttctttctcaattcttctcgttctcttctctgcttcccgcgcacattgcaatattggactgcaaatatagggcttcgttgttttgacactccgagtgaataacaaatgagtctatctgtgtctataaaatataggtccagtgtcattatagcaaaggttaatgtttgcagtgtcataattgcaaaccctccgggtgagaggggcgggggcggcggcgtcggggaggtgtgcggcggaccggtggtgaggtggtgctcgactgcagggtgggctggcgcggcggcggggaatggagaggggagggccggcgtatggtggctgagggcagcggcgcgatggcctggcgcggctcggctcggtggcgtccgggtggcagcctgggggcgttggtggcggggcgacgcgcgatggggatgcggcctggccgaggagggaggagggggcggcgaagtggcggtcgggggcggcgcagcgcggccaggtagtggctagcggcagggatggatgggagatgggggcggcggtagtgaggtggaatggaggggaggccgtcggcgtggtggcggctgcggtctggcgacggcgcggcgcggttgggcagcgcccgtgcgcggcgccgcagccatgggggaagggaggcggcacggaagtcgaaggggggagcggcgtcggggcaggagggtggcggttcgaggtggaggtgatacggcgatgccgcgcatatggcgcgggtgacgaagcggcagtgtaggggataaatgtcagtgggttagtgcgagataagggttaggggttagcgtgttagcgagtcataggtcagtgaaacggaaaatacaaggggtcagtcggcccgtttggttggagggagtttttagtagggattgggagtttagagggatgaggctattaagtgtcttgtttagttgggagacatgagaattttggtgagatggagatgaggaattgaggaaggaactccctccttttcaatagctgggtaggggcaggtaattgggaggaaattcctcctttactttgtctaagcaaatctcgaccatccgtttttattaatgatctaatctccaactaaactccctatcaatttctatcaccactaccaaacaagatattgggattaaaaatcaaattcccatcttaatctcatcatcaattccctcgtgtaaacaaaccgagtgtgttagaggttagtgaaacagaaaataaagagtcagcgggttagtgagttagtgcaacagaacaacaaagggttagatgttaggggttagtcgttctcaggtcattcaatggcgcggcggccttcctgtcctcttgctcaactgaggcccagccggagccggctgtggcggagcaagcggagaggtggcaggcagcttgtgcgcgagatggaggagtggcaatggcagagctcgagttgggagaagggagaagaaatggagaggagccgagctgctgctgtctttggtagggtttatatagctttgctggctgcctgagcatgggaggcaatgtgagggtgggcagggagcagtgccgaaacgtcgacatcgccacagtaccaggtacgcatggcccattgtacttggctttgccacttttcggtgtgaacttggtgttgctcttctcagtgaacttggttctgtggtggcatgtatttagtggagggttttgtggattgggttcatggtgaatgtgttgctgctgttgtggagggacccctgtcatttggtagctgcaaaagtaggttcaattcactgtggtggcttgtgggcaattgatcgaacacgttctgtgcatgcaggtgttcggctgagggaataggacagcaatacatgcatgtttttttcggtgaactcggtttatcatcttagtgtggatttgtgtctcctgtgttgttggtgctttggggagggtcctgtgaattgggatcatgggtgcatgggatgttgtttgggagggaccctggtatttattagctactgttgtgagccggcaaaggtgggtgcaaagtgctgtagtgtcttgtgggcttatgtcgagcacctcctgtgcatgtctgttggttgttttgggcagggcaggcaaagcagactttgggtggttggctgagcaagtgcacaggggtgggctgtcagtcggctgggggaggaataatggacttgtgtggtgaaatgggctgtgctagcagagggggagatggcccaagtgtaataggagcttttgtattttgtagggatttgaaaaggaatggcgtctgtatttgagctggcacacatacagtgtatttgtaatgggactgtaatttgaacatttattttggctctgtactcagactgtatatatggaactgtacaattggactggacttggatcggtattagaaatagaatatgcacaaggattggattattgaactgcaatacgagatttggtttgcttggatgatacaccgcatcttcgaacagggaattagggatgacgcccgataaacaattccatcggcagtcttaggatttcgtcgtgagcgctttgcacgaacgggcgacggaaacaaaacagtgatttttgggacgacgcatggcatacaaatccaatcgtcgcggtaggaatagaattgaatatatttgaattgacacacaataaataaatacgccgatcaattgtagacattcgaaggatttattgagttgaattaatacaacggtttgaaataaccggagggtaagaattgagaaagatatgtcgtgctgcgacataagggaagattttcaggttaaatattctgtgatttggtagcacttaataaatcagaccgtgaagatatgggaaagaaaggacgttggactgagggcgtccctttaggagatatgatttaatcgagatctttagcacacaacctaaatacacacaaatgcataataaatcccagcatgcaaaaaggttttaaaaagatttttgattattctgagtttttaattccgtatttcagaatcgaaattttcgggatgttacaaccttcttcgccagccgcgttttgggaagaaaagagaagaaagaggaggatagctgtcatgtgggctcccacgtattttttttgttatctttatttgctgagtaggatgtcaaatcaacgaaactggacatatatgttagagtatatggtagttagagtcatattaggatatgattgatttgtgtagactccttccatatctgtaattctttcttatctcctctccatgtactcttatatataccagccccctgaggctcaatacagtcaatccacgattcacaatatcctctctacctatactatccaacatggtatcagagcttcggcttccacttcgtcgttctaccccacgcatcatcggcttgatcacccgttcaaacggccggctacgacgacaccttgctgctaatcatcttcgactacgcgtctacgccatcaagcttcgggctgccgctgcgtcgcccccctcgggccgcagttccgctgcctgtggtccacacctccactggttgttgcagtgctgacaggcgccctccttagcatggctacatcaccagtggacttctcgccgctgcatcgacatggaactgcagttgtgttgtcttctcgaaccacaactttgccgctttcgtcgttttcatcgtcgttagcgcttcgacaccctcgtcgtccgcattggtcatcgtcagccactcggatcttctttgtctacttcgagcatcgccgccgcgtctccaagttgccaccgtcgccgctctaggccggtagtccagctacctctacatggctactgacgttgccgtctaggccgttggttccgctacttcgccttctttttcgtccatcatgattcatcgccagtgtcgccgtatcttcctcgactacactttgctcttctccgacaactacatgctgctccggcaattctccctctacgtcgttctcgcgttgcgaccgttccggaggtcttctctgctagtctccttcaacattggcttatgattcatggtggtcccctgcctcgcccacgcggtattggaaacactggcgtgcgcgttcgtcccgagttgtcccggggtctggcaaaccctgtgtagcgcccgttccgtcgtggcgcctagcgggaaaattatctcttaaaaaccctaatcgcgaaatttgtttctttgcttgttgtctagtgtccgtgccatctcagatctcaaatccccgatctatcgtcgagttcaattccgaatccaatccttccaaatcaaattcctccgcaaaagtctattttgcctcccccggggtcgatgggccgaatttttctcggcccatctccccctggctcgccagcgccctctctctctcgctctctctcctctcactccgctccgctccgcccgcgcgttgcgcgggcgtgcgcgggagccgcgccgagcgcccctcgtccctccgctctgccggcgcgtgcgtgagccgccgcgccaagcgcccctccctcctccgctctgtctgcgcgcgtgtgcgtgagccgcccgcgccgagccgagcccttctctccgctccctcgctgccgctccccgcgctcgttcgcgcgagcgcgcccgcgtggtcctcgcccgcgtcgcgtctgcgccgcccggccccgctgccctgccgcgcctgcggccgcgcagccgctcggccccgcagccagcgcgcgtgcccgagccgcgcctctcaatccgccgcgccttctgttgcatcccgcgcgcgcgtgccgtggtggccgaccgcccggtcgccgccgccgtcagcctctgcccgcgcctgtcgcccgtgtcgccgctccgctccaaatcgccccgccgtcatcgcctcggccccgccactccgcgcgcaagccgccaagggacggaggcagagccctcctccctcagccgcgtcgcccccgctcccctcctccttttcccaaagaagcaaagggcgagctcccctttctctccctccttttcccattttcctcccgccggcgtcatcctccctccgccctgtcgccgatttggacgcgagcgccgagcgccagctcgcgccttgaccgcccaagtcggtttccaaaccgacattgccgccctttaaagccccgggcgccctccctctcttctcctcccatcgcctccactccattgttgccgcccctctgtttcgccgacgccgttcgtcgttgcgcgcgtcggaggagccggcacgagcgaggacgcggaaggggactccgggcgctcgtcttcctcctcttccccggcccgaggccggagagattactcccgcaccgtcggcctctcgtcacagcgcccctcctcatctcggtagtgcctccctccgttcttcctcctcgctccacctctccccctaaattttcggtagtagctcgagtagcctccccgtagctagccggcgccgccccgaccgttgccgccgctcgccgtgtgctcgccgctgtcgccgcccgtgctccgtagcacccgcttgtcgccggcctcgctcggcgtagctccgctcaatccgacgctagcaacggattcccgtggccgcgtagatgctctcaccgccgggaattggcccctcgtgacctcgtcgccatttcccccttctcccgccgccgcttgccgccgccgcaattcgtcgccgtcaagctccctccgacgaatccgagccgttggctcgtctctcctcgacctgagcaaccacccggtgtgctcgctttcgcctgtatcgccgtggttcgctccgctgctcgccgctgtcgaccgccgtccgttccggcaggcgtcgtcgtctacctcccgccagcccgcgtggcagccacgtaggcgccacgtcggcgccagctcggccaagaccgggtcgagccgaccccggtcagcccctccccgtgcgcgcgttccaccgcgagccgtgaggctgcgcgtgggcccgccgcatccgtttcaccgcggaccacgcgcgtgcaccgcatcccttccccgcccgcgcgcgtgcgccgcgtgctccctccgcacggcgagccgagccgctgacaagcgggtcccactcgggaccgcgcgtggtgagcccggtctactggcgctctctctcctcccctcccgcgcgcgcgcgtcttgggccgccttgggccgcccagcccatttagctcggccggaccgccccaattctctcgggccgcgccctagccgcccgaggaaaagtctattttccctccctcttttcttttcttttcttttcttttccaaaaaggatttaattaaatccttttcctttagacaaaaatccaataatcttagaaattcaatatcttctcaaccgtaaatccgtttgactccgttcaacttccaaaattcctcaaatctcgagatctatctaatggcacgcttagaggtcattaatagggctttattttcgccgtttgttgagttgtcccgttttgcgtatagtttcgaagcccgaagacccgcagccgtgcccacggtcatgggcggatgtgaggtgattcctagcgtagttttgtttgactactgcttgtgaaattgctgttgtggaaaggggtttgatgtttgaaaaacctgcagctgatgggatcagctaggcccgggtggccgtttgaaagttgttggcccgggtggccgtttgaaaagctgttggccgggtgccaaccttgtttcaattctaaagactgatacattgcacatactccgaccggacgagacgcactgtctcatccgtgtcgtttgagaagcactcacttagttgtttttagaaaaaagagttcaaataaaatcaattgcaaaaacaacagcctttccttgaagcctgcattaaacacttatttcccatggcttgttgtagcgcccgttccgtcgtggcgcctagcgggaaaattatctctcaaaaaccctaattgcgaaatttgttcctttgattgttgtctagtgtccgtgccatctcaagatctcaatccccgatctatcgtcgagctcaaattccgaatccaaatcttccgaatcatttcctccgcaaagtctaccttgcctcccccggcccatctctccccggcccttttccctctctctctctctctccctcgcgctccctcgctctctcccgatcccgccgctttgcccgcgcgccgcgcgcgtgcgcgcgtgagccgcccgcgccccgcttttccctcccccgcgcgccgtcgcccgttgcctcgcgcccgcgcaagccgagtggccgaccgcccggtcgccgccgccgtcagctctgcccgcgccagtcgccgctgtcgccgctccgctccaaaccgcccgccgtcgtcatcgccggcccccgccactccgcgcgctagccgccaaggcccggaggccgtgcctcacctccctctgccgcgtcgtcgccccgcgcccaccctctttttcccgaatcggcaaaggagagaattcctttctcctcctccttttccccttcctcctttttcctctcccgccggcgtcatcccgtctgccaccgctttggccgctagccgagagccagctcgcgctcttgaccgcgcaagtcggttccccaaaccgacattgccgcctccttaaacccccggccttccccttctcctttcctccccattttcgcctcctccactgccgtctctattttcgccgtctccaaacgtcgccgcgcgtgtcggaggagccggcacgagcgaggacgccgaagaggactccggccgcgcctcttcttcctcttccccggcccgaggccggagagatcactcccgcgccgtcggcctctcgtcacagcgcccctccttcccgcggtgatgtttcgcttcgttctccctcctcgctccgtctcccccccttagacttcggttttagctcgagtagacctcccgtagttggccggcgccgccccgaccgatgccgttgttcgccatgtgctcgccgccgtcgccgcccgagctccgaagtagccgcacgtcgccagcccagctcggcatagctccgtccaatccaaccctagcatcgagttcccgtggccttgtagatgctctcaccgccggaaatcgacctctcgtggcctcatcgccgtttccctcttctcccgccgccggttgccgccgccgcaatccgccgccgccgagcaacctccggcgaatccgagccgttggctcgtctcctctcgtcccgtactaccgcccggcgtgctcgccttcgccggtatcgccgtggcccgctctaccgctcgccgccgtcgcccgccgttcatttgcggtcggtcgtcgtctacctcctgccagcccacgtggccgccacgtaagcgccacgtcggcgccagctcggctgagctcgggacgggccgaccccggccgatccctccccgtgcgcgcgttccaccgcaagccgtgaggctgcgcgtgggcccgccgcacccgagtcctccgtaaaccgcgcgtacaccgctttcccccttccgcccgcgcgcatgcgccgcgtgctccctccgcacggtgggccgagccgctgacaagcgggtcccacccggggccgcgcgaggtgagcccggtccaccggctctctctctctcctctcccgcgcgcgcgcgtaaatgggccgccttgggccgtccggcccgtttagctcggccggaccgagccgaatacctttgggccgcgccctagccgcccgaggaaagtctagattccctcccttcatcatttcctttttctttttccaaaagggatttaattaaatcctttttcctttagaccaaaaatccaataaccttagaaattcaatatctttccaaccataactccatttgactccgttcaacttccaaaatttcccaaatctcgagatctatctaatggcacgcttaggggtcattaatagggctttattctcgccgtttgttgagttgtcccgtttcgcgtgtagtttcggagcccgaagacccgcagtgcgaggatttcgaggatcaagctccagatctcgagcaaggcaagccacctttgaacaacttgagcctatatttgaaatttaattatattgcttgcaaaatattatgcattgataggatcacacttaatctgttgtcccgtctgcaaggcagattggcggacctacctaacttgttgcatttgatccatccgttgttaattgttacaccatgtccccttgtaaccacccagatgcgacgcgatattcgtgcactctgtgcgaatatcgacggtcgccttcaaatttaaaatctgaagtaacaacttgggtaaaactggagttttacaaaagacttggaaaacccgacacctgggtcggtgcttgcgaactaaatgaatttccaaatccgcggaccggggaacgtaccgggtgtacggtttcccgctctcgcacttaaggaccgattccttggaatttcatccaaacataagacaagtacgaccacatgggtggaatgggacacccctggctgagtaactagcttatcaggggagccttgatgccgagagacatgtggattcgccggggtggtgtcggggaggacccctgggcttcctggcacagtatggtctgggacctaacctgttgttggtctgggacccctctcgtcggcatatggtaaacctgtgtcggctttcgaaatgccttgtcatgaaagcttggaggtctcccgacgtggctgatccccacgggctgggtgacccgggttagtaatgtcgtgtgggtaaagtgtaccccctctgcagaggttaacaaactgttcgaacagccgtgcccacggtcatgggcggatgtgaggtgattcctagcgtagttttgtttgactactgcttgtgaaattgctgatgtgaaatcgggttcgatgtttgaaaagaatccgcagctgacgggatcagctaggcccgggtggccgtttgaaaagttgttggcccgggtggccgtttgaaaggtgttggcccgggtggccgtttaaaaagctattggccgggtgccaatcttgttcaaatctaaagactgatacattgcacatactccgaccggacgagacgcactgcctcatccgtgtcgtttgagaagcactcacttagttgcttctagaaaagagttcaaataaaatcaattgcaaaaacaacagcctttccttgaagcctgcattaaacacttattttcccctggcttgctgagtactcccgtactcacccttgctctatataaataatccccccccagttgcggaagaagatgaagtggatcctgctgacgaggagttcttccaggagcaagtcggctacgatgagttttagggtttcagcctagttcccaagtcgcgcctgtgatgattggtccaagtccgggcttccgctttccttttgtaatgcagttgtgagctcgggatctgtccgcagcccaacatgactatattcctactctataataaagagacctctgttgctatgatattctgtctccctgtgataccagcactgtttcctgggactggtatcgattaacaggttaatttggagcgtcacgggctagttccagccggaactggttcggggcgtgacacttgttgagtactcccgtactcacccttgctctatataaaaaatccccccccccagttgctgaaaaagatgaagcgaaacctgctgatgaggacttcttccaggagcaagccggctacgatgagttttagggtttcagcctagttcccaagtcgcgcctgtgttgattggtccaagtcctggcttccgtttcccttttgtaatgcagttgtgagctcgggatctgtccgcagcccaacatgactgtacctctactctataataaagagacctctgttgctgtgatattctgtctccctgtgataccagcactgtttcctgggactggtatcgattaacaggttaatttggagcgtcacgggctagttccggtcgggactggttcggggcgtgacaccctgtgtgacgtctcgtccttcacggttcgactacatcggcttttcggcgtcatcttcctcaacgactgccgtgattgtgtcaccgtcttcgtctccagtgcatcctcgcgcaccttggtccacgacgcccctcccgtgcgtccacgaccactctacggcgccctatgcgcgtcctgcggctcggctacctcgacatcagcttcctgacttcggctacaacgaccacggctactctacacacggcttcatcaactacggctcccttgcacccttcgctttggctacattgactacggtacacagggctatcatccgtattgagtactcttgccggtttcttctccagtccaagtgtccacgctgctcacgcttggactgtgggggatgttagagtcatattaggatatgattgatttgtgtagactcctatatctgtaatccttccttatctcctctccatgtactcctatgtatatcagccctctgaggctcaatacagtcaatccacgattcgcaatatcctctctccctgtactatccaacattatatactgctatataatctaaattacactgttttatataatttaggggatgaagatttctagtatcgtggattaggaatgtcatacaaactcgacgtaaagataagggatgacaggttaactcgacgtaaagttggagtttcaactatataaacagccaatatctatctaccaaaaaaaaaatcccctcgacgcacccatcctgattcacgcatccaaactcattccacgttcacgttgttgctaattgctaacaaattcatcttctgagcatttcagacacgtttcactaattttgtggggaaaaacataccacctaagtagaactgaaacatatttaagcctggattccatgcttagacacacaaaaacaaaaaaggttgtattaagaaatcaaagctttacaaaattttaagtgaagtttcacaattttataattgaagttgcacatggttaaaaagtattgtttttgggatggagggtgcaaatgcactcgatcgaaaagaaaaatatgttctctgaatcgctcagcattcaacgcttagtgagggttagattacatacacattgaatctccttattaatatgcctagtacaagcatttttcaagcacacgagaaaacctactagcacttgctacatatcaccagtccaaaagcataatatttcagtacaagccatttcatgccattgcaaattagatggaagcaacagctacagaagcaaactcaacagctacagaagcaaactgagataaaatagtaaacgttgggactttacttattattagtatgtcaagtactaacttcttttaggcaagcataacaaaacctactagcatttgcaagttgcaacatatcgccagctctccccggaaaaaaaaaacatatcgccagttcatgccattgcatattggacggaagctgcatgtacagaagaaaatcaagctaaatagtgtccagctcttctagaatcacaaaatagtatccaactcttatgtacaaaaggtgttcattcccaacaaaaaatgctagtagatgtacagtctagcaaaaaacaactctatatatccctgtcaaaacaaatttgcaatcatctcatagcaaaacaaaaaaaaaagattcataccatcaattacagcgaaacatgcagataacaaaaaaaaatcaccatccatacaaccaaaattgcatacaaataaaagattaaccaaggaactgaaaagacaaacagattcttcagtacaagccagtttagtctatgcattgtgcaattggaaattggatggaagcaacaagaacagaactaggtatttgttcttaagtaaatgatgttaaactctgcaagtttagtctatgcattttgcaagtgtatgtgactgacaattaaggaaaaaacccgacaacaaaacttatgctgggaaataaaccaaaatattctaagaattctcattaatttgcaacttaagttgcacgtatttataactaaagttgtgcatatttataacttaagttgcacatgattgcatttttttattcttagaaaaatcacaaaaataggtaaaatacctagaggaaaatttcctagatacacaacagtagcaagtattcaagggtgcggaaataaaaaaaaatattactctaggtacctagatacacaatgcagcaagcattcaagggtggcaaaataaaaaaaaaagaaaacaaaatgcaaaaagcacaagcagttcggaactggccctacagccatttttctgatatataacattactgagaacattcaaatttttagttttcgaaaacttgcagctaaatcctaaaaagttgcaaaagtttttgctaaaaatttgcacattccaaaaaagcaatgggtataaaaatcgactgacagattgaagattttcaatcacctgcaaaataacaaagcagtttttttctgtatgttaagttttccttataaattataatgttttccagttctattttgatctaaggtatagctagcatgtttatatatacccaatataatgcctcctaaatttcttatcatcaaatttgctaacagaagttttataccaattcccgcagcaacgcgcaggaaatcatctgtttaagtatggtgacctcatggtcaccgtcaccgaggcaacgtatggtgacctcatggtcaccgtcaccgaggcaacgggtagacgggttcaggagcaggtccagtttgagggaggactccaagtggtgaaaaattcattaactcattacttgcaacaaacaggtccaaagagttggatcattgttttgtgtttaactcaaaggcataaagacaattagtgccacataaataagccaacatatattaatattaccgtctactactacttttatagaggggttcatcaacccaaagtaagcaacctggacaaggttcttgtcacaaaactattaactatatatgcccagcaacagtacaactccttaacccccaatcaagccaacaaaccactgatccgataatatttgcatccaggcaggctgcagtatgatgcatatatgtcactgggttcgcacattctacttggcggcttctgcgtcctcctcagatcgtccaactcctgtgtctacatcaaataaaatagctattatctcataaaatgtccttgaagcaagaattagtactcaagggaagagcattcatgttgtccacattgagtacaacaggaaaagcaaaacctaaagcaatatactactttttcaagtatgctttggtcaataccttattacttgctctattctcttgttcttttgacatggtatgaatgcactttgattaattacttcttcatatttaaatgcatgctagcaaaatatattacacgcataatgacactgttggtacttaaaggcttaaaagctagcagctgttgagctagctgtctcatgaagctagcttaattaagtctgatttatttatatatgtagacatccagagagagagagagagagagagagccagagacaagcttagcaacaacaaccaaaagcaaggagcactaactgcagctgttggcgatcgaattaaggatcctgcagctacaagcaagaaggtgcaggtgcagggtgcggccatggcgaactaccaccaccaggagtactaccagatggcggcggcggcggcggtggcgtggccgagggagccggacagcccgcagctgagcatcatgagcggctgcagctccctcttctccatctccaccctgagggacgacgacgacggcggcggcgtccgcctcgccggcgccgcgctgcccgccacgccggtgtcgctcgccgggatcgccggcggcgccagtacccccggcggcgacgaggtggacatggaggtgcggcagcagagcggcggcagcggcgacgaccggaggaccatccggatgatgaggaaccgggagtccgcgcttcgctccagggcgcgcaagagggtacgtacgtatatacaataccaaatacgtataattatacgtatcatactacagtatttatgtacgtatgtgtttataacgtacggtatgaattactactgatcatcaacaaatgttctcatatgtactctctccgatcaatattacttgtgctttccgacaaagcaattccgttctattaaacgcaggccaatttaattgtctgaaacggccggcatgtacttaattatgtccggagggagtaattaacatggaaatttctcttttcaaaaactgaatataattagaatttaattaaaactggatctttcacaaaaataaaatgctgctaataagtcgatcacttataaggtcattgttggaatgcgataatttaattaattaggttttcaatagaagtttgtagcaggcgaaattatataatttgcacattgaattatcagtaaattgcagtcacgtcgttattcatcgttaagtttttgagctgagctgaactggttagtttacacaactgaatatatatgagcaaatttcattacatttcataaaggagttagtctatatattttacattatatccttgatgatggtgcatggaggagatatctgtgtgtaccttgggcagatactgtatggagtgaaactctcgagtatagtgaccaagtttggtcaatttgttaaagaactaaaaagttgatggagtgtgttatctcttgcatcatgcataggttcctgttgataatgtttagtcaatatggcctaaatatgcatatctcttctttgattagtgccctttcttttattaccagtctatcatcatccaagcaggcacttgtgtgataattaatatcaaaattaagtcagcttcacctaatccaagattccaagtccagcagaaagggcccataccagagagtgtatatatatgtatgatatcctcgtggacatggtgtctacttgtctctccatgcatattggtaatttgtggttagctggtttcactctgatatatatatatatatatatatatatatcactaattaatagtacataataataaaaaaagaatgtgcggaaaaaaagaatgtgcaatttgttaacaatagtagtgtagtcatgggtattatatatattttccatcccttgtacgcatatatgccctttaggccaactcaatagatcatcaatagtaaatatcccaaatcactcctaaagttaagtagttaacacaattaccatcgaaaaaacgaatgtgcaattatgttcttttcttgaatgatttgctaattgctacatgtatcctctttcttgattaaacattagagaaaattggtgcccctgaatttgtaagagttccagattaaatagagactgttaacaacgacaaatcgaaccttctaagcaaaaaagaaatgaacataatgtcccagttgatattaactatatttgggtcgatgcatgacacaaggtatcccaaaatataatcaccacgttagactcagcttacatcacaattaactactcctgcccccaagaaaaagtcttcctcgtatgcttgagatattttaacagatagtctcacgctaatatatacttctcttgttaggtacggactaattaaataagcataaagaacttaagttgatcgggacaagaggaaaatatgaaaactagcttggcattatctcgactatctatcatctgaataggactgcactatgaattaattggatcacacctgctgctagtgaggagctccttttaccgtctccatctaacctctctagactctagaggtactccatttcagaactaaccatgcatttgtacctaccaaaagggcaataagcatccccaaaaaaaaaacagactgcctacttgtcaatgaatccagttctgtcatattaatacgattcagattgtattaattgtgaagtaatttgttatgcaggcgtacgttgaagagctagagaaagaggttcgccggctggtggatgacaacttgaatctcaagaagcagtgcaaagaggtactcatcactaattcaattcacaagtgatcttcacatcactaattaattactaccaccgtctcagaatataagaatctagaatcggatgatgcgttttctatttttgtccagattcgtagtgctaggaaacatcccatctgaccataggttcttatattctgggatggaggtagtagttgataataactcattacttttgaaatgttgtgatttgatcattcatgtgacgagcacttgtacttctgcttggacagctgaaacaggaggttgctgcactggtgatgcctacaaagagctcactgcgacgaacttcatcaactcaattctgaaggtcgaccaaaacaagcaagattatttgacgatacaaaatcattagaaagatctaaattatgtgtatttgcaatccggtgtgcgtttgtgcaggggtcaggcatgagagaggatattgtgtgtaggtgatcgatggatgctatgaactacctctgcagttagaaatgtgttagatcttgtctctgcaaagatgaacaccttttcttacttgttcaactcgatcagcatgcagtatcctgttcaatttttttccccttcagccattcagaaattcagaagtggctatcatgctttaattttgtttcagtcagtagtagtatttgttat

SEQ ID NO: 27457 - DNA, 16986 bp, Oryza sativa
cttggccactcctcggagacatgtcgcggagcttcttcggagacatttcgtcgagcacgtcgcagacgaggatgcccgcgccagagatcgacccagccgacggtgccctttgcgcctccgagcatgatggtcttggctggtggtcaggtggtacatatggctctctcagctgagtgatggatcgggcacaacctgtccctcaccggatcctccacggacacctcctggcatgtccaactccgggcgatcgggacagtggacgacggagaagtgggagagggcaggcgggcggcggcggctcgttccagaatgcacctcgatgggatggccggtgctcgttctcgaactggcggtggtggcgttcttaccggcggaggtgtagcctcggacgctgccgctggccgcgttctccgcggcggcggcggccatggcgctggatcggaagtgaacttttttttttttttttggttctccctctgcttgaaggcttaacgttgggcttgggcctaatcggtggcgccttatgctgggttgtactcaagcccaaaatcaattgggcctttccaattgagccaagcccgaaaacctagaagataagacagaacatcggagacttttgattggagcttctctgtcccgctgtccggaatggtgcactgtcagctatgtacaaaatatatcttgaactccctgctgcagaagagttcagagttgagagggtatgatctgcacactaacatattattcctgttgcatagatattgttggattgtcactgtgtgtaagacaagtattctatatatactatataatcagttttctttggtaaaaagttatactgtcttgctatgctagtcgatgaatctgatggcgggcattgttctgagaatgaacttagaaaacacattcgttcaaaaaaaaaaaacagtttgaggcagcggggagcagatccagtttgagggaggactccaagtggtgaaaaattcatcaactcattacttgaaacaaacaggttcaaagagttggatcattgttttgtgtttaactcaaaggcataaagacaattagtgccacataaataagccaacatcccctcaaaaaataagccaacatatattaatgttattaacgtctactcctacttttatcatcaacccaaagtaagcaacctggataagattcttgtcacaaaactatatatgcccagcaacagcacaactccttaacccccattcaagccaacaaaccactgatacgataatatttgcatccaggcaggctgcagtatgatgcatatatgtcactgggttcgcacattctactcggcggcttctgcatcctcctcaggtcgtccaactcttgtgtctacatcaaataaaatagctattatctcataaaatgtccttgaagcaagaattagtactcaagaggaagagcattcatgttgtccacattgagtacaacaggaaaagcaaaacctaaagcaatatactactttttcaagtatgctttggtcaagtactaccttattattacttgctctattctcttgttcttttgacatggtacgaatgcactttgattaattacttcatatttaaatgcatgctagcaaaatatattacacgcataatgacaaggaaacaagagtgacgacacatttactgctatgaattttcacgaagaatgcaagtaattttatgcattagtcgtcgacattttagtggaggtgtctttattctgttaacaaagttcaggttttgtttttgcaagtacagtcagaaacacaacgtttgtctgaaactcacacaaaacagtatattgcataatgagtattggtactactctgccaaaaggactcttggtactgttctgcccttgtatcaacatatcaagcctatcaccctaaataaagttactacattctagtcctagtttggtcattcggaccatcataaacaaagaactataatgatcagccctagatccttaaatggcattttattacccatatgcacatggtgctgcatttgttctggaatacgagcggtaattaagtacctgtggtagtgttgaggcgtttggagatcccagttgcaaggtagcatcgcatggagtagagggtgttcttttcggggtcaagcttggccactcctcgcagctccttgttcctgacgtcaacagcgaccatcattcctcccgtcttagcacccctgccagcagcgttgcccaagaggtaaacaacatcatcatcgatgcaactcaaggccgggtaacacaaacgcaggcgacctagggacaaggaagaggttgccccttgaccttgagcctcctccctgtgttcatcaccgctgttgctgagcatgaggctatgaagcaactcgtaatggtgacttgggttggtgtcaagatggacttcacgcgattcagcagtgcagtcacggcgccagtcgtcccatgaagtgaccgggataggcatgctccatgtagtgattctccacgaaccagggtggaacacggagcgtcgccgtgtcggctgaggttctctgctgcggcgaacccattcaaggtatgaagtaggatctgcagaggtggaggtgggtatggtggtggtcaccgttcttggcgaaacgatctccatctccagatacttgatggaatccttgtgttggctgatggcgatgtcccgacagaaggacacatcttcattgaggtacctcctccaattgcccttggccggccacggcagcggcatgtcgcggagcttccttggagacatttcgtcgagcacgtcgcagaggaggatgccgcgccagagatcaacccagcccacggtgcccttcgcacctccgagcgtgatggtcttggtggtgacgtggtacagctgcctcttggctgagtccgggatcgggcacagcctgtccctcaccggctcctccacggacacctcctccgatgtccaactcccagacgaacaagaagatctgtacaggcgcagcgtggaagtgaactcactccagacgtggagggcggccacgacgtagcggtcgtcgccgcagctgagtatggcgagctggtggtcaccgagggtagggggaggcgggttggggagcagatccagtttcggagacgggggatccggatggtagaccaagtagtcgttgtcatgcggggcaccaagctgatcgatggggactcggaggaggaggaggagctggccgtcggcgtcgtcgacggcggcggcgatggctttaggcgcgccaagcagattgccattgaaggatgggagatcggggcagtggacggagaagtgggagagggcaggcggggacgcctcccacaaagtcacctcgatgggatggccggcgctcaacctgcagctggcggtggaggcgttcttgagggtggacgtgtagccccggacgccgagcaggaggctgctggccgtcttctccccggcggcgccgccagtcgcggccatggcgtcgaattagggatttcgattttgggggtaaggaaggggaatacaacaaacagacgtagacgggtggagcgaaggcttttatttgggatgcccgcacccggggtgattagtccgcaaatgacctaattagcgctaatggtaatatgtactggagtaatattttttttaaaaaaaatacatcaataattattttttttaggatagttcacagttttaaaaaatagttgaaagatcatgaattttcagttgaaattttccataattcgagttgaaagttttagaagtttgagttagaaatttttttaatcgcgttaaaagtttttaaattcccagttgaaagttttcataattcaagttgaaagtttttaaaatcaggttaaaagtttcaaaattcgagttgaaagttcaaatttcatgttgagagttcaaagttttcaaattttgagttagttttaaattttaggtaggacttttttttattgaaatatgtagatctttacctatcataaatgtttaagatgcttttgccaagtatttttgtacgttgtcccagtataatgcgctgcgcagtccaatttcttttcctccctgtgcgtatttttttacgattttccggtccgattcctccatatcgccccctcccaaattgctccacgttttccgttttcatgtccagatcatatcatgtcctagcaagtagaacaaattttctcctcacatcagttcaggcccatgtaaccgccacattccagatcaattttacatacatataaaccctaaaccctaaaccagatagggctccatggtgcccgggcaccactgacatctgccgttggatcacattctcatctagttgatcggtacatgtatatttgattaacgggttcacccgttaagtacatttgatttggaaattgacagcatgtgcatgcatgcaaaatatttagtaacgtctttaatacctaggtttggtaattgacagcctgtgcatgcatgcaaaatatttaggagtatcaatttagcgtctttaatacctttccatcaacagttcacggccgttatttggtttctaaatatttgtcaccataatcatggatttgcggtttatttggcaacaaatataatgcggtttattagggtatatgaaaaatctaagtatacttctacgatgtagtatatatggaaatgttatcctgctgttattttgaaaataattatataaggaaaccgaggtaccctaagtacaccatgaacgatgtaattggaatataagtatatatggaggctaagtatatggtatgcttatgtacacctagctaaattagtgcgttttgcactttccagattcagaaaatgtttactcatttatgtaatgtaatggctatgtatacacgggttattttttctatatacttagctaacttgttaagtatacaaagttttaaattacgttaatttaattatattatgaatccaagcgtatataaatttacaatttgtgtacacggtatattttattattgtcatttaatattgttgtaaatagtaagtttggaaactaattaaatttggaaccaagtatattttagtcattacgtccggatgtaaaattttatataaattaatccaagcatattttttgtataccatggtttctaagtatatctatatttcaaatgtgtactgtagattattagaatttaaaactcgcctacctaggctgacagtacattatttcctaattaaatttggaaccaagtatattttaagtcgttacgtccggatgtaaaatttaatataaataaatccaagtatatttttgtaccatggattttaagtatatctaaaatttaaatgtgtgtactgtgtattattatttccaccatgtttttccatatgtgccgatttagattaaattcaatttctttccacagtgttttagatgcgcttttagaagtttaatatgctgaattgaaagagtagatctcttaagtgaagtctgaaaggaaacaaaatatcggtgaattggctcatccacatatcataggagtttagcataatataaatgaaacatatgctaattaaagtaaaaacgatctataaatatagatgtaactagtttattattacagtacgattgtgattcataaatgtaaaaacacagaatggctgcttatttgaccgatggctggcaaccatatcacaccatcagagagttgattttcggctggtacttgcatgttgcctcatgtttgctattcagacggtgggcgagtctcatttctcatcactaggatgagaatttatcatcactatgacgagaaatgatcaacttaggagcctccacctccctcttgacatctttacggtctgtatctatctcctacgaaaaaaaaacaagtggaaaatgttaagagcaggagtgacaaatccagaactggagctgaacgtgaaccaaaaatatattaaaataaattacctgtgaatcattgggcttcgtttcatcgtctattaacatctgcgccttttggagatatgcattctcctcttgaagaccatactcattgactagggccgtccaagtatcttcaaaatcacttgctgtgcgtgcatgatataagttgtgtagttctgacttcgtaccaaataatatgtgccaacggcagcgtgggtgatcatacttctgcagcgactgatcgatcttctcgctccgggcactagtgttcatcttgtccatagctactggcaatataagtataaatttcagaatactaagaagaggtcaacatatatgagaagtacatatacgtacagataagttggagccatacctggaacagaaatgtgttgttggcgagaaccagagagagcaccagaagtgagcagagtcgtattgttctgctctttatatgttgcaattgtgtctccgttggaaggaatgaaaaaattaatatcattaccaagtataaagatcttatttatggtaatatttatagctattacgaccgataggttacataatataatttgttaccgtcagcatggatcgatccagtcagaattgggtatcaattgattaatttagtaaccaacgagtgatttcggtactaattggccatagtcaacgggatagagagagagtgaaaaaatgcacgtctgaataccacaagattaatgacataatctgtacttttacaggtgtacatgtacacataggtttatgagtgacagagcgaacacgtatacatgtatatcccacaagatgaatgacataattatctcagctaccagctctttcttttcagcactaaatctctgtatgataggtgtgatggaagatggtacacaacgcgaaaccggtgccacgaatttaacacgaacagccttcttccttgtaggtggagtgacaaagtcatcatcatcgtgaatggaacgacgcttcacatttcttctcatgctcgcacactttggaagccgcggcatgctattaaaaactaccattattaaaacaagcaatatgattctcttcgggtcatatacttcaatttaaaattaattaaatctatatttacaaagattataattgagatgtccacgtaaaagagacattgctgctgtttcactacctacctaaattttattcactggatgcaaatcaagatattcgaacgggcatgttatatacctaaaacaatctaaattcaactgcatttcaacaaaaaatctataaatttaggttccaggtgattcatcatgtgctcagtttagtagataaaaagaagaggaatggcgaatcatctatacataacagggactgcatgtgaatgtaagatgtgtgagtgataaacactgagatccatacctttcaggtaatgcagcttgctagtgaataatgtctgttccgaagctcacgaacaaccagcgacggcagcgaaaaggcacttggacatcaggcgctgtgatggcttgacaaaaatggttgaggagttctggtttccagcaagaggcttgtggacgaacgtcgtcggtgacgaaaaccacggacgtcggccctcttcacggcatggcgagcaatcccggcgaggtaactcggtgaagacgatgtggatagctagctcttggaccgtgaaacagtgtggaaaagaaaaatcaaaaaaaggaatacagtagccggttatatgtgcatcttgaaaatggaatgtaatcttgaaaatagatggcaataatcgcaattagtggaatggcgtcatttttcaaaaacgaatcatgattcaaaaggtaagtatctgcatgcaaacgttgtatatatggaaatgtgatatagaaaatggaaagtgctaatcataatgtgtatgcatgattagagggcgcaaatttggaaatacatgcacagtaaaaatggaaatacctgcatgcatgttctaaggaaagtatatgcatgcaactcttatcgggttagacccgttaatgtgtgatagcatcctctagtgtgttgcacggatcttaaagcatttggacggtggatggctatggagcccgggcaccatggtgcccctaacaaatttactatatatatatatatatatatatatatatatacatactataccgcatctggcgtacgtagtagctaaaatgctccccctcacatcctacccccacccctcccaacccacccccgtgcaccccaaccaccggcgccccctacccctcccaaatttactagtaaattgtttactatcgaatctacatgctatatatatatagactagcaaaagtgaccgtgcgttgcaccgggtgtttacggagtgtgtatagcgatcaaaaagtattgtttggtttagagaactaatctgctcaaaaaaaattgtttgtttttagataaataatatgctctatatttgcgcacagagtgatgtcacgatggataaaatttaactgaacaattttttaaacagtctagtatttcaataataatcacaaagttttttttaaaatattccactttacatgtgtatgatatgagcgatgttcctgacgcgttagcgtaacgattgtactacggtggataaatttaactgatcgatttttaagcagtttagtattaaaaaataataatcacaaatgtttttttacagttattccacgtatacgtggatgatataaatgttgtacctgatgcattggcgtaatctctaatttcgaaatctctgccgattcgcgtgcaaacaacccctccacgtggcacaatacgattccagcgttagtcctctccctcagccgtcggatcgatgatcaacggtgtggaatagctgcggtggacctctttgtaatatgtgaggttttaggggtctttttgaaaaagttataccctgctatgcccttctctccgccggcagccccgcccccgcttcctccgcctcattcgtcggaggtcgacctacgccgatgtcgccgcctcttcctcctcctcacgctccagctccagctccacctccgcccctccggcgcccgaggccgaccctcccacgcgccggcgcgctgttctgtgcgtctctcccctcaagctcggcggcagtggcacagattcacctcgtcgctggatgtggcgatgaattcggttgccgtgcttggggatggggagggtgaaatcacgtgcatcgctacgtccgtctttgcctgccttttgattcgccagccgcctctctccccaagccgcggcaccgaggggatcttggacggaggccactggccgtgccgcaaagggcgtggctgaggaccgcgctaccgctgccggatgacgtcatgcaggagcaggagctccctcccctgcttccctatgtgttcacaccacaggtgattaattccacctgtaaacggaatcggaatcggaatatataaagcggcgcacatggggcgagcgaggaggggtgccacgtaaggattttgctacagtatatacagcgcgcggggtggcatttttgtgaaaaggccctccgcttcgcgcgtaattcggccgccgtcctccatgaacagtcccaccgagttgtctatttacgtttaggcctctggtgaatacagttattgcataggaggaagggagatgtggcgagttagggtcgcgctgtaaaacttgaaagacgagggtctttttcgcaaaaacgccgtgcgcccagccccaagcccccaacctgcccgccgctgcctgctcgtctcctcgtccctcccgtcccccgtctcgccctctccctctccttctcccgcctcgcgtcgccgccgccgccgccgccccgcgcgccgcccctcctccctctccctcagccatcctcctcctccgccgccggtccattctccgcccttcaccgcctccgttgccggccaccactgcccccgtccacgcctcgcgtcgccgcccccatccccgtccccgccccgtcgctagggtttcgtcacgagcgacctcccgccgtggaagcttccaccttcctcctcatccttgtcctcacggccgcggcgttcgcggcgtaggcggcgggggacgggtgcagcgccggatgcgagctcgcgctggcctcctcatcctcgagcgcctccaccccaatactttcttcgtcctcgcctcgtcgcgtcgctctgtcttctcccctccctgcctcttcggttgatgtcttcatttcttcccctttcgtgcgaatgggaccaacggcggatcaagcgagggcgccgcagatcgactggcggcacagcttctccccatcctttggtgctgcattgctggtatcatcgtcgtgtttcccgctgttggtgcgtgtctcacggaggtaaggtttgcagcgtgcataatgatgtgcggttgaagttgaactcagttttgtgttccttttttgatatttcgattttcttcttttcatagaaagaatggattggagtaaatcagcagcggtgtggattgtgctctgacctcggcaggggcggatacaagaacacagcgatgagatccggtgcggtttgtggcggaccaagcatgccggccgatggagatggttctctgcatctacgcattccccaccaacatgccgcccttcaggtacaaatcaagtctgataaaacactgccatccttcttgtgttacatgttctgtgttacatggtggcctcctcctccaccacagcggcggtgtcggcaaacagatttgagaggtaaaaacatcccttcttgtgttgctttacggccatatttgagaggagaatggcatgatgctgcagtttgatttcaccggctttcctgcttgccgtatttgtaatctcaactttcatttcaagtgattgttggggccaaacctatggtggctagtcgctgaggtggtgtcattaatggaggcaaagagtggcaagtggtgaccaaagcggaaggacctggtgtgttgcgcgtgcgccggccactggcggtgcgaggccacggcgacggtcatgctgccattatccaagtatggctgctgaccaatttcttccctgaagtaggtgaggttagcccgataggaacacataccacctatattgtgatatttggagctagggcacattcagtcctgttatttgatctgtagcatcaaggttgtaaaattatcagttttgcagaggatttttggtcatcaaattggagttgatgatattttttgagacactgaattaactaatatcaaatatataatctggatttcccttcaactcaaagcttgttgttgtcttgttgtctgcgtgcatgctggggtggctcttctgcgggcgatcaaaagggcagtgacagcatgtattgacgaacgcaatgtgcttgctggccgaatagacatgaacacatatcactgagagggagtgaaacagtgttgacgagtagcctgcttttgggttagttcttgatcaagctaaaatgcacttctttttcttgatcggtataaagggcaccctttttttttcttgcagcattttcatatgcacccaatattgcccacacggccacaccaccatcatctataggcaagtagtatgttcatgtgcaaattttgcagggatcaaataaatgtcatttccctgatccattatttggctatctcgtgtacttgatgccgatttttaatttcttattgctgcatgaactatttcttttggacagtcagagtctcaatccttgccatcattaaccgagaatcttttttccatgattcttactgtttcaggtgatagaaatagcattgtagtagggtggtaatagcaagaagccgaaaggtaaggatcaggctataacgttggggcattggcaactcaattaaaaggtaagtatctattggtcacagagcttgacaactttgaatctttgatgatcgtattgtaccattgtttcagttgtagtggccattgttcctgttaaatgcaagttgatactaataaacccattgaatagaggccttcatataattcaatgtttaagagaaaccaaccgtggactggagctctcagattagtttattcaagccacttttttctagcatgcaattatttcgtggcttattgcattccctataattttcattgacttagaggaggtttggggctttttatttttaatgaggtgcaacaatctgtccatctcactcgttggtgcaattacattttttgcttgattttcttcactgctttatgacgactgagataaaaacttatctgtgcagcttcatgtttctgatgcaggggtagggtagttgtctggttgttcatgttctgatttaactcattagtgttgtgctaaatggaaggtcaagctgctctacatgcaggcaagaacagacaagcctgaaaatttttgtggcaaattcttagctcaacctgaaattccgaagctgaaatctgtattcagtcttcaactctatgctccgacgacgctggcgccggctcacgacttctggctgctgcggtacacctccattctcggtgatggaagcttagtggttagttgtctgatcatggagcgcaaaacaaattatccatgtgctgatgtgcaattaataccaaagtatttgtgtgtcactatgatgtcttgtctgcttgcctgaatgttcttgttctgaattctgaaggtgtgtgagagatcactcagtagcaagcaaggaggcccaagcatgccacttgtccagccttttatcagagatgagatgcttcccagtgggttcttgatccgacctagcgatggtggaggcagcgtgatacacatcgttgatcatatggacctggaggtaataactaataaccattacaatttcttatccaaatagttcattcatctagcagaaagaaatttcagccaatttttttgtgttcacagccttggagcgtgcctgaagttgtgcgacctctgtatgaatcttctgccttggttgcgcagaagatatcgatggcggtacagtaattatagtaccctgttcttgatgttcttgttgatttgtaaaaattattgcctaattcagtcatgcaaaattcagtctttacgctgcctgaggcaggttgcctacaaagatacccgttctgtgatcacaggatggggaaggaagcttgcggctttgcatgctctgagccaaaaagctcaccacgtaggactcctgaacagcagatgcttcttggttcttgccatgaatcttcagttcaaaagtgtgaaaaataattttgcatgctctcttttcagaggcttcaatgaagttctcaatgggcttgcggatgatggatggtccgtgatcgagagcgatggcatcgacgatgtttgcatctctgtcaattcatccaaagtgaccggttgcaatgcaacattcagcagtggactcactattgtcagtaccggtgttctttgtgccaaggcatccatgctgttgcaggttagcttcactatgaaactagaattagtactttctttttgtttgttttgtaattgccaatatttttcatacaatatttcttctgctgtttgctaggatgtctctcctccatcactactgcaatttttgcgcgaacaccagtcacaatgggctgacgatgaaaccaaacttctgcaatttacccatgtctcgtcttggaggattcagtggtcaggtcatacttcctttagcacacacttttgaacctgcagaggtaagtccatcttctactgtctgtcggttacaaaaaaggtcctgtccaattctgttttcctgctcgatgttttggtgcaaccatctactgtttcagttcctggaagttatcaagctaggaaacaccagaaactaccaagatacactggtgcaccgtgatctgttcctcttgcaggtgacttcttgattcatgaaacttatcaccagttgaagaatcattttcttttttcctctgtaaaacttgtgttcttggcctgattgcaatggcagatgtacaatggagtagaggagagcagtgcaggaacatgttcagagctaatctttgcacccatcgatgcatcgttcagtgatgattctccgctgctgccttccggtttctacatcatccctatcgattctcctctgtaagtaaatctcacacaattagataatacactagcatttcgaatcaaattttctaaaatttttatgctataaaaaacataattcttctggattttctttccttgcaaatgttaggacacatctagctcgaactgcatgctggatcttgcttccatgctcgaagcagcgacgccatggagcaggatcagcggcatcaattgcagcggctgtgctgctgcggcgagctccaaggcggtgatgacgatcgcattccagttcgtgttcgagagccacctgcagggcagcgtgcccgccatggcgcagcagtacatgtgcagcatcatctcatcggtgcagaggattgccgtggtgctctcatcctcccgcctcgtccctcccggcgttgccgccgccacgcagcacgcgccggcgactcggtgctgcccagatggatttgccagagctataggtttgtggcttcgcagctgcttgtaatacagttcatatctgtaagatttttttaaaaaaaacagttcgcttttcagaactcatgatgctttgcttatgcagatttcattttggtgctgaactcatcaaatctgcagatgccaacagcagcagtgaatcggttctgaaagcagtttggcatcatcccagtgccatactctactgctctctcaaggtttcttcagcctctatttttctttttctgattaagatacagattttacctagatttttataaatacgtttttttaaactgttgaactgtatatttcgaacgaaaaaaattcatatagaagctttaattacaagataaatctatttttcaattttaaaataattaaaccttaattagtgagatgttaatgattttctcgttttacctgtccgaacttaatcttttatcttaaactcgaatggggccagtactcaatactgttatgcatggaggattgtttgttatctcaatttatttcagggacttttgaatttttcgtgcagcttgactgaaattttgttgacacaaattcaccttaaagttgacagtgttgcacaccattaaccatttgatttttcatgtaggtgatgccagtgttcacgtttgcaaaccgaagacggaggcggcgccaggcacaagatggcggaggaggtgaacaaatctatgatcatcaggaaaatcaatcaaatttatgttacctaatctatccaacaagtgaacaaattggaggcagctaagactacataagaaattgaaaagcacggccatactcttttgactaagtttcgaagtcaggcttgcaaggatagactaaagctcttatatcagtctttcttctcttagcaaattctcattgctagatctcagatcatcttgcaaacctcttatatcatttatatcattttccatatgcaaatctgtggttcatctctaaattgtaatgactgggtaagctctctggtcctcccatgtccttgacaataacagtaatatccttcaacttttcaacttatcttcattctcacaggtaagtcttgtaattcatcttctatttgtgctagccttgatgttaagtctgcatttataacggtactctcttgagtttctaaactaacttcatcaatggattatttgacaggtgatgcctggtaagtcttgtaattcatcacaggtaagtcttgtaattcatcttctatttgctgcactggtgatgcctacaaagagctcactgcgacgaacttcatcaactcaattctgaaggtcgaccaaaacaagcaagattatctgacgatacaaaatcattagaaagatctaaattatgtgtatttgcaatccggtgtgcgtttgtgcaggggtcaggcatgagagaggatattgtgtgtaggtgatcgatggatgctatgaactacctctgcagttagaaatgtgttagatcttgtctctgcaaagatgaacaccttttcttacttgttcaactcgatcagcatgcagtatcctgttcaatttttttccccttcagccattcagaaattcagaagtggctatcatgctttaattttgtttcagtcagtagtagtatttgttatctttgagggacagatgggcttgtctcttgtcagcattcaccttagctttacctcttactagtatattttatcactgagtgcgtttatgctcatagggcatatatatcttatgttggatataagtttttttttttttggtcttgtttagttaaactgaagatgcatggccgactgaacatgagaaaaatatcatttcgtttggaatgtcatggaaagcactttctgaatggctaacaggatataataaatatcagctctcacctttgtccactattgatagaaaaggaaaggcaagaagattgccttaattaacctaattgtcatcaaatcaaagtggccggcttatcgagaacctagctttgtctagaaactttgccttgaaatgaattgaaaaatcatgcatgcacttggcgtgtgattctcctccttcctattgacaaaatacttttcgccatgtcaacgccggaatgatcagtatacactatccattgatgcagattactggcgaacaagagcagcagctcttttccttttagttcttcttagctagatatgagaaattttcttggccaaacattgtagagtttaaacaaaattcttcggaacttacatgccggcaagcaaaggaacacaacaaagtttagcctaacttatatattgaccgattaaaatctgttatgcatgttaagaattgagacagaaatttaagccaaagagattaatctctcgtagaacagcacgcaaataacagacatgacaacaaggagcggtaattaattgagtatacctgtagtggtagtagtggtaattaattgagtatacctgtacttgggcctaatcggtggcgccttatgctgcg

SEQ ID NO: 27458 - DNA, 4569 bp, Oryza sativa
actgaaattttgttgacacaaattcaccttaaagttgacagtgttgcacaccattaaccatttgatttttcatgtaggtgatgccagtgttcacgtttgcaaaccgaagacggaggcggcgccaggcacaagatggcggaggaggtgaacaaatctatgatcatcaggaaaatcaatcaaatttatgttacctaatctatccaacaagtgaacaaattggaggcagctaagactacataagaaattgaaaagcacggccatactcttttgactaagtttcgaagtcaggcttgcaaggatagactaaagctcttatatcagtctttcttctcttagcaaattctcattgctagatctcagatcatcttgcaaacctcttatatcatttatatcattttccatatgcaaatctgtggttcatctctaaattgtaatgactgggtaagctctctggacctcccatgtccttgacaataacagtaatatccttctacttttcaacttatcttcattctcacaggtaagtcttgtaattcatcttctatttgtgctagccttgatgttaagtctgcatttataacggtactctcttgagtttctaaactaatcttaaattttttgcgtcatgttctataaactgtaattctatcgctagcatcttcacatcttccccaagctacatcagtgggttccttatatatatttcacttgcactgagttatttggaagaaggttctttctatcatttttgtacaattttactaaggtttgtgtttccatgttcctctcatgaattttcccactcgttaactatgtcttctttgatcttactgaagaaacattccaggatattcaaagatgcggaatgtatccacagactatgggagcctgagcatttttgtctttccaagaatcgacctatactctattgaatatggccttttagtatggcagctgctcatcatggtgctgggtccatagcaattcatttttcattttattctggctcatagtatgaacttgaagcgatttgtaccagtaaattatgacgtgcatagaaacaatgtacttattctcagacggtgaaactgaagagcttgagtagaattacttcacatgtgaaagcgagtactcattgtcctatagctgtaatcatattgtttgccttttctttttaagaagagtgttgtttggtttgttagatgaacttccaggcggtgcgcaaaggcgcgcccctagctctagttaagaaaaaagaaggaatttcttttgctgttttcggtggtttttgcgtgttacacgatgctactgaatattgctcagattggcaccaaggaatgaattagttgccaaaaattaactgtcgcattgtaaaatgttttgtctttgtctgaaatctgaagagttggcatttcttgactcacagtacgaaggtggcagaagaccaagcatccgtaacaccttcacacatcagcacctaggcatgttaactacatctctgttcacctttgcctgctagctgtgctctgtacagaattatgttaatcaagttcaatcaggtgtatttgtatatctacaagtataaaatttgtcctatttagcaacgaaaaacacttcaacgatgtaaggtagaaactaacaagctgaatacacaatgacacatatgatatcatagcagtatctgaaaaagagccctagaggcaatcatagagatgattgtatcttatactatgtttacatatttatccgatattgttccttgaaatagataattcattattagttaatgaatatgtgattctttcatgagactcttcatgttgtttgttactatttctaaagtatccctgatcaaatatcatatgtggaacaaatatatttatatgatcagcacatgtattaattgaagatcatgtctcatgtatcatggtatggagataccaaattaataatgtggacacatgttggtgaacatgttgttggatagatccaacatgagacactgcaagagccatatgtgttgtgtcattagtgatctcatttagtgttggtgttgaattcttagacctgagattatcatggttctcaacatgtgtagtagcttacttagggactgctaaacgctactctgtaattgggtagttataaaagtagttttcgggcatgctatgaaacatgtagtgggatatgaataatcaagatgggatttgcccctcctatggagagatatctctgggcccctcgatgttgtagattatgaaagtgcatggccatgccaaaggtgattgaggagtcaatcataagttatataatctatcaacaggttcgagtgaatgattgagctattagaggatggcacatatctagccttgagcttaatcaatatcgtgaggcaaatgggttcatacaagtatacactagaggttcagccgatatgatctttatgtatgcccggtgggtcaatacgttctgctaggggccgctgttgacgcgtggaccgaaaaggagttttcgggttacagccgagtatacatgaacctacagggtcgcacgcttaatgggccggaataaggggattggatggagatccaatattagcttaattcggatagagatccgaataggagtcctacgggccttggaggcccgagtgatggatcctatatattcgtgaggggtgtgaccggcggaggtattgcatcacgtgagaaaccctagtcgtcgcttccctccccgagcaaaaccctagccgcgcgcgggtgctagcacatctgcgcgtggcgttccgtccctgtacgtgtggataccggtagaggtgccgctggtttgcggtgctgatcagcatgggaatacggcgaggagaacgcacgaggaggagaaggtcgagccggtgcgatcgactacttcctctacatcgacgcgcgctacttcgcgagaattctttcgacttcttagcgcatttttccgctgcgcagcgcgtcgagtggtaacgatctatgatctaatatttgcatggttcctggtttacgcgatagaaaattttaatttatgctatcgtagcttacgcgtatcccaacaaaagaaacatgtatatatgtctattattgtctgaaatatgacaaatagtctatcatgtggttgtccttgttgataattcttctatgcaactagaccatcctgtcttttgccaatggtcatagctttgttatgagaaagattttactcttcctatgatagcttagcgagtatctagacctatcaagtttatgtcgtcaaacaaatttagttcatttattccagaatgtataggtcctatcagttgaacctactcgcagggattattcctgttgtcagttcactcatatagttatataataagtccaactcacaccttttgacatagttagataggttcaagaaatagaatattggctatacaatgtaccatgcaattttctgagcaaatctgatacagcttcataaaaatatggtccattttattcctcagagaaaaaaaaagtcttctcattttactatgaatattccttgaggccttgaagttagttattactgtgccaatgttgaaatgttcagtatatttggtgaatcatgatgctcaatttctctgcaaaccatggtttctgaattcttctctgagcactactatggttgagacaggttaaatgtgatgtaggagtacttcagcttttactatttcatgagttcaaaatataaattgatcattccagtgaagcatcctactatgctattctcagatgtacactacaaaagttcaatcgcgactccacttcaaactgaaattatcattgaagaatgaaaagcaaatgctctctttagctatcttttctgaaatagaaatgtgtcctttgattgaattataatcttatgtaacattttgaaacctccagtctggcagcatcatctctctaaagctaacgaatttattcactattccattccattaatctggtttcacttttttacactgaatcactgatgttgttaataatcttcagcaaaaagagatattctacagctctgtaatttatctctgcctgttggtagcactctgaagaatagcctgagtttatcacccatcattaactctctccgttccccctgtcttcgttgatgctgctatattgaaattgcattttgatattggttctttgacaactgtggagcagatagcaaattaccaagagaagggcagctcattccagatacggtggatcggtgacactatagagcccattccagatatcgtaactaatgccatggcagaggtagatatcatacctcttaatataataaacaccagttgtgcagcttcagaaatttatattgcagtttgtcaagaaaatagttaaatttctaattgagaaaagaagttttgcattgcatggcacacagttcttatgcttcaatgtaaatgattcagtcaagctagctgtgcatcttcctatagttcattttcaaataaacattgttctttgatgggtctattataaatgcagagaacacatgctttattcaaataaacaagat

SEQ ID NO: 27459 - DNA, 4912 bp, Oryza sativa
atcatgttggcagtctacttactattttggagcattttaatgaacacaatatattggagtatttttaaaatgaaattcccgagtctaggccactctgctaagaacactaggccattcaccgtaatggcgtggcaaagccatgccaagttttctagtgattgtactatgggaggaacacatggtgaatttcttggtcactttcatgtaagaggtgatggacaaaatttgtgtgattaaccaaaacaatttttgcatttaaaataggtaattgtatcataatactaatgataatcaagacggttttaaaatactattgcatatttacttaaagtgttgtagtggtcacaaagtatgtgatctcgcttcaaaatatgtggagtcatgtggagactggtcgtgtgacacatggatgatatatagcgcgttgactcttgagtgaaaaattttattacaattgactttttttatctcaaacaaatattaaagtgaaagttttggtgattatgatgtcaacaatataaaatatatcacttgtctgggaagtatacgtgtatcttaattttttttggggcatttaactatttgtcacttttaagatgtggcaaaaaaaattgccacttgctgtctatgacatgtgggccaccctgcgtttatgacatataggcttagtgacaaattctttttatcacttgtaagattggtaaatagttaattattcttttttttcagcaaaaatcaacttggtggatcagcaaaaatcaacttggtggattagcacaattacaattacaaagaaacttaccgcacctaaacttggtatattgctctctcgttccgaaactaccgaggagagccaaaatctctcgtttactctctctcttgctctctcgtttcttctcccccatctcatttactcctctcttggttggagggagtttttagttgggattaggagtttagagggatgaggctattaaatgtcttgtttggttaggagacataagaattttggtgagatggagatgaggaattgaggaaggaactccctccttttcaatacctgggtaggggtaggtaattgggagaaaattcctcctttactttgtctaagtaaatctcgaccatccgtttttattaatgatctaatctccaactaaactccctatcaatttccatcacctctaccaaacaagatattgagattaaaaatcaaattctcatcttaatttcatcatcaattccttcctgtaaactcccaatcctcttacctcgagttaccgaacaagccgctcgtttactctctccattcctctcccttctcacgctcgccctcaccagctctccgtcattccgcctcccgttgaccggcgctcctccacatctcctctccatggtcgcgtggatccgccgtcggcggcgacggcaggggtggatccaccgagctccatcatttgtccgcccccgctcgcgccgatccaccgcctctcgcgtcggcagcgacgggaggggtggatccggcgacctccgtcgtctctccgcccccgctgacgccgatccaccgcctctcccgtggatccgccgtcgacggcgacgggaggggttgatccggcgacctccgtcgtctctccacccccgctcgcgccgatccgctcgggctcgtcgtcgcgtcgtttgtgggctgcttcttcacgtccgtcgcctcgctcatcatctccaagctgcatccgccgtcggcagcgacgtgatgggcggatccagctcatcccttcagtcccaactctgtctggtgagcagccgatccgcgacgtttagatctttgctggttcttttgcggtgatcggtgacggtgagggatatcttttggttcttggttcttgcagggtgtccaggaagagaccggcggcggggagggccagaatggcggcggtggtgagggcggaggcggtggacacatccatcagcccaacgatgagggcgctccggtcgtccaagaacatggccatcacagaccaggccacgacgttgcggcaggccggcgagctggtcatcggcctcgctgcaggggagcccgacttcaacacaccggcctcgctaccgaggtaggtgccttctcttgctcccgagagaaaatttaatcctatcgaaatcatgatatctgtatccaagttgtgtgttgtaaggattgaattgattcacatttctaccattcttaattgtactctaattcatgcactaagtccacaaaagctcaaatgtttgtttgtgtataacttgaattggccgattttggcacttgcagtgcagcagacatctaagtaagcaatacctaggtgtcagagtacttgtgttatttcttatactgacaacctataaaaacacacacacacacacacacacaggcaactgttgctatttgtatgctaacttctagggaagaatattttgttttacttacttgctccctcttgttatacatgtgatgaatccttttttttatacatgtcgcgaagcagacggagttgggtttagatctttgctggttcttttgcggtgatcggtgacggtgagggacggcgccctccctggtcgtgggaccatgcagagggagacaggaggtattgaacccgaacctatcttgggccgtatggttgcggtcgaagattatatttcttgcggttttcttcctccaccttccgaatttcttcttctcgttttgaacttctatggcctttctttgcttcacttgaatcccaattccatcgtgttccttagcattttctcttatctttgcgaggcctacattggggtagagcctttccttgatctcttccgcttttactatgagttgcgctggatggaacccaacagggtatctggatgtgttgggttccgacttcgagatcgcctgaagtcgcgttacatccccttccggtgcccctcttttcgcagcaaatggtgggcgagatggttctatatttagatagaaaactcggatcccgtccttgttgtccctgaagagcagccagacaaaatcccagagtggaccgccaaacccgccctgactccctccctccagtctttcatcgacatcatcgatgacctccgaacacaggggttgtcggggtacgaagtcgctgccgacttcgtaggtaggcggatccaaccgctccaggcccgcgcccatgcggcctttgactactctgggctagaggacgtgacccgggtttctcctcggggtattttttcttgcatttcgaattttacttcgagtacgtctgtttctcctggcttatcgagttctcgtcctcgatttacaggtctggacagcgacaccgtgggacagcttgtcggccaggtgatgatcagcgctccctcagcggcgagcgacatcccggtccccctttgtgagaagggtccggtcgaacgcgtcgctgcaattaatgtaagtgtactcgatgactcctttacatccttctcctcgagatcgcgttgtgacttcacgttatgtaggttctccctctgcggacgtcatcggaccactcgcggaccaccaggcagcggcgtcattgaaggagggcgtcaccaatgaggcgtccgacgttgcagctgctgctaccacgagtggcaacaacgttccgaggaaggggaggaattctcctccgtactcgggacccgtcggaaggcgccaaacccggcggtgagcctccctcttgttttttaacgtgtagtcggagtgactggacctcacaccgtcgtatcttacttagactcggacgcgtctccccacctcagcgaaggcaaaggctagtgactagtgacgatcggcgagaagtaagtagacgttcttgaagtttttccattcacgaaatcttgatcacctagctttatgagaaagaggaaactcttcatagggcggcgcaggcgaaggcggcgcaaggtgggaccggtgcggcttccagtgcgtcccctgcagtgacctcgacagatgtagtggtcgctactaaggaccgggaggcgacgtcgagtagccccgccgtcaaccttgtgtctgctcggggcccgtccaccgatgccctcacctggggggagctccaggcggagatggagcgcctcctccaggccggtgctcggggcgtaggccgcgaggtcgaggaggccagggcggcagcgtcgtcagcaaaccagcgtgctgaccagctggtacgtgacttggcggaggcccgtgaggacctcctgaagatgagggagctggtggccggcaacgagaggcagcggcaagggctcgagcaccggatgttggagctcgagaacaatccgtcagaaatccgatgctcgctgcgggtatcgtacaccagcctacaccagctcgccggggaacgtggtgtcacgactaccagctggcctgcaaaatttgcacatgaacgtactacttgcctatagatgatggtggtgtggccgtgtgggcaatattgggtgcatatgaaaatgctgcaagaaaaaaaaagggtgccctttataccgatcaagaaaaagaagtgcattttagcttgatcaagaactaacccaaaagcaggctactcgtcaacactgtttcactccctctcagtgatatgtgttcatgtctattcggccagcaagcacattgcgttcgtcaatacatgctgtcactgcccttttgatcgcccgcagaagagccaccccagcatgcacgcagacaacaagacaacaacaagctttgagttgaagggaaatccagattatatatttgatattagttaattcagtgtctcaaaaaatatcatcaactccaatttgatgaccaaaaatcctctgcaaaactgataattttacaaccttgatgctacagatcaaataacaggactgaatgtgccctagctccaaatatcacaat

SEQ ID NO: 27460 - DNA, 760 bp, Oryza sativa
cgactacactttgctcttctccgacaactacgtgctgctccggcaattctccctctacgtcgttctcgcgttgcgaccgttccagaggtcttctctgctagtctccttcaacattggcttatgattcatggtggtcccctgcctcgcccacgcggtattggaaacactggcgtgcgcgttcgtcctgagttgtcccggggtctggcaaaccctgtgtgacgtctcgtccttcacggttcgactacattggcttttcggcgtcatcttcctcaacgattgccgtgattgtgtcaccgtcttcgtctccagtgcatcctcacgcaccttggtccatgacgcccctcccatgtgtccatgaccactctacggcgccctatgcgcgtcctgcggctcggctacctcgacatcagcttcctgacttcggctacaacgaccacggctactctacacacggcttcatcgactacggctcccttgcacccttcgctttggctacattgactacggcacacagggctatcatccgtattgagtactcttgccggtttcttctccagtccaagtgtccacgctgctcacgcttggactgtgggggatgttagagtcatattaggatatgattgatttgtgtagactcctatatctgtaatccttccttatctcctctccatgtactcctatgtatatcagccctctgaggctcaatacagtcaatccacgattcgcaatatcctctctccctgtactatccaacattata

SEQ ID NO: 27461 - DNA, 531 bp, Oryza sativa
ccgcttcgcgcgtaattcggccgccgtcctccatgaacagtcccaccgagttatctatttacgtttaggcctctggtgaatccagttattgcataggaggaagggagatgtggcgagttagggtcgcgctgtaaaacttgaaagacgagggtctttttcgcaaaaacgccgtgcacctgcccgccgctgcctgctcgtctcctcgtccctcccgtcccccgtctcgccctctccctctccttctcccgcctcgcgtcgccgccgccgccgccgccccgcgcgccgcccctcctccctctccctcagccatcctcctcctccgccgccggtccattctccgcccttcaccgcctccgttgccggccaccactgcccccgtccacgcctcgcgtcgccgcccccatccccgtccccgccccgtcgctagggtttcgtcacgagcgacctcccgccgtggaagcttccaccttcctcctcatccttgtcctcaccgccgcggcgttcgcggcgtaggcggcgggggacgggtgc

SEQ ID NO: 27462 - DNA, 668 bp, Oryza sativa
ggttggagaagtccggccggtcgttggtgctctgccttgacacgctggcacacatcacacagggccacgaactctgcaatttcccgcttcatgctaacccaccagtatttctccttcaagtctaagtacatcttggtactgccagggtggattgaataaggactttcgtgagcttcctgaagtatcagctgtttaagttctctgctatctggaacgcatacccgatttccgttccatagggttccgtgttcatcctctgtgaaaccagcggctttaccctgtttcatattcttgaggagtccatgcatgtccggatcattcttctgagcctcacggatttgatcgagcaaggtaggcttggcttccaacgcagccaagaatccacgaccaactatgcttaggttcagggcttccatttgttgactaagttcgggtggaatgccacggacgttaagagtgttgcaatgactctttcgacttagagcgtcggcaaccacgttggccttaccaggatgatagtgaattcccacatcataatccttgatgagttctaaccatctcctttgccgaagattcagatccgactgggtgaagatgtatttcaagctcttatgatcggtatatatttcacagcgattcccaatgagatagtgccgccagatttttag

SEQ ID NO: 27463 - DNA, 1731 bp, Oryza sativa
  unsure (1)..(1731): unsure at all n locations
agtgtcaaaacagcgaagccctatatttgcagtccaatattgcaatgtgcgcgggaagcagagaagagaacgagaagaattgagaaagaaggaagaaaggggataagaaagagagagaatagaggaagaaaatttagaggaaaagaaaaggaagtgggacccgcagtctagacccttcctccctgagttgacttcccccatggaagtctaaatcacttccctgtactttagtgtgtaagtccaaaggaccaggccctcttatgaagtctatttacctcctagcagagggaaaagtacacgcaaggtccctcaacttgttagccagatacaaaatcgtccctcaaccgcaaaaccggacatccggcgtcccccaacttacaaaaccggtcacaaaaggtccctcggcggttttgaccccggttttgttccacgtggtggctgactcagcgtgggacccacgtgggccccacatgtcagtaagccatgtcatcacctctctctatctttcctcccccttcctctctctctcacttatctcctctcgacaggatgggcggcccgggcggtgggtggggatgtcgccggggtgaggcgggagaggaggtccgacgatcgccgaccggcgacgcggcggcggcgacacgggagaagggaagggcggcggcagcccagcgcggtcgcggcggccaacagacaggcatgggacgggcggcgtgaagggcggcagcggcgcgtggttgtagacgaagccgaggaagacggcgtcgacgtctcccccagcctcagccaccggggaaggagctgggcacgggtggcagccgtcgagggcatcgtggcttcggtcctcgagcgccatcatggtgtcgccgtcgtcgccgcattcctcccgtctcgccgccaccgccaagccgacgcngacgcgttcttcntgcctngtcgccaccgcccagcggaccagcttggccgctgcggtcgcccgccgctccttctcgtcggcgagcacggagaggaagctgacgccgccgccttgctcccctcaccgccgccaccgccgccttgctcccctgagccaacgccgacgcattcctcccgcctcgatgccaacgctggcctccccgtgcctccctgccatcgtcaccgcgttcctcccgcctcgccgccggatttggacttgggaggagctcaccggcctccccgcgcctccgccggccgcgcgtgtggctccaactctgccgccgctcctcctctccgccgcttcttccccgtcggccgtgctgaccctcttctccaccgcgtcggtgacgccgccgccgccgccgcatcggcccttctctccgcgtcagttatgatggtcgtagccgcgcgccgccatcgctgaccgcacgagggggacggggaggccggcgaactcgcaccgccctgagcccgcgcaccgccacccgggagccgccgtcgctagccgcaccacctttcggccgcgcgcgcagccgcctgtgcgagagcagagagcgagaggaaggagagaaatagagaaagagagatagggtgctgacgtggcttactgacatgtggggtccacgtgggtcccacgctgagtcagccgccacgtgggacaaaaccagggtgaaaaccgccgagggacctattgtgaccagttttgtaagttgggggacgtcggatgtccggttttgcggttaagggacgattttgtatctggctaacaagttgagg

SEQ ID NO: 27464 - DNA, 607 bp, Oryza sativa
agtatgctttggtcaataccttattacttgctctattctcttgttcttttgacatggtatgaatgcactttgattaattacttcttcatatttaaatgcatgctagcaaaatatattacacgcataatgacactgttggtacttaaaggcttaaaagctagcagctgttgagctagctgtctcatgaagctagcttaattaagtctgatttatatatatatatatgtagacatccagagagagagagagagagagagagagagagccagagacaagcttagcaacaacaaccaaaagcaggagcactaactgcagctgttggcgatcgaattaaggatcctgcagctacaagcaagaaggtgcaggtgcagggtgcggccatggcgaactaccaccaccaggagtactaccagatggcggcggcggcagcggtggcgtggccgagggagccggacagcccgcagctgagcatcatgagcggctgcagctccctcttctccatctccaccctgagggacgacgacgacggcggcggcgtccgcctcgccggcgccgcgctgcccgccacgccggtgtcgctcgccgggatcgccggcggcgccagtac

SEQ ID NO: 27465 - DNA, 10014 bp, Oryza sativa
actaaagatgaactttagtcccggttggagttaccaaccgggaataaagatgatttttagtcccggttggtaacaacaaccggtactaaagatctttctcttataaaccgggactaaaaatgatttttagtcccggtttttaatggaaccgggactattgtggatttgggtcgaccgaccaaagatggtttctctactagtggtagaggagttgataaggaagaagacatgggcattctcttacagaaattttagaaaatgcaatgaaacggtaagtagtgacatattttgaataaccgtagtattgtaatggcataagttcaaatagttaaataataacggtatttctcaaaatcgtggatgacaagctagctcatatatataggctgcttgagctgactcaagcttgaagggcagcttggattggcgcattgagagctcgatcgagcaagctcgttgcagctcgtgagctagtgttcctccatcacttgcacactgtatatattcatcctcctactcctccgtggcgatcggcagaggcaagcgagtggtgcggcagttggcaagcgtgacgaggggtgtgcagcgagggcagtgcagcagccacggcggccggcgagtgcccgatgagcgcattgagctggcaaccacgatgaggggatcggagcactactacagaaggcctaaatggtgccggttgagaaaccccctaaggtgccggttccacctttgaggcgccgatgagcctaaaaaaaatcggctcgatgcatcgagccgataaattgagccatcaagccaatcccatctaatacccaaatcccaacatttcgtcaaatccataaacacatgctatagtcaataatcctcagaaaaacaacacatcaagaacacatccatcaagaatacaacaagaagaatacattcatcaagaaccggatggagaggaggagggcgccactgccttctccaccgccacagacgtctccactgccaccgccgtcgtcggatggagaggaggagggcgccgctgtcttctccaccaccaccactaccactgtcgcgggaagccgctgtcgccacctcccgggctatcggaccaccgccgcctcccctcccatcgccaagccgccacagccacctcccctcccgccagatctggcggaggggagggcgccgccgctgggccatcggaccaccgccgcctccgctcccgccgtcgagccgccgcagagccaccgccgccacctcctctcccgccagatctagtggaggggagggcgccgccgccacctcccgggccgtcggaccaccgccgcctcccctcccgctgccgcacgacgttgcagcagccgcctctgggtcgccgcaattcggtcgagggagagagagaaagagagccgggtgaggtggagaaagacagagctaagagagaaagagaggggtatggataaggataaaatgaggggaggagaggataagatgtggaggttggttcggctcggctcggctcaaattttggggtaaaaaccgccacctataatttattataggtgttcatttttaattaaccagcacatataacatattaaaggttccggtttttataaaaaaacggcacctatagaataggtggcggttcttatttggaaccggaacctataattgtttaaaggtaccagttttttgtgaatgcaacccgcggaggtgacgaaaaggtctataagtatcggttttagcatttccggcacctatagtgccgacacctatttgatgttttatagtagtggagggtggctgctggcgagcatgatgaaaggagatgcagccagcaagcgtgatgagaggagggtgacggctgatcatgacggggaaacaagtgcgatggtcatgggtggctggataccttgcgtacactagtagagaaacgattttttcatgcggttaaaagtgattttcgtatgcggatcttccaaccgtctggaatgaagtatctgtaaaaatcgctatttttgtgtgtgggtggcgcacccacaagcgaaaatcagatttttcgcgtgcggggtggttatgtcgcccgcaggaaaaaaataaaaagccaaaaaaaaattaaaatccaaaaaaaaacccctaaccctaaagctgccgccgccgccctcctcacggtcgtcatcgtcgtcgtcgccgtcgccgtctgagcccgcccacccgtcgccacctccacgggatccaggtgggggacggccgctaccgccagatccggtcggggggcagccgcctccaccagatccgggtggggggcggtcgtccgccgtcgtgcgcccgctactcccgccttccaccgagcccgtcgctcccagtcaccaccaagcccgccgttcccgcccaccgctctccatcgcctagcaccgctgcgtgcccgtcgccgagccgcgcggtgccaccggccgcaccggagattgagagagagagagagagtaagagaggatagtgaggtgagagggtgagagaggatagagaggtcagagggtgagagagatagaaatgataaggataaggatgaggatgagtgcatgagatgaaattttgaagtgttgaggagggaaaaagaagaggatggatagacttgtaggtaagtgtttaagaggtccgcacgtgaaaatctgcttatttttgcgtgtgaacccttaagaggcccgtatgccaaaatcgattttcgtgtacgagcctcttaagggtccgcacacgaaaatgggaggccgattttttgcgtgtggatgtgaaaacagtccgtctgtaaactaaatagcttatcgtccaggaaaattgtttctacactagtggtagtcgctgtgctgggagaagtgcgatggcggggcgactgttgtgcaagaagttcatgagattgggatgcggctgatgacgctgatctctggtcattagaatataaggattagggagttagggactatggattggggtggattttggagtacgtttttagggcttagtagagaattggacggccactaattggcgcgcacacgcgtcagctggcggtttcacgtggttttttctctattattttcgctttttcttttttttcatctttttcttttttttccttttttcctattttcttttgtgtttttccccattttttttaattattatgacacgtgttttcaaaaatatttgagttgaaagtttttaaatcttaacttgaaagtttttcaatctgaagaaaatttcaaatctagagttgaaggttttctattcttgagttgaatgttttcaaatctcgagtccaaaatttttaaatctggacttaaaaattatctcaagttgaaagttttcaaatctcgacttgaaaattttcaaatctgaacttgaaaattttcaatctcaagttgaatgttttcaaatctcaaattgaatgtttttaaatctcgagttaaaatttttcaaatctaaattgaaagttttcaaaatttttcttacaaatttaaatttcgagttgaaaatttttaaattttgagtttcaagttttcaaaatttgaattcaaagtttaaatgttaagtcaaaaaatttcaatcaattagtaaaagaaaatcttccgaaaaaaagaataatcttatcttaattaccgtcattacctaaaactaattcagttagttaggagtttaatacagttagttaggcgctccgggaacacgtgccaccaacacgcgcgcccagttgctgccaagtgggttgctggcctactgattgttgagctcgcaagccaactcaaactggctgcctggcccgttatggaacacgagcataaatgatatcttgcctcgttaaagaaaatgctacgagttgagtcaagctgagatgacctagccatagaccgtattaacgataagcttttcatccatccatagttgggagggctcgggggttcgtgttcttttacacgaggggacttgcctttcttattttacattatattattgttactttcattgacagtatatgtgatgttcctagtgcattgtatttgacagatcgatcaaattgacagcattccaatatactaactaaaatatatttaaaattaacggaaaaaaactgaaactgcagcaaaatcttcacaagcgggcagaatcctttggtgactggccttacattgttggctgaaaagctttttcataggcgggttatcgcccgcctgtgtaaatggttcatttgttttcatatgcctttagttaagagatttgttccgatccaataaaaagtaactcgtcatacttacggtatcaaatcatttttgattgttagatggcagggtaagatgggtattgttagatccaacgatcgaaaactatttggtaccgtgaggtaccggtacctcgaaatactttctgatcgttggatctaactggacaaaatgagcattgttagatgcaataatcgaaaactatttgataatgtgggatatcggtatctcgagatacttgtttttaagatgggatcaaatctcttagttacatgtggtacatcgaaccgcatgtaaaacccattttcaaactgcatcaagaaaatagttttccgtagtgttgtgctaactgctaattatccaactgatttcacgcaggtttgtggaacagacaaggagatagatcgtgacctgtggtggtggccattgtgtgcgtgacggcaggagcaccaacgtcgacgacctcgaccatcctcacagcagtacgtgagctcgtgaggcaccaccgtccttacccgcgaacgacgcccgggcacagtgttatgacgaatgagtacgagttggatacagaggaagacacagtgttatgcttccttccccttgttttttatatatagggtgtgtttagttggggaaaagaaaatttttaggtgtcacatcgaacgtttgaccggatgtcggaaggagtttcggatatgaatgaaaatactaattttagaactcgcctggaaaccgcgagacgaatcttttaagactaattaagccatcattagcacatgtgggttactgtagcacttatggctaatcacggactaattaggcttaaaagattcgtctcgcgatttcccccataactgtgcaattagttttttttatctatatttaatgctttatgcatgtgtccaaatattcgatgtgatgtttttgggaaaattttttagggaactaaacgagcccataatatgttcacagacacagtaagtacggaggatgtaattaatgtgttgcccattgtatttcagacagccaccaaccacgagcacagaaaaccatgggcgtagggcatagtagggtagtagtggtttagtactacccagttttagcctctgtaccccttacatgtttgtgtcaaaatttggctaatagttagtttcatttgagaaggccaaattgtttagaataaccggtgcattttgagtgatttgcttgagaggtcaattgagattgtgtgtgcaggaatttgtgatgcatggagagatcgtgtgtacaaaatgatgggtggccgtagcatttcatctggtttggagatggagagcagagcagcactgcatacctatgcagagtgccgtgtagtgcatgcagcgatagatggagcttggtttcttgtgtctttagccggatcgtattggtgcttgatttctgcaatcatatggaggcatggcttctgatcacatgctgtgtggatttgctggtggaatatgcgaacggaagggcgtgtgcagatggacgctggagatcgatcgctcggctgcattgcatctggctgcgcagggtgccgtattgcggtgatctagactatggaagatatggaagatagagatattttggtagttaatttatttagattaaatcgtattaggcctggtttagttttcaaatttttttctaaaaacaccacgtcaaatctttagacacatacatagagtattaaatatagattaaaaaaactaattgcacagttagggagaaatcgtgagaagaatcttttgagcctaattagtccataattagccataagtgcaatagtaacccacatgtgctaatgacggattaattaggctaaaaagattcgtctcgcgcgtggtttacaggcgagttatgaaattagtttttttattcgtgttcgaaaactcttcccgagatccgatcaaacatccgatgtgacaccaaaaaattttttttcacgaactaaacaggccctagttaacttgctagagtttccatgtacgtagggcttgtaggtccggtgcttaggtctccctatatataccggggtattagatcagattgaagaccccaacaatttaatctattaatttcatgttctttactttaccgttactttttattttatttttatggctaagttctagcaaccctaaaatttagttaatctttgccttttgcgttgaaaaacggttgtgctcctccacgaaagcgagaaggttatcctttactagtttgctcggaaactactcattcgtcgtcacgtaagtacgatgttatcttctttactaatttgctcgtaaattagtcgtttgattccaaaatataaggatttttagacccagacacagtcttcgagatgttactttaaccaacaatatatataaaaataaaatattttaaataaaaagagttgcatattataatagtttgattaatgataaatctagtaacatcaattttacatgattgatcctttaattttttttactgttaatagtcaaagttaaaaataattggcttggcactatactaaagaaacctatattatattttagaacggagggagcagtggtttaggactaaaccagttttagccccaataccccttacacttcttcttctcgtcagtgtgagtggtactataatttaactgatagatatggaggggacttcaactcgcctgaacatagcatagacctgtctgacgatagacactgtagtctataggagatcgacggattgagatcaagtgcggttgctattgtaactgcacaatagtaactgcacataattatggccattcgttttcagatccaacggctctagataactgctacagtgtgagcataacagtgcatccatgctacagtatttttgctacagtaccacttcatctcctgactctagatcatgtgatgttgtgatgcacatgtaactgcttaagttacggttataataacgtataacgactgcacaggatcctgatccgagatcgacagacacactggccagctcgtgacgatatacacaggaactttttgacatgagcatgttcagaggatgacgcattgacgctctgtctacgggaggagaccgttcgcacgttttacggcctgtttatgtcttgaacgaaaatttttgactttgtcgcatcgaatatatgaacatatatatttaaaatattagatgtagactaataacaaaataaattacagattttatatagaaactgcgagataaatttattaagtctaattaatccattattaacaaatatttactgtagcaccatattatcaaatcatggcacaattagacttaaaagattcgtctcgcaatttacacacaatctatataattagtttttttatatatttaatactccatacatgtgcctaagcattcgatgtaacagggtgaaaaatttttgtctgggaactaaacagggccttagccgtgatgaatctaaaaagcaaataagcacttatcaggaatttatatctaaaccttactatattttatatgaatgttttcaccgtccagcatggaaggatggtactaaattaatatggaccgtcgatacaagatgatcgaacggctgcctaagaatcaagtacttggcggtaccggcacacataccgtctagtacaaaccctcttgagggcaaaattgtactttcttgtttattctcacagaagccacatcctgttgaatatataagcacatgatgatttaatttattccataaataaatcaagacattgcatagataaactagtataatcgcatcatacaatctacacttgtaaactagacagtaaaccataaacagatcgtatatgcgaaacacatttaatgtgcaccgagggttttgaaagatcggctgcacaacaggaataagttgcggtaccgggcatatacgacagcacgcagcactcgagctaagtggaagatgagctgttatggactaatagcaagcagtcgcgcaaagcgcttcccaaaaaccttattgtcgccttctcccagtgcaggacgtcgaaggcgaagattccggtgacctactctcccgatggccggtgagcaggatggagtagactatgagcgacggcgcactacagaggaggagacaaaccctatattgatttcgtgtgtattgcttggatgcagcggctcgctttatatagagatattacaacgcttgatcagggcgccttcaagatctacaccccacgtaaccgaaccggataagtcatgtctaatttatccggactccacgcggctccacgcaccggattattcggtgtgtttccaaaaaacaaaccgaatttcctgcaacaaaacaaaactgcaaaaggagaccgcatctacgcaagggtgaggaacaaattaattttgaccaacaattcgacgtgtatgtcgttgttgatgtgaaaacacgacggcctgagagatctgcttaactctagtgcaggtccacggctagcctcgagtgtgtcaagggtgtgccagctgatttgattctgtaatcagcaagaaagacaaaagtagagttagtcagccgatagccgactggccgataggccgatagggtatcgttggtggtctcagccaaagttaggcccaccaagcccaagtcataccatatcgatagtatcggccatcggcttcatcgaccttgatcaactcatactctatgtatagccgatacggtgtccagccgatgcgcaatctgactccaaattcaactcgattccacaccagatcctcgtcgatcttcttccttcttctccgaacctgacgcaaattccattgttaacagtcgtgtacgtgcctcgcctcgccttgccaggagagggagcacacgcgtgtgctcctcttgttctctccaccagacatgcctcaagtagctaggagagcatcctcccttataagaaggtctccctctcctagaataggcaaggttgtactaaactccccatgcatgccatcccatgaggtgggcttttgtgattttcaaagaattaatcttcgaatgggctaaggcccatccactaattccaacaatcccccactaaatatcaaaatcccactgggatttgccttattccaatgtaccgcttatataccagcagttcaatggagatggattaaggttgaacatctacctacaactccaagctacacttactcacaacttgaacaatggactacaccttgaattgcaagtcttgtgcaagtaagtttcactcagagtcttatctggtactacaacgtgagtagactaccctcgggtgtagcgtataggtcatactcctttgtctcatagtaagcttcctagaagattcacccaaaatatccgtagactgcgaccaacagtcaaggtcaaaaaggtgcgttctttcaagaatggtttgtaggatagtatcttcgctaattaaaggcaatagaactcattaaggcatagccaacctgccttgtaactcatgagagtacatgcatcttcacttagagaaggtttagattgatagtctcctctacttaactaatggcttattcttcctaggttctaattcacgggatctccgatgacatagattgggttaccgccatagcataactcacttgggtctcaagcccatctcctttgatacactatctatcacatttcatgatagtccattcgtgaaggaatctgccagggttttagctgtttggatataattcaatgttataatctcggagt

SEQ ID NO: 27466 - DNA, 1374 bp, Oryza sativa
ctgtgtgatttaaaacttttaaaaattgtaagtatcacatataactagcatatacatgatttaaacttgttgaaacctctaataatcgtgttgtaattaacatatgccatacatttttatatggataatcaatacatccaaaatagtttacatcgtgtacacaataattacggcattacatcggcagtgacggttgaccgcacgtactttctcctcactattgttccctccttgtgatcgctgcgtgagtaaggggtgtcttcatttgataggaggatgctagggtcaatcatcaccgtgaaagggggttgcccatccaactgatcgtaatcctcatcagtcttgtcctcaactccgacgatttttcttttgcctgggagaaccacttgacgcttaggctcatcaggccctctgtccttctttcctttgctagacatgtccttcacgaaaaagacttgcgttacatcattggcaagggcaaaaggttcgtccgagtatccaaccttgttaaggtcaacagttgtcatcccactgtcatcaatcattacgcctccaccagtcaacctaacccattggcaccggaacagaggaaccttgagaggaccatagtcaagttcccatatgtcctcgatggcaccgtaatacatggcagttgttccatcgtgtcccatggcatcgacacgaacagcgctgttttggttcgtgctcttcatgtcttgggctctcgtgtagaatgtgtacccattgatctcatatccctggaatgtcgcgatcgacccagacggtcccctcgccaggaaggcaagttgttggttgatcgactcgttacccatgagatgttgtcgtagccacgcggggaaagtatcaatgtgatgtcgtgtaatccatgcatcggatttaccgatgttcctggcgcgaactagaaccaagtgctcctcgatgtaaggagctaccaatgaagagtgttgcagaacagtgaaatgggctttacggaataaattgttgtctaccgtcattattgctttccttcggagagtctacagtagtctcccttcatggcgtgattcaggtaccccgattgggcgaaggtcttcgataaattctacgcaaaattcgatgacctcatctgttccataacccttgtcgatgcttgcctctggaacgagctcggttacgaacacacttcttcagaacgccccatgttcctctcgaaaggaaacatgttgtgtaggtacataggcccgacaatacggatctctttcacaaggtgacaaagcagatgcgtcattatattgaaaaatgaaggtggaaatatcaactcaaaactgacgagacattgcaccacttcattctgaagggcttctaatctatccg

SEQ ID NO: 27467 - DNA, 6476 bp, Oryza sativa
tgttatttaattactttgtctaagtaagatagattttcatctttgtgggttcattgcttagtattcatactaagtgctctaatactagtgtaggatcgaatcacaagaactaagccaaccagaggggggggtgaatggttgatatacccaaaaaccaaaacttttagcggaaataaaagttaccctcaaattcgatggatcgtggactgactgaaggtgttgcgccggtctgaccgcttgatgaacatcggtctgaccgatataaatcgatcggtcaacccgccgagattgcctgctgccgtctgaaaccgccgccggtttgaccgctcttatgccgccggtctgacctccgccttgccgtcgatctgaccgccggtatatcgctggttagaccgccgaacccgaagaaacacaaatcgaagaactctcaaagtagatgacaactttattgcttctctttgtgtttacaaagtgcaccaacagcactcgttacaaaaatctcaagtaaactcgaaaccctagctaaactagcaactcaattgctctcaaaagcgataccgggaagcctcacgctccccctctatttatacatgaggtaggcagcctaaagccacgaaccaaactcatactaagagtcctaaacaccttaggaaaccctctagtacaaggaagaaactttacataatcaatcgtaccaaatttggactccttccaaattcgactccgcatcccatactcacacaatacctccatcgtatgccatatggaatcttcaccaaccacgtgcatcaactctagccttagtatcccgcatgatatctgaccaccacggacatcgtcttaccaccaagccgactcccgatccatcaccgcaaatactctcccgaggcattgagtcacctacacatgaaacaaacaaagaaaccatattccgagaccaagctatccccaacttgagtcattagtagcaaataacagtattacatacgtatagtatccatctcgaagccataaccatgaaacaatcacggatatccaaagaaacaacccgaaaccgataccaacacagcgtcggccggtcagaccgcgggcctggccggtctgaccgctcaacacaagccggtctgaccggcaacctccgcccggtctgaccggtcccaacaaaaccgagaaaacagttatatccagaaccacttcgacagtaatctccaaatatcaaaaccaataatcatagatgccgattgttcatcacagaataagaatcaaaacacactttgatcttacaactagcactttggataaagaaggaagttcctgtacaagtattagagtagtaattaataacttagacgtgatgtctaggttagagattacctctgtttgttgtgtatcccacagatttgtcagaggtagacggtaggtggtgacagccctgaatcccgtcctagtaatcctccgcgttcagatacatcatagagatatagccggaaccatgctagcagactagcaggggtcggtacccgaagcaatagataggaaattacctttaacttatcttggataattaaaacaaatagaaagtcctctctagcctaaccagcctacctatagttgttgaccttggatagtcttagccttaggtagattacacgcgttccctgagttcgatatacttttggggtcacccgaagatgatgtgctacatcagtattccatcgcttgcagatttatctgtggtcgtaagaaataccaacagtatgtctaggctaatcttttatgatgatatctggcggcttgtattgttgtatattttgactgagcctgttgattaggcttgtcctcctattaacattgaaatttggtaagtccctaagagaattatcacaccgccaatagtcggattcttgctatattcggtgaatgaaattaatctattaaaggaagcttatccagaagtgaccgagttcaatgaggatgcggcatggcaaattatcatggcaaattatccctataagaactttatgttttccttttatctttaggaaagtttcttttttgtcctaaaagaactagtatctccccatgggtataaatatgtacacccggggtcattataatttagctctcgatcaataatactctcggcgcatcgccaccctcttttctgaggtttttacttatcaaccgacgaaatttggcacctgacgcggggctgcatctgttcagttcgatctccggcgaatgggtaactcctacgttccgccggtgcaggcaattgtcttgtttacgttggtgtcgtttaaggctgcatcagtacattcgacctcttggattgctccggtttggatgatatatttgtctgcctatttatcatatgtcttagttagtctaggcttagtatctcaatttagctctatcgattgtctctcgctttagggtttctgtcggtatcggctaaattgttttacaagattagattagctaaggcatctaccaccctaaaaatcagtcaagggcttaattttctagatatgatgtttcttttcatacttagtgttgcatcagttaagtttgatctactaagtcgtgtttagaaccataatccctagcctgctttttgactgccaataagggtttcatcgggatttcagccgatgagttatctggatgttgcatcggcttacaaggattacatacaagttggatttagctgatggcaacaaaaatttcactgtttaatctaatattgtggatttatgacattggacctccagccgatgtatgctttaaccttcggatcagtgcttattctatcatgtcattgttagccgattggtttctactagattatattattgatatattatattatcatcagtcgattgtctttatatcattatccacattgggtatatagcagattgctcaaaaccatatcgctagcggctggtatcggcatcggctggaattattcctttggtttgacaaccgatcggctcattggtctactatttgtatatcttgtcagttgcagcaacaaactgactggcacgcccgcatctcatcaacctttggacctgcactggagctaagcacatctcccaggccagtgtgtgtttttcgcatcaacacctcccctccctaggaggtcttctatttatacccatagatgtccccttgtccaagtagaagtagagagacaagtatggatataatccgagtagtccatatagtttccatgtagaactctgcttgtccttccttatccggaactccttctatatacgaggtatgattccgtataaggcttcgtacaaggtgggccccgctgaccttaatcgactaatattgggtatgtgttatccataaccatgacaatattgatccttcgtttcacaattggtggtgtgctttcagaaatgatattcttctacatatgtgtaggacaaataaaattcttaaacaactagtttttgattggttgcacagcatttaatttcttttctggaggtgtttacctcttgtaacattcgctgtaaatatagttttttctcttttacaaaattacactactggggaaatgtctggtagcattcaatttcaaaaaaaaaagaaatacataacatctgatccatttgatatagacccaaccaacatgattctatgtaagccacataatcatctatccaccaatttcactcgtttaatgggcgccaaattctggtacttttggggtcatgatgctaagaagtatactcattggtctacttctattttgttgtgaaggtagatagcaaagttattaaatttgtcaattcccctttgaacattatgtatagtacatagctagttatcaaatgtagatcacttcaaaattgtttgtggagaacaaaagcaaattcggccacactacatacagtcaaatacctcgatacaaattcagccattgggaagttaattcagccaccggaatctaagtctccatagactacatagaacagaacttaacacaacagaaatcaaatgaagggtgttgtgtccctgatgttgcagagcaagatgcagggtgccgagagcccgagacgcgatgggggaggagactgcggcagcagcgacacagtcacgcgcatcatgggaaatggcgtggggcttggggggtggacaggttcggtagtgttggtcgcaacaccgtagccacagagcaagtacgcacagcagggaggataggctgcggtggtggctataggtgcaggcggcgacaatgacacatgcgaggtgaggaaaccacattgccgcaagggaaggagggtgcccctatcatacccccgatgattgaacggtcagatttcatttgatacatgcttgtacaaagtacctggaggtactaactgctggaccggaacaaaacacattttagatggaggtagtaaatttcaagcacccaagtttaatcccaaaattagtgcacttttaaattactactctctccatcctaaaattagcaacatagtatgcaatgagacatcctagtattatagatgtggacatagcagtatctcatcttatctcatctcatacaaagttgctatattttgagatggaaggagtatatgccccatcagttgaagcatgggtactggtcggcgttgctctcagtccgcacgggtggcaatgccactcaccatgccgtgcctcccttcctcccctccgtcgctgtccaagctagcaatcggatatctgtgcagcggcaaggtcaaaggcggtgggggctgcttaccagctccgcaatggttgaaggcaagcagtagctatcagatctgggtctccgctcctaggtctagatgtgtggtggagtggtgacagggatcctctccggttcatcaacaatgatgcccctggcttgcggatggtgccgatatgggggctttccccagttcgtggatggcggtgcaattagggcttctccccggtttgctgatggtgatggtggggctccattcctgagggtggtgacagggtgcttgaccatgggactaggcgaggaggtgatagggtggtatggcaacggtcacgattgtgggaggcgacgatagtagttgaggccagtcagccaggcggttcacctggatctggcgggggtggcacgcaagtggtggtggactagcggctctaattgctggttagcttggtgttctccggtgaagcggtcttggacatggccaactaatgttggttgctaagaagactgggctaagcaggggagcatcgaggtagcgagcggccgggtgagcgagccgggtgagcgcctagatccggtcgcgtggtgccaagggcagcggtcatggtggttgtgcttttggtgtggatggcaaagatggccctaggggcagtggctaccagattggtctttcttgtccagattggtcgagtggattgaaggcaagtgttgacagtccttaaatcataatatctaaccgtcaatgcctacatataatgaaataaaatatggtatccaaactagtgttagggattattactaatcatttccgctagtgttggtgaaatatatgtatgcatgtattttaaggagaaaacacatctgtcctgtgacaaaatacacctccggataatcaggacacgtttacatggattggacggcggaaatgctactgggcgggcgagcgccctcgctcgcccagagcgatcggttccccctcccccctccccctccctctctccacctggtttccttttttggcaccgcattactttcctattttagtaaatttatgcacctaaagtttatacacctcaagtttacacatttaaagtttagagaccaaaagtttataaatcaaaaagtttatatatccgattcaaatttgaatttgaattcaaataatttttatatatatagtatttctatacatctaaagtttatacacctaaagtttatatatccgattcaaatttgaatttgaattatgtccgattcaaatttgaatttgaattcaaatatttttcatatatagtatttctatacatctaaagtttatacacctaaagtttatacacctaaagtttatagacctaaagtttatatacccgattcaaatttgaatttgaattcaaataattcaaatattttctatatatagtatttctatacatctaaagtttatacacctaaagtttatagatccaaagtttataaatcaaaagtttacgtacccgattcaaatttgaatttgaattcaaattttttatacataaatttttctaactttttgttttttttaaatttttttgtggtgtactgtaataggaaaagaaggggaggaggaaggggagaaaggagggggggccgatcgctggatcgctcgcttagcgagcgatcgcccatcaagcgcccccattggagggcccatatgccaatcaaaaccacttagaattggcccaaatcatagcataggatg

SEQ ID NO: 27468 - DNA, 9105 bp, Oryza sativa
ccatgttgatctgtgcacatactagtactaggtgttggggttatattactgaatatgcatccttagttcaataagcaagacataattttcatgagtgattggccaagatagtatcatctaaaatttaatggactcttaataggataattcaagtatagatcagccatctcagtgcatagttgatagcaagaattatcttggatgatctacaagtgcatttgagttaagcattatatctgtatatagttcagtaaagccatcatagaatgaattttgaatgcatgcatagttagaaataatcattgttctatttaacctcaagaggttaagataactagataatatcactattgtgctactatttctagttaaataggcagagcctaaatgggtagacagtaatctatttctcagtatagacactaaataaagcatctaggatccattggcagaatcataggtatcaatattaggtcagctagaagagcagagcatatttagagaaaagaatgacatctattaggtcttgttcagttactagggattaaatccccaaggggaagcaaaccagggagggattgagtgaatcccaccatgtcacttaaaccctgtggggatataaattcctttctcctaatccctctattaatggaaaccctgtgttcggttatcaatttttttttttttgctactgatcaataggaacagccgaacaaccaccctacaatgcttatgtgcattaaaatgtgacagacatgtgtgacgaatgatcttgaaccaaaacaaaatgtaattttttaatggccgatgatcaagagcatcaatgcatatatcaactacatttgaatgctcatttcaactgcacgtttcgatatccgtaaaatcttttgctgatgagcaactgcggaatacatacaaatcttcatccaaaaattcgacacaaactggctgtcaacacgaactggctgtccaggttgtactgaaattctaaacaaatgagcatagaaacaaatgagcattgtactaatacccaaccaacagtgacccctccttccctgtgctgtgcacactgctcaaagaaaattaatgatcctactagtatctcacagatcattcgaaatgcaaatgcatgcatacatgttaatttaacctgtccttttcgttttcttgatcaatgctggggcaaaacatatttacaggtgcaggcttgcagctagcatgcatggggcaaaacagatttacagtgcaacactgtgatgagtcgcgattaaacagtcagatcagatgacaaactatgccaatttatgaaacaccaacttatattacctttttttagataattaacaccaacttttatattacttgtaacaatgaaagcaaagaatgccatgaaatataactgaagaaatcaagaaatccaacaatgtgcagcaatcaatcgatcactagagattagctagctaagctcagtaattaagagaaaggaattcatataagagccttcgcggagaactctatcagtttctatttggttaccgaagctaaatggacccgagctgttgatgaccgaatagaaaggtttattttcaatggcatgtcctagatgatgtaggctttgcttcctcagcattaaaccaatcttcaggattctcaagcgtttcagctatttctagatcaaccaaaagctcataacttggtttattcttcggttaccatatctttgaatgacaaagtgcccgggaagaaagatctagatctctatcatcatctatctctatatctaaatatggaagaaccctcgaagcctgtccccgacgacgatgccccctgggtgaaaggaaaggggccgccattctctttctttcctcaatcgttccgatcatttctctcattcccttttgtttgtttggtggggccccgggttggttcgtttattcttttccatgtattagattatccgtccgagccatatcaaattaaaaatatctaaaatcaaattcaatatagaaattggaatagattctattagaaaacatatatatatcgatcaaggatgctgaagacatcccagcgtattgaagtacctaattatctactggcccatccaagaaccaagggaggaggaaatctaggtgacacatcaatgggaaagaagacaaattcaagaatgccgctgtttacacccaaatttggcacctagggataaaataggaaaaattgccaaagtttggaaatctgccggtttcctccgagtgggccggtttgaccgccatgtgttggccggtcagaccgccggtcgaaggccagtcagaccggcggtatgtggccggtctgaccggtagagcccgagttcgggtctgtttcgccgggtctcgaggtttccttgctcgggaaggcatgtttcgggtttcctttgaattctatcctgagttggacgtggaggaggcctgtagagggcaagaccaactcctatataagggacatggccggttcaattataactaaccaatctacaatcaatcaatcgaatcgttttttatattgcttttagttttctcttagtttgtccatctttgtcgatttgtgccgtaaatcgtccgccgccgctgcgagagtgcgacacctctttgtaggtttgtcctgaaaaccttccgttttgcccacgagacgggtagttatctagaatcggctctgctagccggttttgttatcaaaacccatcttggtttagcttttgctagatcgaggtggttggtgactctaggatcaccgcaaggcatttaggtgctgcgatcgtgcttgtcaacttgtcacaaaaagttgccaacacgatttttggcgactccactggggacatctgctcaacgtcaactcaacttcgacctcaccatgacgaagccgccgtcatccaaggcggaggtggagctggccaatgtgataccaatcatatttgatgatttcgaaggggaagatcgcaagtccatggaggagtacattaaggagatcacacaggaggcgctgatgagggcgtgcaccaggactcgtcaaggcgtgatcatcaagcctaagccacgtcctaagcctacttacgatgtggtaagtaatgaggaggtaacacaatttatccaacaacacattgcatctacaatagattcatctatgattactttgaataataagttaaatgcatctattcagaatcatgttgaaggatttttgaggactagattcggccctctcgtggccgattttatgttcaaagacaaagcctctaccagtgctagccaagccactatagatcagataagtagtataaccaacggggcgaaaacacaacagcacggcgaggggtgggcggcgcacacagccagtctaaccgggcctggtggccggttagatcgcgatgtcgctgtcggtcagaccggccagacggccggtcagaccgggtattaccccggcggtcagaccggaactcaggccggtctgaccgcgccactggacgtcggtcaaaccgggtcttgggccggtcagaccggcacaatcatcccaattcagggggtagatccaatgacaaataatgcttatttgtatcatcttagaacatttgattcccctgtatctactgccactacttgtccccaaattctcctacatgttcctaatgcttataatgatgtttctagggggtatcctcccgatactaggcaaggccaatataattatattgcgccgcaaccacaacctattaggccaccaaacccaccaccaaaccaacataggcctgataatatggaggaattgattagtggaatcattagggataaattcaggattgaagctaggaatcgtgctaaggtttaccaaaagccgtatcctgactattatgacaacataccatatcctcgtggttatagggttcccgaatttaccaagtttaatggtgaggatagtaggaccacatgggagcatgtaggtcaattcttagcacaatgtggagaggctagtagttccgatacttttaaattgcgcttgttttctttatctttgtatggtactgcttttacatggtttacttctttaccggcaaattctatacatacttgggctcaattagaacaaaggtttcaagattatttccatactggtgaaactgagtttaggttatctgatttaacatcagttaagcaaaagtataatgaatctgtcataggtttagggatgttaaaagctgatattatagtttaaacataactgatagagatttgtctgatcttgcttttaatggtttaattgctcctattaaagaaagattagatgttggccaacaatttcttgatgttagtcaactcgtgcaaaaggcactagctcaggaaagccgggttaaggatagcaaaaaatttgttagaccatatgagaagaagcctaatgttaattcaattgattaccatgaggctagtgatagtgaaggtgagggtgatcatgatatgtatgttgcctgccgccgagccgtgtgcgccgctgccgattcctccacccgattcgctcgattctctgagccgtttcttgaattagttgaggggatttgtttcccttatcctcctctatctcttcccccaaaaaaccgactttatccctttgaattcgacgcgaatttggattcgttttcgagtttatgtctccaccaaaccctaggttttcccggcgcgattccttgcgttccaagcctgatctctctctcccgtcgctataaatagagtcccctccctctcctctttcggccgccacctctccctctctatgccatcgcttgtagcgccgtccccgtgttcgccttctctctccgccaccggcagctgctccagccgccgtttgccgccgcctcagctgatgccctcctgtgccgccacctctctcggctctgcaaggtcaagagcaagcccggcagccgattcccttgcaccgaagacccagggaagcccgtcgtcgccatcaacccgaagctcgccgtcgtgttttgatctccggcgaggctctgctgctcctcccgtcatcgccaagcttcgccgccgcctccattggattcgcagctgcgaagtgaagcctggccacccctgcattgtcgccgaaggtcgccgaaacactgtcgccgccgtggacagtacctcgccgccatcccgttctcgtcgccggccatcttccatcgctgtccgtcatcacgtaagtgttggtaagaatttccatcgccttctctacctcccggtgccctccgtttgcattattgtgtcgtggttcgccggcaaccgccgctcctatgtcgttcaccggtgtagtttatccctagggtcttaatccaatataatccaatccgtggttggtctagcattgtcatctccgtgtgttgctgccggaacgttgtcatcatcccttcctctccgatcgctttggttcggtgagacttctattcgttctctcttttcaatggcatattatttctttttaatatatgtcatctaccaaatataatctaatattttccggaggttgttttaatcttttctctcagttataaatcatttataaatggtttaattaatttggaatagtcttttctttaataggtttaattggaattaaatcttgtaaaattcgtaattaatttatatgaaatcggaatgagaccgttcaagtctcataattcatctaaaatcatgatctacatatttgtttacttttatgtactgtttatttggtttttattagtctttttctttgttttgcgtgttagcttgtcgtttccgtcgttgcgaaggcaagtcacacagatcctaaacacaattcctttgagcttgttgatcctatatttaaattctctatttatttcaactgtgcatttattttcgaatgtcatcgggtggtgtgaacctattcctttgttatggccaatttgcattgaataccctattccttcataccttgggtaacaaattaattagcttgaaccttatatattggtttggttcagctaatagctatatatatatatgtatgtatatatatatatgtatatatatataaatgtatatatatatatatgtatatatatatatgtatatatatatatgtatatatatatatgtatatatatgtatatatgtatgtatatgtatatatgtatgtatgtgtatgtatatgtatgttgtgtgtgtgtgtatgtatgtatgtatgtatataataattgcttagccatgcttagaaacattagctcattaatgggatgaatcacactacattattacttatggttatatttaattgtagctcatgatggttaatcgtgttatgataattaactgataattaaaatttgattaatggtgggttgtgagcacatggttttgaaggtcgtgctcatgacaattaaggaccggtttgcgagctactgttgtgagacattaaccgtaccaactacaagccagcgtgggcaacggctttaccttttgtatagcatggttctttacggggtgctagactgagaagcggtgagaagtccgtgggggtcgctggggagtccatgcctctggttatatttatagagggggtgattatgatccaggaatggtgcattgtggtgagttgtgttgtgcagagggtattgtcacaacctctattcgggtactttccagtatcgcgacgcatggtagacatgatgttgaggctgtgtcttgtgggtatagtggtacacctctggccagagtaaaactattcgaatagctgtgcccgtggtcatgggcgggttgagcaatgtttttcgtgattagtctcacacctctcacaataattattgatgctataactggtaataatttgtttagctcctggtttggagttagatctgtacagccgggtatggttgttcagaatggttgggcctgagcagcatgggcgtgttgttcagtgttgattaaaattaatgattaaattagtttattgttttactactcttaaatgtttattaaatgctgcttttgcaaatgagcctatattatgccattctttggtatccttgtgcacttgcatatttgctatgtggcttgttgagttgtcatatgctcactttgcaataattaatcaacctcagttgaagaaaatgatccagaaggagaagacgtttggcttataccccagttgagctgcctatgggagtggagccggagcttcgctagaccattaattttgctgttgttttcttttcttttgtaagtatgtaacgatgttattatgatggatttgtatattaaattgtcagtttgtgtgcctcggctgattccgggacgagggttttatgcacaaataagttcggaaattgctagtgagtttccgggcgtgacaccaagtggtcatgggactaacaaaaacaagccttttgtttgttctaatttaatgccgactcctcgtaaagatcggcaaagtaggattaagtatagttttgatgtggccaaatatgataagatctttgattatcttttgcaagaaaaacaaattagattacctaaaggtcatattatatcatcttaagaagaattgaaacgtcaagcttattgtaaatggcatgattctcactctcattctactattgattgcaatgtgtttcgacaacaggttcaatcggctataaatgaaggacgattgaagtttaccgatggttccaagatgaagcttgatcatgatccttttccggtgaacataattaattttgatgataagaaggtattgattcggccggagcaagccgaatctacaaaggggaaaggaatggtcattggagagcctaggccaaaaatgatggtgccaaagaatccggaggttggtgtttgcaaggaaaataggagtgaagcttcaacttctagagttcctaagaagactaaggtgaccttcaatatgcttttggagaagtatgagaagcaaggcggtgagagagatcgcaacaaaggaaaaagaccaagatcacctcctagggagcgatttggtcattgaccaagacggtcggaatcacctccatatcatcattctcaagacatgtcatgggggccttacccaatgccgccgccgggttatccttatccttactacatgccatggggggcaacaacgccaatgttcaatcatatgcctccaatgcaattcaaccaagggtagggaggaccaaggaggccaattcatgagcatttgtcttcatcaaacaatggttggttttatggtaagaaccgggccaatggagaaaagcgggaaggaaagcgcgtcaaggtgaagactaggacttcggaggtgattaccatcaaagtggggtctcatgatgtgccaataccttctggagatgaagttggggagtcctcaagcaacaaatctgaagccggtaccagctcatcgaagtcggccgatctgaccaggccctctggccggtctaaccgcagccatacggccggtctgatcgccaatccaacaacggtctgtccgacgcctcaggccggtctgaccgctgacctaatgtcggtctgaccggcacctccggccggtctcaccggtggtctaagtccggtctgaccgggctccagcgccagtttgacaggaggtttgcaggaagcaatgtaggggcttcctcgtcttcaaatagacttaacagggggcactatttacctcctggaacaaagcagaaacctaggtggatgcctgaggatttgacggctactccaaggagaaggttgcaacgtcttcgggctcaagagataagagagaaaaaggccgaagaacaaagagataggaggttcaatgagttgtgaccaccaccggtatggaggagtaaattcgtagagaaggaagaaccagttgttttgcaagaggaaaaggaagaacaatcagttactaaagatgaagcatctccaaaggaagacatggaggtcaacatggcgtgtatgttgcctatggagttttgtgctatggatgaagctgaggttgctcaattttcactaggtcctaaagatgcggtttttgagaagccgatgagtcaaaccgtcatatgaagcctctctatctcaaaggtcataaggg

SEQ ID NO: 27469 - DNA, 955 bp, Oryza sativa
ccatcactcgctatttcctcctggcccgcttgatttccttcaaatccaacatactgagcaaagtccggaatattgtcgtcttccacttcatcttcttccatttcaacaccttgctctccgtgggatatccaacaattatagcttggcatgaaccccgactcaaacaagtggaaatgaatagtcctagatgcagaatactccttctgattcttacacttattgcatggacaacaaataaaacccctttgcctgttagcttcggccactctcaaaaaatagtgcacgccgtcaataaactctttggaccgccggtcagcgtacatccattgccgatccatctacatgagtcaaaaaaaccgtacacaaataattattcttacaataatgacagtcatacaataattataagatatctttattcatacaaaaatcataaaatattacaccaaataattcttaaaaactatttgtaaagttttaaactaattttaatgtgttttacttcttttaattttcattttagtttgttttctattatttaagattaactttcactagagttttccttctcaactattttataaaaccttgtttagcaaatgaactaaatttctatatattctttcttccccacgcacattttctctctcatcaacttacaactaaattttggagacaaaaaaagtgtgcaaaacataggtgcaaatgtagtatgacaaaaaaaacattggaggatgaagttgtaaaccttttaggcacctccgatttgtatgtaatcaccaaaataaattcaatagaaattttggcatgacctcccctcttttttgaagaaattttgaagcttgctcgggcagctggaggaggaagaagacatatatatatataggggtgggactttagtcccggttggtagcaccaaccggggctaaagatcaccgggatctttagccccggt

SEQ ID NO: 27470 - DNA, 23299 bp, Oryza sativa
atctttagtcccggttggtaacacaaaccgggactaaagatcaaatacgcccgttacccttttgaaccgggactaaagatcatctttagccccggtttttattgcatccgggactattgtggaaatcggccgaccgacgaaagatggtttctccaccagtgtatgccgcttaatagctctgtcattcgagctgcatgaacaaacacaaaccttagattctctatacttatatttcatataactcttaacatttatttttgtagatataattatattttgtatataactatatcaattagcatatacgtatatttcggacccactatgatttagcagataagatgttttttcttttaattaatatgaaaatttctaacatccatagtgaatgtagtagcttgcttctaaactatgttaatctttacctattgtaaattcgacacgactgtcctcgatataaaatggcacgacttccgcgtccactgtacaatgaagcatcacaagtgaaaaattactcctcactttcacttgcaccaaagacaagcaaacaaaaacacttccactgctcatgcatacaggggtgactagtcgagctgtggaagccactttcactgcaccatgtctgactcagtctgtctcggtgagtgtcctagcctgctgtagctgtgtctagacactatttagatggaattaaaactttttagtctgtatcacatcgaatatttggatgctaattataaatattaaatgtagactagtaataaaactcattcaataaccctggactaattcgcaagacgaatctattgagcctaattaatccatgattagcctatgtgatgctacagtaaacatttatatcggagaatttatagaggaaatcggattttaaatttccagaaatagctctcatttatataattagttttataagtagtctatgtttactactataagttcatccgatatgatagggattgaagtttaaagtttagtccctcgatcagacaccctaaactagtgatagtagcaaagggcattatgggattttattatgttacagtgcatgtcagcacgtgtcatcttcaggcgtaaaccatatctacctggcgctaacaactctggccgctcccttcacatatcaatgcccgcgtgaatcttagcacggtcgtacggcagagattataggtacatatgaactcgagcactcgagctcaaatatgcattttcatatatatatatatatatacacacacacacacacacacatatggcaccatggtatgaaatacataaattcgttcaaattcttcaaaatttttaaattgtgagtacatacctagttataagtattcgatgcatatctatacatagcaacaaaacaactcaaattgaactttatttcacaatccaatattacatacctaactaattatatgttcggatgctatatacctagaatcaaaatctaacaaaaacaagttcaaattcagttcaaacttgctttgaactagttattagttaatgttcatacctaaatatttaaaaaaatttcatactcatttgaattgggtatatacttaatttgaatcatagtgcccggacaccatgaagcaccaaacaaattatttatatatatatatatatggaacaaatatgaaccaaggttcatatgaaccacagatctcagctgttcagatgttccaagatgtatgtccaagctgttcaaagttatcacaattgagtggtacttgggaaagagttaattacttaattgcttaagcagctcgctatggtacatatgtagaggggtgacaagtatggctatgttttgtcttgtcactgaactttttttgaccaagtagaacaggacattgcactgcttgctccataaataaagacatgacaagcttagtggatgtgattggggttgagtcaagagcattggtaagaataattttataaatttgtttctatttttgggtgagtgaatattgatagttaattagttgctataactgatttcgcatgtcagatgctattcttgaaactggctttttactaatcatatattagtgattttttaatgtattagtgttaacttggtcggattagcatatatatatatagtttttttaatctattagtgttaacttgctataactgatattttaatgctatatactggtttcgcatgtgaatattgtttcttttctcttgttatccatggaattttaatatacatgaccattttggaaataacacacatgtgatttttttaaatttggatagatgccaaggatatgatatcattttgcaacgtcatttttagacctcacttttcaaaatgatattttcgttgtatttcattttcggcgttaacaaattgtagtgtacgttattttctttgtcgattacgaaattatattttgcaatgtagcatatatatgtaaaaataaaaatcatgtgtttttatatttttaatatatgccaaatgatatatcatttttacaatgccatttttggatataagttatattgtaacttttcaccatgatacaacgaatctggtcaaaagctaatcatgctttttttagtcagatttatataatatttgtaacaattttttttgacattctgacctgcaactataattttttaccaaaaggtacattaccattaatgttttaaaatggaggggacgcagagttttttttttgtcgggattttttttgctgtaaaaaggtacacctgccgcatgtgcagccattacattttgcattcatatcgtgcatgtgtggggtcgccgtatagcagcctgagcaagggcaaaaattgagaacgcaacatgtacctatctaaccctgcaacacacagccgtatataggggctccatggggcaggtacatctttgattatggttaccagacataataaagccctagatgtactggaatatgtgtacacgtgtcgctcaaaggaatgaggtgcatatacacctcggttcacattatccaactcctactttattcatagacattcataacaagagggtaataagaaacatttatcacaaaaacatttatacatatataatatctcacatttaacccccaagaacttgaatgcacatacaacaaatagcttcacatacatcacagcttacatatatccataggacacaacctccctaatgcacacatcacaggttacatacacccgtaggccgaagcctctaatgtactccttggctgggcttgagctcacaaaatgcaaactgatccagccaaccttttgacgtgttttggtacagatcaccaaaacatgaaaaacaaatcaacgctaaggttcaaatccaaaatagtccaacatagcagcatagcctaggtaggagcaaccattgttaagttgaatatgaactccaagattgctttcatgaagagctatatcaggatgatagtgtattactacaaaaccatcataggaatcggtcttataggtgccagttcctttaaaaccgacacctattggtcatttcccatctccacacgctgaaaatgtaagaaccgacacctttaaggcactataggtgctggtttattagtaaaaaccggtaccaataatatattataggtgtcggttcttttaaaaaaccggcaactatacaaaacgagccgagcgtcgtatctcacctccttatctaatcccacccacatctggtccttatctactcgactctctcgcgctctctcactctcgcaactctctccctcccctttctctagcggcggctttccgacggaggctgctcggcggtggcggcaggcttccgaggcttgcggctgtccggcggaggcggtagctctcgctctcgcaactctcccctccccccctatgtcacgtctctctccctctcctctctctagcggcggctgcccgacagaggctgcccggcggaggtggcaacggtggtggctgcggcagccgcaccctccctcttccggatacggcggctggggaggcgacggtctcccgcggccagcggttgcccgacggaggcggcagaggcggcagccgcgccctcccctcccgtgggccgcggcgctccctttcgccagatccgtccccgacgtcttcacatgcgagtcctccaccaccgccatcccggcgacgctcaaggggaaggacatgacccaagggccccgtcgccgccgcatcatcctcaacgccgtcgactcaacgggttcgagtatgttctttttatctcgttcttgttctctttgtttaatttctctcaagttctcctgttcatatgtgtaccgagaacatgaggatttggatcagatgaacattataattaaatggatgtaggaattgttgttgttattgatgtcttctttggattttgattttggatgtggggatattgttctggatctgaggatgtggacgggatcacgggatggggattggggagggtttcggctcgattcaagctagttatggattcggctcgatttgatctggagttcttttttttttggctcgtgcagacaaaaaggtgtcggttctattttacctataggtgccagtaccagcaataggtgccgaccaattggtgccggacggaaaaccggcacctattgccagttcacaaccagcaccaatagggctttctgtactagtagtgatatgtaaaatgaaactttttgatggctgctttttgttgtaagtggaaggtagcattaattggacctaaataattctttttgtagacatggtgcttgatatccaaaagggtataacacccatagaacgtgagacagaacatcagacatgtgtttccataaaactcatgttctaacatgacaattaacatatatcaaattctgacaaaatataactatgacagtttatagttcatagttagcatcacaagatctttgatttattgcaaaataaatttactaagttccagtcctttctaatctgaaataagggaacatccttgtgatctaatcgtgctgtggatttatgataagttcactgaccttgacaataagggaaaaagacagatgttagaactttaagaggacttgtcgctgtaggtgagttgaactttgcaattgtggcagaccaccattgccgcatcctcgctagtgcagttacatcgaggacttggggggcgtggcttggtggacggcctcctgggtctccaagcgcattgtgccgccctttggacagaggaagagaacctcggtggctgtgaggggatgaacgacagaccagaaccctcggggtaggcatgaccaaatctagcgcctcctaggtttggggcagccagatccgattcctagctcccatacaatctccgggctagctggccctcctcgccattggtgatgatgtccttgcttgtgtgaggtgcggtggctttggcagaagagaagaggaagggccatgaggtgccgagtgttggacaccggtggcaagcatttctagcgaggattcatgtgagagggatatgttggaattagtgcatgggcctcagcccattcgaagattgattctttgaaaaatcaaaaaaagctcacctcatgggatggcatgtatagggagtttatgtcacgcccagaaatatacaccattttccaaacgctcagtgcattaatcctcgtcccaggaggtgaggtacacatagatattgttgattattacaagccaaactttattacatgggcgactctaggccctcacactcaaagataaacaaataaaacagcggaagaatacggaacagcagcagccacaggcactcgacagcggagcgaactagagatccaagcattcatcttcctcagatccatcctctggattatttttgtgagcaagagtgagtatcaccatcgtactcagcatgtcacaccggaaatgcaacaataatgcataggggaaacaaggaaatggctgttctaagaaacaataatgcaacaacagggtttatttgcataaagccatagtttaaacattttaataaggttaaagctcattttaaaacacgatcctgttctaagccaatattttaatatcatcaaggtctcatgagcctgcgaacctgccttaacccaggttaatttccacatgactacatgtcacgcccggaatttctatccaaaattccaaacgcttacatgtgtgtgaaccctcgtccaggaatcagccgaggcacacaataacaaattgataatagagtacaaatattactctaattaataagcgaataaaatgtcattacagatgtagataattcctctcaatcaataaagatctaagcagcggaaaataagataaacggcgcagacggctccacttcacaggcagcttgaccagggctacgcctaatcctccccaccatcagcatcactgtagaactcttcctctgatgaatgattgcaaggtgagtatatgacatactcagcaagccacgcagcaaatatgcaagtgcacgaggataacaaaggatggcatagtagggttcatttgcataaacagcatttagtaaatatttcagaatttaataaaatagttaataattaagcaatattaatccaacgctatacaacataccctgttgtataggcccaaccattctgaacaaccatcccggctgcacagttctatctccaaaccaggaatataccattccaaaccaagagctaatcaaattattaccagttatagcatcttttattatggtgagaagtgtgagactaatcacgaaaaacattgttagacccgcccatcaccgcgggcacggctattcgaatagttttactctggccagaggtgtaccactgtacccacaagacacagcctcaacatcatgtctaccatgcgccgcgatactggaaagtacccgaatagaggctgtgacaataccctctgcacaacacaactcaccacagtgcaccattcctggattataatcacccccttataaaacaaggcatggactccccagcgacctccgtgggcttatctccaccacttctcagtctggtgctccgcaatgaaccatgctatacaaaaggtaaagccgttgcccacgctggcttgtggttggcacggttaatgtttcacaaccgaaactcgtgaaccgatccttaattgtcatgagcacgactctcaaaaccatgtgctcataacccaccattatgaagttttagttggcaagtaattaattaaccaatcacgattgaccatcgtgaactaacaataagccatcattaaataatagtgaatcataagttatcccaatagtgtgctaatgtttctaagcatggctaagcaatcacatctaatatctagctgaaccaatatatatagcccaactagtcaagttaaaataacccaaggtatcaaggaataaaggaatcaagaacaaaaagggctataacaaacaataggttaattccacccaatgacattcgaaaataaatgcaatagttgaatagaaacaattgctttaaacgggatcaacatgctcaaagggttgtttgggatctgtgtgacttgcctttctggccttggaactcttcaaattcttctcctgcgaaaacggactctccggaaacgtcgaaatctaaacagaaaagagcaaaaacaccaaaacagcacataaacaagcatgaacagtacttgtggatatttttaacatgtagatctcaattttagaaaaatttagagacttgaaccaactaaatccgagctaagatgaattagttatgaatttttaaagattaaatcggattaaaacacctatatggattttaatggaattatgacgcaataatgaattatttttgaaaaggaaaagagatttattgcgtcagcggctagggtttgcggtggaccgggcgcacggcagcggttcacgggaacggacggccgagatcgatcttatccaaaacgaacggccgagatcaaccgatccacggccgggccacggcggacggtcccgatgacgtcagcggcgacgtcatctccggcggcggctcgggagcgcaagctcgccggcgaacgacggcgctacggcacaaacggagggcaccaggacgtagagcgcggcgcggtgaactcaccgatgaccaaaacgacggcggaagatgaacggacggcggcggcgtcgaggaaaaggcggcggagtccttcggcttgacgacgacggcgatgctccgtcagtctacagcggcggcgaaagggcggacgaggacggcgacgcgacggtgaccacgatggtgaccttcccgagcgacggcgacggctggagcgacggcgaagcacggctggagcgacggcgacgacggcggctcgaggttacacggcgctggggcgcttccgacggcgagagacgaaggcgagggtggcggcgggtagcggcggacttggggatccttttataggggcaagaaggcggcggcgaaggcccacggcgaccggcgatgcgaaggaaaggttagggttcagaggaaagagaccgatccacggatttccaaagcgatttagacgatgattccaaaagagaaaaggtagagaagatcccgaagatcgtttcccctctattgatttcaccggagaaggaaagacgcggccgaatttggaaagagacggcggcacggctcgactaggattcgggcggcggtggctggaggtagacgacgggtccgacaggtgggacccacctgtcagcgactgaacgcgcgcgcgcggtggctgcggactgggccgagttgggccggggagagagagaaggttttgggccgactttcggcccaaagccaaaagagacttttaaaaacctttttcaatttaaattattcatgaaatgaaattccatttattaaaaatacttccttagctcaaataaattccagaaaaatctaggaattatagaattaagcaaagtatttaatgaaattttatctggccccattttatattggaatttattaattaaagattagatcttctcttctaggctttttttaaaaaataaattctaataattccaattaaataacaatttatatattttggatttttagggtgtgacactacaccatcatgacttcaccctcccaaggtttgaaaaaacaagactaacttttggtacattgctcagcttgcccataaccgagggtgcggatattcgaatagttttgaactctgatcagaggtgtacaactttgcccataacctcaacacgtgttgccacgtgccgggtaccaccacggtactcggatagaggtcgtgacaagactatacatctaggactacccaaaacaggagaacccgctgaggtttcgttgcccaccggtccccgatgaggagacaggccctcccttgcatcgggtgaaaatcggccttaatcctggccccacacccttccaaccaatggtatctcttttgagaagatctaaactttcagtcaggccttacccactagacttgtgattacaagaagatgccttgcaacagaggcccgcagaccggtccttatattagccgtggtgcgactaccaaagtaactagcttgcaccccgagcctagcccaaaaataagttttagttacacaaaacattttatcccccatctattgacaaaccagtcaatagttaataactaaaccagttttaattgttaaccaacatagtctagtttatccaaaagttctaggttggaactaagcacaataagcatttacctaaagcaacttgtcagtccatcatgtagagtactagactagtcaggttataattttactagggttcacaaagatcatggatatcaaatcaacatcatggccataacaaagagcataggaattgttgtcgaaaggacaaccgcatacgtcgaaagacgtggttactctacagtggttggaaaacagttatagtatattaaattgagattttttcttagggatcccccttttatatggccctataggtctatttatacccttgttacaggcctccccattagggtttaggttttacaggggaatttacatggttgcccttatgaaagggacatttatatgggtatacagtgtaattgaggtacatgggcctctagtgggcctgctggcgaacgctggcccaacggcccccgggctcgatcgactgagatagcctcttgggcctccatgaaactggacttgccatggcgaagccattcgccttcgccacacagccttcgcccaagagcccagagaacagataactttcgtctggtcatttacccttcgccgccccctcaagcctttttttgagcgcctcgagaatcttgccattcgtgcgatctgccgccccatttgactgcgggtgcgcgatcgaagcgaacttgatttccagatttagcccttcgcacatttctctgaatttgttagagtcgaattgcttgccattgtcggtgatgaattcttttggtattccgaaacagcaaacaatgttcttccatacgaacttctgtactgctgccaaagtgatcgccccgagtggttcggcctcgatccatagggagaagtattcaatggctacaattgcgaacttgtacccgttttgcgccacagggaacgggccgatgatgtctagcccccatctggcgaaaggccagattggtgcgataggctgcagctcgtattggggcgcggtttggctttggccatggcactgatagctttcgcacctcttgacttgctcgacatagactttcagcatggtgggccagtatacaccctgtcgaaacacttttgaggcaattgttcttgtggcctggtgtgcgccgcagagcccctggtgtatttccttcgccatttcctcaccttcggcaaaggagatgtagcgaagcaaaggttggagcaccccggagtgatatagctggcccgagacaagcttgtactttgcggctctgagctgaaggcgcttcgcttctgcttcatcttctgagggctagccgttcgagaggtactttacgaacggggttcgccagtcctctgggtcttcacctagctctgcctagtcgattgccatgatgtctgtgctctctatgggcacacttggtgcgtacaggacctcaaaaaagatgcctggcgaatgcgggcctccacaagcagcagatttcgccagggcatctgcttcctcgttctggcctctaggtaagtgttcgaccgttatgccggtgaagcacttttccatagaccagacagcctccagatacctcttcattccttcttcttttgcctcaaaggatttgtcaacatgacttgccacaaatttggagtcagtccggatgagtaagcgccgaacccccaatgctttcgccttttttaggccccgcagtatagcttcgtactctgccgcgttgttggttgtgttgaactgcagccttgcggcgtatcgaatcggtacgccccctggcgaagtgagcactgccgcagcgcccgcccccttgtgcgaccacgagccgtcggagtacatcacccaaggttgttcgacaggctcaggttcaagggcgaatgccgatgtccattcggctacgaaatcagctagtacttgggacttgatggcagtgcgggcgacaaaatgcaagtcgaagggagataattccgccacccacttgctaagctagccagtaatttccttgccccggagcacttcgcccaaagggtactgcgatggaccgtgactttgtgggcctgaaagtagtgtttaagcttgcgcgaagccatcactagggcgtaagcaagcttctccatttcaatgtatcttatcttcgccccttgcaatgcttcggagatgaaatacactggtttctggcctgactctgtttcttggacgagtgctgcactgaccgccaccggcgaagctgctagatacagtagcaattcgcttcctggtgctgggctgatcaaagcaggtgtgctctgcagatattgcttcagctcgtcgaacactgcttggcattcgggtgtccaggtgaacttttccgctccccggagggtcttgaagaaaggcaagcctctttcgaccgcttttgagaggaattgactgagtgccgcaatttggcctgcgagctttttgtacttcgcgtacgctcgacgggggcttcatttgctaaatggcatcgattttctcggggttcgcctcgatacccctttcagaaacgagggaacccaacaacttgcccgcgcgaacaccaaagacacacttgtcaagatttagtttcatacccgcagtgcgtaagttgtcgaaggtctcctgcaagtcggacgcatggtcgaaagccttgcggctttttacgacgatatcgtcgacataagcctccacatttcgccccaactgcttgtaaaggatcttgtacaccagcctggcgaaggttgccccggcgttcctcaggccaaagggcatcctgaggtggcaataggtgccgaatagtgtgatgaaggctgtcttggggatgtcggccggattcatgtggatctggtggtagccggagtacgcatccaaaaagctcatgagtttgcagccaactgtcgaatccacgagttggtcgatccgtggcaaggggaaatcgtcgttcgggtacgctttgttgaggcctgtgaaatcgacacacatgcgccatttgccgttcgatttctgcaccagtaccgaattcgccagccactcggggttgttgatctcctggatcaccccagcctagagcagcttttggacttcggcttttgctgcttcttggagatcagcggacatcttgcgcagcttctgtttccttggcttggcatccggtttgactgctaggtgatgcataatgaggtttgtcgaaacacctcccacctcgtcggggccccaggtgaggatatcaatgtttttcttaagcacctccatgatgttctcaacttctctttcacctatgtcgcccccagcgatacaagccttgcgggatcggcgtcgtcgacctgcgggcttcggcgcgtgcttcgcccgatcatgcggttcggcctcaacattgtgcactgctctgttgatcacggccaaatcgccctttgatgtagttgaaggttgaagccccttgaccacgattgaccacgatcactcctgcagggccaggcatcttgagcttgagatagttgtggtgggagatgtcttcgaacttgttcaaggttgcacggccgaagatggcattatagttgtatgggatgtcgacaacgtcgaacaatatttgctcttcgcgcctgttgtcacctgtgccgaaggctaccaccagctgtacttggccttgtacttgaactgcttctccgccaaaaccgcgaagcgaggccggtgcttgggtgagggctagcgctggcaagcccatcttgttatatgcttcggtgaaaatgacatcggccgaactttgaaaccagctacctcggccgagatcaccagtgggtcttgatatgggaacagcactccttcggcatcttctggcccgaaagagatctgctggctaaggtatcgcggggccccttcgcccgccgaagtgatgttgtgcaccattcacagctgcatcttcttttgtcgttttgacggttgattcggcgggttggcccttgtaattacttggattactctgcgttgcccatcttggcgctgttcggccggaggtgcttgttcttgagcagcttcgcgaggtgcttcgacgactgcaccttgttgcagccttggatcttgtacattgccacgctgccgaatgtttcggtattgctcggtggtgtgcgaagagcgtccgtggaaggcgcagtaaaggtcttttctaaccttcttgcgaacgggctgctgatagctgcttgtttgttgggcgtcgaactccttacgaagggcttgaatttcttcgacagccatcacagccttgcctgcacggtcagttctaaatttcctccaagtcatgggagcttgacttggccttggcggttgtccttggatcgccggctgagattggtgaacggcgagaggagctggttcggcgacctgtgcttgtacttgggcttgagcagcggcgactgaggccttatcatactcggcttggatcgcttgccgccgcttggaatcctcttcgccccttgcgtacccatcaatgatgcgaagcaggtgctcgagtgtctacggctccttgttagtaattttgcctttgagcagcccgaccgaagcggcgttgatgacggacgcttcagttatgtcctgcacttgacatcgggcttacgagaagcgacgcatgtactcccttatcgactcccccggcctctggcgaatgccgagtagatattgctgcgtcttcggctcctcgtaggtgcctcgaaagttaaggacaaagacatcgcgcagttgctcccatgagtaaatgctgttagctggtaaattgaagtatcaagaacgagcaatgccgtctagaacgagatgtattaccttcgccttggtattttcgtcgccatgagcggcttcaatcgcggactcgtagatggacaggaactcctttgggtccgtttcgcccgagtaccgcaggacgggtgggaacttgaactgtggtgggattggacgaatattgattcccccactcagtggtagcctcttttcgcccccagccttgttcgcggcaccctgctacagatatggcgtggcgaagggcgaagtcatggcttgtgtgtgaggttgggccacagtgctcagctgccctgctccgaacagtgacgcttggtgcgccaccatggatgaaccgaacgattgctgggtccatgccatggcgacctgctttggcgcctgatttgctccgaagcctggtgtcggtgcctgtgattgaatggttggtgcttgagcagcgttgctgaaattgaattgtggtccttgactccaaggcgaagtgtcacgcccagaaaattagccctaaatttccagactattttgtgtattaaatccctgtccaggaccagccagggtacacaaaacgacaagtaatatacagttccaaacgtaaataaagcataaaatacttacagaagaggcacttagtcctcacaccgaaagagaacgacagcagcggaaaaaggcgatcctagcggggcttcagctccactccacaggaaaaactcaactggggtctgagccttggtcttctaacttcgtcttcagctcagaagcactacacttctgaaaaaggggaataatagcaaggctgagtacaaccactgtactcagcaagccacaccaatgatgcagacgtgcaaagggaatccaaggacgccttgcggctatttgcataaaggcggttgtaaaacattttattgagcaaaacagtaaaacagttgagtaattaaggtaagattaaatctccactggtcaacgctacaccacgttgaacaggcccaaccaacccacctgaactacagtgcattgggtcgatttattaagtgtgagactaatcacggtgaatatggtcgatcgcccataaccgcgggcacggctattcgaatagttttactctggccagaggtgcacaactgtacccacaaaacacagtccaccggcatgtcaccatgcctgcgcacacacatcaccatgtcgagtgattgtgacaagactatccgcataaccctcccctaaccatccacaccacgctaaggtttcacccccacccctcaaaaggcagtgggcagtcccctcttgcaccgcggtgaatccagcaactggacaaccggacaccccggccgacccaactccatcatgcccacccttgccaccggtgcttaggaaagggtcgagctatacttcagatcaagcagttacccactcctgcttgtgataagcactgttagtcttccagggtttcccgtgaaccggtccttaattgccatgggtgcaactcgcaaaaccatgcacccacagcccaccattcagtcgcattttagttggataattacgaccatgaaccatggccagatgtctcgagcacgcagctcgtaaagatgctagatgtctaaaactgtaattatcccatcaactgagctagtggttattaagcatggctaagcataaagttctagctaggtcacataagtaacacaagctagtcgatttatcacccaaggttgacaaaggacatatatcaagtaaacattgcacaagcgagcagataggtaaaccctgatcccatgtaattagcaaaacatgcatatttatttgcaaacggtaaaacatttataaattaggatcaacatgctcaagggggaatgtgtgacttgccttgcttcttcactttgatcttctaaactctttttctcgcgactgcgaacttccgaaacaacggattctacacgctggcacacaaaacgaggaaaaactctaataaaaaccaagaaaacagtacataaaaagtaaaaaatcatgtagagctcacttttatatgaattttgcaagttgaatggcccaattcggagttcaaatgaattagatatgaattttacaagttttgagccattttaatggatttctagaattaaaccgaattattgcgcaataattatttattttctcaaaggaaatagggagatgctgacgtcagcaaggggcgccggcgccgacaggcgggcccaacgcgtcagcgggaccaagggggctggcgcacgatggaccaggtccacgcgtggcctcgggcgcgcgtccaccacgtggacggcccaggtcggcccaagccgatcgggcggctgagcagagcggcggccaggccacgggcgcggccgagactgacccggccggccatggcacggcggctacgcgcacgcgcccggacgaccgccggcgacggcagcgcgtcgcggcgatgggcacggggagcggcggatggggaaaaaggagagggggcggtggggattctcaccgaggacggcgacggcgagacgaccacggggaggcggccggcggcggaaaatatggcggcgaccggcacgggaggcgacgggaacggcgttccgacgacgcccgaccacggcggagccacggccgagggccggcaagacctagggaaaatattggagcggttagggagagaaataggtgaccggagcggcgagaagaggccgctggaggcggtagaggtggtggtggctcgggttggcggcggaaacggggctccggtgatggtttggggatttggagtggcggccggtgtgcggggcagcgcggcgaagccgagggtggcggcggatttgtgtggcgatggctgaggcggcgaggagcagtggtttgaggcgacaacggcggtggtggagctcgggtcgacggtggaagcagtcctcgggcgacggaatggacgggtggagtggcggccggggcgtggcacaacgcggcgaacccgaaggcggcatcggcgcggtgcggcagcggctagagtggcgatggcaggcggctggaggaggtggaaggggcggcggctcggtttcatggtggagatggagttccgacgatggaatggggaaatggagtggaggccgaggcacgacgaggcactgctaagctggcggtgcaagcggagcggcgcggcagtggctagtgcggcggctagaggcggctggagctcgccggagagcggcggcgtgtgggctcggtgcggggagagcaagggagggctcggcggcttgggaaaaatggaggaaacggatgaggggaggccggggattttttttataggggagggaaggcgggatcgagcccgagagaggtagaaaccggccggcgacgtggagctcgacgtgggggtggcggcggcggttcggcgccgattccgtgaggagagtgggggaagtgggggaggaggaggtggggatcaagtccacgctcccgcgagacggggtggggcgcgggaggcgcggcgtcgtggggtggaaccggcggccatggcggttgcagccggccggatggaggtagggggagaagctgacgagtgggccctacggtcccacttgtcggccggagtgagagggaggaggctgagggggacgtgaagtggacttttgcaaggggaaaggggaacgggccgacggcccaagaatggagggggaaggccggcctggcctgggaaggagggggaagggattgggctaagcccaaggaaagaggggagggattttatttgtttttcatttaatttaattggtttaaatgaacttattattattataattacttctcgagctccgaaaatttgcaggaaaatattagagaatattttagggcacagaaaatattacaaaatattctcgaccaatgatttttaaaggaaattttttaatttccccattatttcacttgattaaattgatttatcttttatttaatttatagacatgcattattaatttatttttaatcccgaacgaaaatcggggcgttacacgaagcccccggaccgggctggttcgacggcaaccaactgggtgcaccttgacttgtactcccctctggtcgggccgaaggggttgtgcctgaaatgttatggggttggctgagttgctaaaggaaagcttgaagctgcgcctgcagagccgaagtcccttccgccattgcttgtggcatttggttgggtggtgaaggttgtacttgggcagcgactggccgaacttgtgactgttatgagggaacgggtgtactgttgcggccgaaggctgcccggcgatgtacactggcgcttgcatggcttgcggcggaagggtctagattgatgcttgcgggtggacttggggtggaatgtagcccaccgaatacggaaggattggggccgaagcgaccttggcttgccgcgctgcctcgtacgcctgctgttgttcttgcatctggcggagcatgtcttggagtcgcgtcaagttctggcgcatggcctccatgtcggcttcagtttgtgcttcgaggttggggttgacttgtgcggcggcgagcgcggtccaagccgtcgccggctgcgacggagcagcttggggtaccagtagctggcttgtcgaaaggatctccgccctggtctggagcgccctcgccgccgcggctgccttcgctgcgtcgaccgtgttcggcaccagccccgacgaagtggctggagcggaaggtggcttcgccctgacagactcgacgtcttgggctcgagcccccactggttggcccggtttcggcaggtccggtcgaagggtctcatgacatgccgccaacacgaataactaataaaacaatataaataatgaacgatataatttataaagcaatgcaatacaagtaaaaaacataattttcacaatatgggattcaacatgttcaagatagatatgacttgccttgatcactcacaaaatcttcggcatcaacggcgatgaacagctgatctatcggaatggcaggatttacacgaccaacgcgaagaaatagaaaaatgcttataaaaaccacatgaacagaagcaataaagcacataaatgggttctatgcatttttaggagaaattagagatttgaacgggtcgattctgagttcaaacggtcaagatatggccatttgaagtttaggtgttgtttaaatggaaatttgcaattttgtgaattatttttctaaaggaaattagaattattgcatcagcgatgagagagggtgcgcgtgaatcgggtccacgggatgggtcccacctgctagatgcatggtccaccgtgagacgagaacaccgagacgactcacggtgtactggcgcacaggcacagccagccagagcggcacccggcgacgaccaacggcgcggcggcagtgcaacggagcacgggaagataaaaacggaaagtggaggaggtgacggttctcaccgagcagacgtgggggcgagaggtcgaccgagatgccgatggcgagggagaaacagcgagaagcttcggattacagtttaggtttgatgaaaataaatcttgatgaattttaattgttggaggctcttttaggcttttaaaatttctagaaatgcatttaagcacgatttaaatttagggcgattttcaaggcgttgcagctcagtaccaccttgtagagggagacctccttataagggagattgctctcctagccactttaaacatgtgaggtggagagaaaaggggaacacatgtgtgcgattgcggcgtgtacacgacatacacgtcgaatggtccaccaaaattggttcctcacccatgcgcacatgcgctctccttttgccgttttgttttgctgcaggaaattcggttttgtttctggaaacacaccaaataatccggtgtgtggagcggcatggactctggataagatacgcgcgacatatccgatttggttacgcggagtggagatcatgcaggcgccctaatcaagtgtcttgatatctctatataaatcgagctgccacctccatgcaacacatgagaaattaatctagggtttgcttcctcctctgtaatgcgtcatcgcttgtagtctaatccatcccacccgccggcgtgcactgatgatcgggagagtatgtctccgaaaccttcgcattcgacgtcttgaaccggtagaaggcggcaataagatttttgataagcgctttgcgtgactgcttgctatttgtccacgacagctcatcttcctcttccctagagtattgcgcgtcatcatcaacactcggtactgtgagttcttcttgctgtgcagccgctcatccaaaaccctcagtacacattcaatatttttcgcatattcgatctgtttatggcttattgtctagtttacaagtgtagattgtatgatgtgattatgctagtttacatctacaatggcatgatttatttctggaagaaattaaatcattatgtgcttatatattcaacaatccaaaaaccttactataggtattgtggttttactatggctggttttgctgatgcactgaggtcagacaaatgcaccagtgtgcacttcatgagatggcagatcaaggtcactctgtggttgatggctatgaaatgcttctaggttagtaatggcaaacctgaaggagttctcactactgaaaagcagaaagaattcgaggaggccactactctctttgtgggatgcctttttaacgttcttggcgaccgtctggtctacgtttatatgcacatgactgacactaaggagttgttggatgcaatgaataccaaattcggtgctactgatgctagcaatgatatgtatgtcatggagcagtttcttgactacagaatggttgacaaccattctgtagttgagtaggctcatgaaatacataccatggctaaggaactcgaactccttaagtgtgtcttacccgacaaatttgtggccgggtgcattattgtgaaactatctccctcttggagatgtttcagtactgcactcaaacacaaaagacaggaatactccgtcgaggggttgattgcatctcttgatgttgaggagaaagttcgggaaaaagatgccgcgtctaagggcgatggtgggcagtctagtgccaatgttgtgcacaaaggtccaaaacaagtacaaagagaaatacaaacctcagcagagcaccaacttcaagaaaagaaaacgaagaatagcagtccaaaccaggatgagagaactagctttgtgtgtgaattgcattgtcatctagaagtgtccacaacgcaagggatgatggcacctgtagggcagtcttctaaatctgccaatgtgacaattgacaacactggagatagaagcaggtatggtaatttacctacagtttttttagttgatcgtatactaactggtggattgatacaggggctaatgcacatgtttgtgctgacatctcgcagttttcttcttatcagatcacacaagattctaccgtcctaatggggaataggtcacatgcttctgttcatggtgttggcatggtacatctaaagtttacttgggaaagatcatgcagctgaagaacatgcagcatgtccctactatcaacaggaatctcgttagtggctcccgtctatatagatatggatttaagttggtgtttgagtctattaaagtagtcgtgtctaaaaatggatattttattggtaaaggctatgagtgccgaggcctgtttcgcttttccctttctaatttctgtaataaatctgtgaaccatatttgtggcagtgtggatgatgaggctaacgtttggcactcacatttatgtcatattaattttgacttgatgtctcagctttccagtatacgtttaattcctaagttctctattgtcaaaggttctaattgccatagttgtgtgcaatcaaagcaactttgcaagcctcacaaagctatcgaggagagaaacttggcatctctagaactcctatattcagatatttttgaaacgaatggggtcttgacaaagggtggaaaacaatatttcatgacgttgattaatgatgctactagattttgctatttgtatttgttgaaaatgaaagacgggctctagactatatttaaatttataaggcagaagttgaaaaccaacttgacagaaagataaaaagacttaggtctgatcatggtggatagtttttctcaaacgagtttgacttattctgtgaggaatatagcatcatacatgagaggacggatcactattcttccgagtctaatgggactgccaaaaggaagaaccacacactaactgacttggtgaatgccaagttggacaccgcgggactacctaaggcatggtggggggaggtattgttgacctcgaatcatgtgttaaatagagttcctaatagaaataaggaaaaaacaccatgcgggatatggattaggaaaaaaccatcactttcttacttgcggacatggggttgcttggcgaaaatcaatgtatcaacaacgaagaagcacaaacttagacctaagactgtggactatgtctttctgggatatgcttataacaacattgcttatagatttttaatagttaaattcgaggaacctgttatgcatgttggtacaattatggagactcgtcatgctaccttctttgagagattttttccaatgaaggatacacatagtacttctagccaatcctctgaaataattcacagttcaatcacaccaccagaacaaattgaacatacaaatgaacttgtcacttaggaggattatagtgaagctcctcagagaagtaa

SEQ ID NO: 27471 - DNA, 3159 bp, Oryza sativa
tttaccgagttcgacatgtatttcacttccgccttttcgattggtgcgactcctagcaattgatccgtagttagaccggtgtcagtaataaattgttctatcgtcatttctttaccggtcaccaatggctcgatctcctggtttggttgctctccaagctgagggactggtttggactttccagaagatgctttcttcagcgttcgctcatagtccgatagcttgatggcctccttgacagatgcagacatacccctgaagaagttcctgacactagggtctataggaatcttcttttctggacttcgagacttgaattgtctcttgacttctgatgcaatgtaagtgtcaagctcctcttgcgtgcaatcgtaccccgggtccttgttcttggcggcgtcaactttcgccttcttcgttgcccttgtgtgggcaggcgatggagctgggggggcccttgactttgaaggtgccggaagaggagcttgcggaggagtaggtgtaggagcccgaggaggagtcggtgcaggatcctgaggaggagtcggtgctggagcctgaggtggagacggtgctggcggagcatgaggaggagacggtgcaggatcctgaggaggagatggcggagccggaggagatggtgcacgagacgccgcttgtcgcccagggaggatgatgtaccgcttgcgccatagaataatggcgtggcttgtgtctcgtagatgcgtctcaccgtctcctccagggtaatccagctcgaggtcctcgtacgcgccttcgaccaactcaacttcgaccttcgagtatcctgctggaatcggcctgcagtggtaagtacctaaagggtccgttgggatggccatgcccgacgccaccttcatgttgtgagagattatttattagtaatcaacatatataagaagcaactagcggaatggctaaatcttagctttattgataagttcttgaaaggaatatgcagctcacatggtgtccgctgagtgatgtcatcaacgggacaggtcgattcgtcctgtgtttgcatggcgtccatgctctgtgatcctacctgccccgttgaggcgcagctgctacggtttcctgacgggctcaccattgcaggaggaatggtcggctggggatcatgggaccgatgtgcggccatgcgttcatcaaccttccttgccacctcctcttgcatgttgagttcgtagctcgatacccggaactctaggtctgcaatcttcgcctcggtatctctcttgctcctcatctgactcctgtacgtgtggatgtcctccttgaaaccaatcttccaaggaatcacccctttccctcgtgttcgtcctggatgctctggagtctgcagggcgagtgtcagctcgtccctatctctgtctggtcggaacgtgccctgagaggaggcttccactgcatctattagtcgtcgcgcagcctctcgtatctgatcgccgaagacagtgagccatcagctgggttgagcgttccaccgtgagcatagtaccagaacttcgatcgttccggccaattggctgttgccggttcgatacccctctcaatcaagctagcctccatctcttcccacttcggcatcgcgacgctatagcctcctgaccccaagtggtgatggtacttcttcttggcggcattttctttgtttctttccatcatcgcctgcccttgttcacctgtcttatatgcaacgaactcgtcccagtgatcccttagctttgggaatgtgtcgaagttcggtgtctgccccttcagtatatacttctggtacagatctcccttgaagctctgaaactgttctgccattttcttcagagtccaccttttcactttgtcctctgtacccgcaggaagggtgaatgtctcgagcattgtggtccacagcatctctttctccgaatctgggacaaagctctcatgatctccgcgtgcccttgttcttcgccagtacaccgtactgacaggcacgttatcccgcacaacccaaccgctgtgacgtacatagttcttggcggcttcggccggggcactaggacgtccatcttcttccacttccgttatgatgtgccgaccctcaagcttcttcgctgcacctcgttgcccgcgtgccctcttctgtccaacggagggttgactaccactagcctcctcctcctggttcccctccacatccctttccacgtgcccctgctggttcccctccgcatccctctccacgttcccttcctcgttcaagtactggtttggatcctcgttcccctcttctttattccagtactggctgcttccctccgcgattgtatcgtacaatatctgttcctcatcgcgggtcagccatctgttgatacaagaaacatttgctaagtcacgagacatttatgttttaacaatctaagtcatgtatgctaagtgtaaatgtcgtacattagaaccctacaaaaccttacgtgctaagtctaattacaaatcgtgatataagctaagtctatgtgacgtatattatacaaccctagctagtaaataattatatactaagtctaattacaaataaaataatcttatattaaaactcaaataatatgacatgctaagactaaaatagtcatgtatgctaagtgtttcgtgcgtatatgctaagtctaattaagactacaatagtcaattgctacttgtcacaccacttccgtagtcaataattacatactaagtctaattacaaatatagtaatcttatattaaaactcaaataatattacatgctaagactaaaatagtcatgtatgctaagtgtttcgtccgtatatgctaagtctaattaagactacaatagtcaattgctacttgtcgcaccacttccgtagtcaataattacatactaagtctaattacaaataaagtaatcttatattaaaactcaaataatattacatgctaagactaaaatagtcatgtatgctaagtgtttcgtgcgtatatgctaagtctaattaagactacaatagtcaattgctaggagtcgcaccaattccgtagtcaataatgtcatactaagtctaatttgcaataaaataatcttatattaaaactcaaataatattagaacactacacagtcttatatgataag

SEQ ID NO: 27472 - DNA, 4628 bp, Oryza sativa
tcgctctgttacggagtatctgcacgagttcaatcgtcttactcgttatgctccggaagatgtgcgcaatgatgaagagcgccaggagaagttcttggaaggacttaatgatgagctttcttacccactcatgactggagattattatgatttccagaagttagtggataaggctattcgccaggaggacaagtacaatcgcatggagcaaaagaaacgccggattgctcaattcaagacacaacaggggaataatcagaagccacgtcttactttaggaccccagtctatgccacagggaggttcttcgtctgttgttcgtccgcagcgtcagttcttcaacaacaatgctggcaacaacatccgcaatcaagctctacgtcctgttgcagtttcgacacagcaacaacctgccaagaaggagcaaggcagcaagcccgtggtgtgtttcaattgtggagacccaggacattacgctgacaagtgtccgaagccccgacgcgtgaaggttgtccctgcccagagcaactctaccgcaccagcatcaaaggcccgtgtcaatcatgttgctgctgcagaagctcaagatgctccagatgtgattttgggtacgttccttgttaactcagttcctgcaacagtgcttttcgattctggtgctacacattcattattatctatgagttttgcgggaaatcatgggatggaagtagaagatcttagacgtcctttgatggttagtaccccaagtaatcaagcactctctttgcaacgtagcccctctgtcagaatagaaattcaaggagtatcatttctggccaatcttatcctgttagaatccaaagaccttgatgtcatcctagggatggactggttagctagacataaaggtgtgatagactgtgccaatagaaaagtaactctcaccagcaatgatggtcgagttgtgactgttcatgcattgtcttctgagtctttaaggtcaagactgaaccagataactttggaagagattcctatagtccgggagtatcctgatgtgttcccagatgatttacctggtatgccgcctaaaagggatatagagttcagaatagatttggtaccaggaacaactctgatccataagagaccttatcgaatggcagccaatgagttggcagaagtcaaaaggcaagtagacgatttgcttcagaaaggatacatcagaccgagttcatctccatggggagctccggttatttttgtggaaaagaaagaccatacccagagaatgtgtgtggactatcgtgcactaaatgatgtgactatcaagaataagtatccactacccagaattgatgatttgtttgatcagcttaaaggtgccaccattttttccaagatagatcttcgatcagggtatcaccagttgagaatcaaagaggaagatatacctaagacaacttttaccactaggtatgggttgttcgaatgtactgtgatgtcttttggacttaccaatgcccctgctttctttatgaacttgatgaataaggtgtttatggaatacctagacaagtttgtggtggtctttattgatgacattcttatctactcccgaaccaaagaagagcatgaagaacatcttcgccttgcactagagaagttacgagaacatcaactgtatgctaagtttagcaagtgtgaattttggttgtccgaagtgaagttccttggtcacgtcatctcagcgggaggagttgccgttgatcctagtaatgtggaatccgtaaccaactggaaacaaccgaagacagtttcagagattcgcagtttcctaggcctcgcaggatattaccggaggtttatagagaatttttccaagattgctaagcccatgacacgactgcttcagaaagatgtgaagtacaagtggtcagaagaatgtgagcaaagttttcaagagttgaagaatcgcttgatatcagctcctattttgattttaccttatccaaagaagggtttccaagtgtattgcgatgcatccaaacttgggttaggttgtgttctgatgcaagatgggaaggtggttgcctatgcatctcgtcagttgcgtccgcatgagaagaactaccctactcatgatcttgagttagctgcagtagttcatgcgttgaagatttggcgtcattatcttttcggtactcgtacagaggtatataccgatcacaagagtttaaagtatatctttactcagtcggatctaaacatgagacaacggagatggttggaattaattaaggattatgacatgggaattcattatcacccgggaaaggctaatgttgtagcagacgctcttagcaggaaaggctattgcaatgctacggaaggacggcagttgccattggaattatgcaaggaatttgaaagattaaatttgggaattgtcagtagaggtttcattgcagccttagaagcgaagcccactctaattgatcaagttagagaagcccaaattaatgatcctgatattcaagagatcaagaagaatatgagaagaggaaaagctatcagtttcttggaagatgagcaaggaactgtatggttgggtgaaagaatctgcgtccccgacaacaaagatttaaaagatgcaattctgaaagaagctcatgataccttatactccattcaccctggtagtaccaagatgtaccaggatctcaaggaaagattttggtgggcaagtatgaagcgtgaaatcgcagaatacgtagcagtatgtgatgtttgtcagcgagtcaaggcagaacatcagaaacccgccgggttgttgcagcctttgaagattcctgaatggaaatgggaagaaatcggtatggattttatcactggtttacccagaacgtcatcaggccatgactctatttggataatagtcgacagacttaccaaagtggctcatttcatcccggtaaagacaacctattccggaagccggttagcggaattgtatatggccaggattgtgtgtttgcatggcgttcctaagaaaatagtgtctgatcgaggcagccagtttacttcaaatttttggaagaaacttcaggaagagatgggttctaagctgaactttagtactgcttatcatccgcaaacagacggacaaaccgaaagggtgaatcagattttggaagacatgttgcgagcttgtgctttagacttcggtggaagttgggataagaatctaccttatgcagaatttttgtataacaacagttatcaagctagtcttcagatggctccttacgaagcactgtatggtcggaagtgccgcactccgcttttgtgggatcaaacgggagaacgtcaggttttcgggacggatatcctaagggaagcagaagaaaaggtgaaaatcattcaagaaagattgcgtgtggctcagtctcgtcataagagttatgccgacaatcgccgcagagatttgagttttgaagaaggagattatgtgtatcttcgtgtcacgcctcttcgaggagttcatcgttttcacaccaaaggaaaattggcaccgcgttttgtgggaccttataagattatcagtagaagaggagaggttgcttatcagttggagttacctcaatctttggcaggagtccataatgtgttccatgtgtcgcaattgaaaaagtgtttaagggtacctaccgaagaagctaatcttgaacagatagaagtccaagagcatctgacctatgttgagaaaccaatccgtattttggaaatagatgagagaagaaccaggaatcgagttatccatttttgcaaagtccagtggagtaatcactcggaagaagaatcaacttgggaacgagaagatgaattgaagtcagctcatccgcatctattcgccagttcttccgaatctcgaggacgagattctgtttaaggggggtaggtttgtcacaccctgaaaattcaaaatatataaattgttgtttaaatggaatttttagaatttattttaaaagcctagaagagaagatctaattttaattaataaattccaatataaaatggggccagataaaatttcattaaatactttgcttaattctataattcgtagatttttctgggatttatttgagctaaggaagtatttttaataaatggaattgcatttaagaaataatttaaattgaaaaaggttttaaaagtcttcttttggctttgggccgaaagtcggcccaaaaccgctctctctctcctcggcccagacggcccagtccgagccgccgctcttctctctctcccgctgacaggtgggccccacctgtcagggtcgtcgtcttcgtcgcgccgccgccgcccgaaaccgtagtttcgcgccgccgccgttcctttccaaatccggccgctcatttccttctccggccgaattgaaagaggggaaatgatccccgagatctcctctaccttttctcctttggaaacatcggctaaatcggtttggaaatcgatggattcgagttcgaatcggatcagcttttctctctgcgagctcgagcttttcatctcgtcgccaggcggcgtgggccttcggcggcgccttctaacccctttaaaaggaccccccgtgt

SEQ ID NO: 27473 - DNA, 16087 bp, Oryza sativa
agctctacatatttggtagtactatagctgtaccgtaactactacatgttctatgttactacaatttcattaggacattactgtcaaaagtgcagtaacattctatatattttacagtaacgcggtgtgttactgcacttttacggtagtgttactactggaacatagtaacatgttatgaaatttttttataacatacctactttgttctatggtggtaatgaaagatataagaatcggttatcatatttctttatcgcaaagtaagatgcaaaagaaataagtaataatccttaaaactaaacgtgccatggggtgaattggttagaagaacatgttatgaattaagagatcatgggttaaagtattgaattcactaatttatttttttattttttaggaagagaaaaaaggaggattgttcgagggagagaaaaaaaacgagggaagggatggagaaagggagtcggtgccaggaggaggaagggagaggagagggcgccggggaagggagggattgggggtgggcaccgggagaagggatgagagggagagagagcgagagggcgctgggagaagggaggggaagggagtgcgtgccgggagaagcaagggagagggagaggtgccgagaggagagaggatgcgcgtgtgggaagagtggtggggaggatgcgggggaagggtgggcctgatccagatagagagggggtgtagagagaagagatgtggactacaaaattgtaaatagccatagtacggatttcaagacgctgtgtgtattgagaggggagactagatattaatggtgtagtcagtatgaaatgctggattgatcaaagcctactaagggtttattcggttgaaaggatttttaaatcacaagaatagaaaaagtaacggattcggatgccacatatactccaatccataggattttttctaagaagtcttacctcatgctaaagataatgtagaataaggttttaaaactatgatccttaggaatttggtagaatctattcctatgaaacaaatgttgcatagagaaaaaaatcatatggtttcgattcctgtaataattctttgaaaatcctttgaaccgaataaagtccagttatgtccttatgttagagtattaggtgtatgtgtaagttaggtcatatttaacataacttatgttagagtattaggtgtatgtgtaagttaggtcatatttaggaagtttaagattttgagaaataattggttagtagacaacttttgagtatccgaagaaacttggaaaaccatccagtttcaggcttatactctcttcatccaaaagtccagtacgtatattttttttgaaaattaagtctatggtctttgctgtgagatacccaaagaacacgtatttatttgataccataaaaatatgatagtgagctgctggacatccgacgtattattttattatatccagtcaataaggagaaggacagataaacttagataaaaggaaaggttgcccttggggtcatcttgtttaacctgacctaggaccagttcgaaccagacccttgccagtctcagcccggggatagtgcagcggtaagctaggtcatcaacggcggcgagatgtggtgacagcggattcaaatggcgctggcggattataacagcggggctggtgggtttgatcatggtggattcgagcggtggggagcgacggcagattcaaaggagatcgaggggaggcggccggacggcggcagtcggtggaggccagcgctgctgggtggatttttttttcttttttccttaatgtatgattcaatctgtgttaaatgattcgatttggttgaatgtgtggttcgatctgtgttattgttgtgaatgattttgagaatgaatatgttgctgtaaatgatttaggatgaactattgctgcgagtgatctgggatgaactatattgctgtgaatgatctgagataacatgtgtgagatatacaaaatagaaaaaaaaagaaaaaaaaaacttagtcccagttattttaacttaatcccagatttttactcccggttagaaaaccggaaatataaggggttaccaactgagagtaaaatacatttctccaccagtggcagcttcctcatgtttgtccgtccgtccgttccggcggtagagcacctgcattcgtggaggctcgccgaagccgtacgagcttgtaatgcctaaatacgaatttaatcagggaaaaaatctggagggctcggcccatgacagtgctcccggtactgtactagctagtagtgcccatataattatcaacgcgattaacaaaattgtaatctagtttgtgctaataaatactactatcactgcttagataacaatgtggttaatatttgtagttaattgtagtggcacgtatttactgaccgatgcgatggtgatagagagatactggtactagtgaacaaactcccctttacaagccgaccgactaagctaattaccacgctctttcttttcctaatcagggcaaaatggtagtttcgacgctctttctttctccatcttcatcagatataataaaataatacgttggatatccaacagctaattaccacgtttctatagtgtccatgacaagataaagttctttgggtgtctcccagcaaaaacacaaatttttagtgccctgttttttttcctggtgataaaacaaataagtcagacttttggatagagagaatagtttattttctgaattctatagccacagattatcaaaatatagatgagaacatggtttaccttatcgcgcggtaaccgtgtggttaacaccaagacacggtaacggtttttcgcaatatggtttggatgaatttgagcaaattgaaaattatgaaaaaatttgaaaaaaaatgaaaaaaaatcatggatgtagttattgatttagtggtagatggtgaaaaaattttctgaaattgagtaagataaattcaaatttaagggcaaaaccaaaaatagtttagaaattggaaaaagaaaaaatgtattagggttaagtcaaatactggaatacactgtgaaaggttgatgtttattgagatatgaagatttgtgaaacaggtgaaaggtttgctagtgacgctgaaaatggttttgtagagttgatatgttatttatttggtgagtagatatgctcaagtttgttgctcatgtgaaatatggtagtgatgtgcaagtatggattaaaacggagcggatatggacggataatgctcatgccatattcgttttcatcttttttaccggatacgaaaacgaatacgaatagctcgaatacggaaacaaatatggattatctcgaatacgaataagaatcaaatatgattggatacgaatacggaaataattttttctcggtacacgaaaaccaactcaacttctaatagaaacaaatatcaacatatataattagctcattttatataaagtaaagtataatttataaatattttttaaaaatttaaataatattaatagtatggactagtgttaagatattaactactattaaaatctataaaggtatattgaaggttatagatttagaaagaaatggggtatgtctcatggcttctgcggatatctgaatagcactgttcagcggatatccgaattattatccgtatctgacggaaaccccaataccatatccgtatccgtatccgtatccgataactattcgatccgaaaggtatccgtatctgtttttgtccagagcggacggaaactatctgcttcgttttcatccctatgtgcaagtaatgctaatttgtaattattatgctatgaaatattgaattgcttcgaagtacatataatatagaaaaggttatgccgattttttatattttacacccaacagttagatttgtaattatcctacatattcttccaataatccccaatttctacatatatttaagcattttcttgaatttatttttaatttcatgtgttctactacacaaccggcgaaccgcacgaatatcatggttatcaccaaaaaccgcgcggtaaccatgaaaccgctgattttttaaattcaaatttttagaggtgaattttacgcggttttcagcgattaccgtagtaacctcaaatcagtaaaggtatccctggataagaatctaatataattataacttctagaaaaagctgcaacaaccagaagttatttcaaacttagcctttagttggattgggatttgcatcaggtgcagtcacaacagtaacttgcaacttaagaagaagcagtatggcatcatcggatacaagccggacggcctagatctaacgtatcacaccgcactacagcagcaaatactgtagcatggagtactgttcacatggtcagtgtagctacggatctagctagaccgttgatcgtaaaaataaacggccgaagttgcttgcagttgttaagttgcgtaacttgcattcattgcacatgatccgaattcgttggattggtgattgccatgacctacatacagctgtaaggtgcactagtgcacgtcaacgtttgctggaggtgtggccaagtcaaataaaataagaagtcatgtcgtgaagtgtggatgagctagcagcatacgagtatatatatgtataaatatgttactggtgatcatatatattttttctattctaaaatataaaaggttttaggttgatatgacacattccagtataatgaatagtataatgaatctgaacaaactccctaccaccaggtgagtgtttattacttaccggagtaagtaacggttgtttgcacgtactagtctgtcctaaaaaaagccaaactctggctataaatctggacacacatgtgtccaggttcatagttaggattggacttttttcaggacggaggggtagataagtgtgttagtgggcaattaaccacgtgagtgttgtcggctaggtcctgctgcctgccagtcgttagataagccgttgcttgattggtgtgtgtgcctattaagataccccgcgttttactgtgcgatttataaatgtgtatatgttaaatatttttgaaatgatcaaagttaaaatgttgaaacaataatgtgagcaagataatttgacacatacttgttgatctctatataatataatattgtagatgatgtgtcatgtttgcatgggttttgttagtgagtgaagaagtggcatgcttgcatgggtttttaaatggactaaaatagtaattactagtgggtgatgatgtgatatgcttgcatgttgagttttagcttctaataattgttaatggtaccaactatatagaaagtataaattaagtatatgaaactatagattaagtatgtactgtaaatcatcttgttctgtgagtgagtgaaaaggaaaaaaaaaagcactggtgtgctgcagggtttaccttaccgccggggccagggttaccgcgccccggcggtaagcacggttaccgctcggtaaccgcggtaaccgtgaaaaaccgtacaaaaccgtgcaaaatttatcaaaaattcaaattattttttaaatttatttgtatttaaggaagttaccacggtatttatattaccgtacccccgcggtaagcccggtaaccgcggtaaccgcgcggttaccggcggtgagttaaaccctggtgtgctgtgcagcagcagaagaaaaagaagacctccattgtgtctgcgcttctctttcctgagccaaacacggtgtgttaatgtgtgggatcttaattcttaattgttcggacgaatttttgaataataagaataatcaaacgttataaaaaaaaattaaaacggtaaatattttggaacggtgggagtaattgtgagctgggccatggaggacagaagccagggggcggactggcagaggcaaaaggccggagacacgaggagatgggtggccggaggagttgcggagagacagcaaggggagcgaattttttttatttttaattttttttattaaaagttttacaaaaataattttctattttgaaaattgacggaagtagtcgcctaccgccctctgggaaggcgatttttaaaaatcgccctcctagagggcggcgaaaatgacgtggcagacggccgttcgctctcgggcgacggccgtcaacgaaatttgcaggcggcccccttgccgccctccgcgagggcgattttgtactgtgcggggggccgcctgcaaatgggcggcgaggggggcatggaattttgcaggcggcccccttgccgccctcggcgagggcgattttgtactgtgcggggggccgcctgcaaatgggcggcgagggggcatggaattttgcaggcggcccccttgccgccctccgcaagggcgattttgtactgtgctctatatttttgtataaatatcaatagttatcaaatctttttatattgaaaactatacaagattaaaatctccaagactggtaaaatacaattttattattttttagggcatatttggattgttaccgtacaaatattttgttaccgtacaaatattttattaatttttagggcatatttggattgttagtgccaaatttttcttcacgaccaaatatttggtaaggtaaaattgcatttgatcatatttggtttgctgccaaaatgtaaaattgtagtgaagaatgttctacataatctcaaatctagattacgtattaccaatgaataggcttccattttcgtgtgttgtgtgctagtgggaaagaagatatgaagaggttgccttcagattgtcaattatatagcgtcgttttcactgcaatatatgtgaactcaatgagatacattattcattagatgtgacaagacgatcacgcgtgggcgtgattcactttatgtaaacaggcagcgccgaaagttgatagtgataactcgagctgccgcttttcatgtgtgctgttgtggactatgcgcgctactggatctgacactaccgtgcagcgccgaaagtgtgttgtcgtgagcataagttgttctagcaccatatgaatgaaaagaactatgtagacgagacaaacacaagtagtactgcagtagtaatagcaaaagtagtactgctttacaagtttgtaagccaaaagaaacggtcacataaggactgaagaggtagaacactactgacgaggcctcttacccctgtccctcctaccctgcgccctaatgtgcccgtgggagtacgtgagtcggtccgggggtacggcacactctttgttcgatcatcaaccgatgtaaatgtatgtaggtcatagtacatattattattcctctgggcaatggtggctaacaaacgaggcaaattatcataagaagcttcaaatgtgccatacctcatctcaatgatcttttgtttggctctccaggcctttgcatagcttatggtgtacttgaatttgttctcgatgtgcctaataattgattttggttcaaagccaatgttaccaacaacactgctgtacatctcacttgccacaaaagctgaagtgatgtttcggtgatacttctccaccccttgtaagtagcacttgtgctcggtcacaatgctaactttccaataatcattccatttacccttatatgcatggacacgccacggacaatcttccttcatgcacctcacttcatacacataacttgttgacttgaccaccctaaactctctctgcaaggaaactgcccaatgcttcaccgccttcttcatctcatccttatgagcatatcttgcaccctcaattacctcgttctccttatactcccagggtacatgatcaccctctgatataacaagtccagagaagtcctcatttgcccaatcagtggccattacatcaccttcctcatcggatgatgcgtcgtcgtccacttcctcattatccgaatcttccctctccatttcatcaacaattataccgactctctccccctcatccgccatgcccatagcctgctcctcccttggttgattttcctcattttgcatcgatggtccaacaacatcccctgcattgataggaccctctacatcttcggtttgcattgaaacatttatatctttctcttgtaccgacacaaatataacgaggggccatgaccgttcaaaagccatttccacataccgtctccaagcatcagtgctgtccatcggcattagttcccaaaaataaccttctgttgcacgactcactacaactgacactgacattgtgtagacttcttggtctattctaaatcctctcaacaaccaactataaattgactgaaatgttctctccgcaggcctatcgatgcccttagatgtcattacaaaatctgacagatcaacaccatctggaccaaatctaatatttccttcaccgtgaactatctgaaatgtgaccttacttgacattgtgcctgatgaaaacaataactgcgttaacctcgcatttctgtactacgccctaagttacattctctacaatattgttctctaaatttctaaaattacgttacattctccagatcaaactaaactacatcttacaattaacactactgtctatgtctcaattcatactattatattctatgctctggatctacacatatgtgctgtgtgctacagatgtgctaaaatatatggaactaaaactaaaacgcaacatatatactcaaacataacatattagtacaaatgcacaaaagatgtatgggagcatacctgtgatgaattgagcgaaccagcagggcttcgccgctccccttctgctgccctcccctctctctcttttgttttttttggatttttagtgaatataatgaaatttcacagagaagggactgggctttatagggggagaggcaaaaatcgccctcccccagggcggcaagggggccgcctgcaaaattccatgccccctcgccgcccatttgcaggcggcccccccccacagtacaaaatcgccctagcggagggcggcaagggggccgcctgcaaaattccatgcccccctcgccgcccatttgcaggcggccccccccacagtacaaaatcgccctagctgagggcggcaagggggccgcctgcaaaattccatgccccccctcgccgccaatttgcaggcggccccccgcacagtataaaatcgccctagcggagggcggcaagggggccgcctgcaaatttcgttgacggccgtcgcccgagagcgaacggccgtctgccacgtcattttcgccgccctctgagagggcgattttctcccagagggcggtaggcgactccttccgtcaattttcaaaatggaaaattatttttgtaaaacttttaataaaaaaaattataaataaaaaaaattccaaggggagagacgtaacgaccgtcgtttcaacttcgtttctcactattacaaaaatcagttttacaaactgtcaaaagtgatttcacatgcggccaatgccaaccgcatgcacccaaaaatctgcgaaaatcagaccgcatgcaaaaacaaattctgtgaaagaaaattaaaaatggaaaaaacccggccgaaccctagcccgccgccattgtagacggatccgcgcggggcggcgccgctgctaccgcctgagccagcacccctgcgcatcagatgcgccgccggctgctggccccaccacctgccgtcgctgtcggatctgtcgtccccactgccctctgtcatcgtcggcatcacatccccgcgagggagggcccctatgctggatccgcgtgggacaggctactggcgccggttccaagccaaggaagcctgccgtcagccaatgtgcccgaggaagcccaccatcagctgcacccgaggaagcccaccgtacccatgtaagcccgctgctggccagctggcagcgccgcccatcacacccaaggccacccgccgtcggccagctgagggcccttggctgctttctcatcgtcgtcgtcgtcggcggtggcggcagtggtagtggtgccggggatggagccgcccgctcccgaccgcacgcctcctcatcgtcggcggcagcgctaccgcccgtcgctgcccactcaaagggagagagagattgagcagaggagagtgagacgagaggaggagaggagagaaagaaaaggtgaaaaaaatttgaagtggtgacgagagaaaaaaaagaggagatatttttgtatgcggatcacttaaggacctcacatgttggtggaggtgtggccaagtaaagtaaaaagtaccgcgagggaaaagaaaaacctccaccagtgtgcagtgccacaaaataactttcgtgtatgcgtttatcattcctaagccaaacaccgtatttgtgttagcactacttaaaaaagtttgttctggcggcactcttacacggtttatacggacgtggcttatagaaaaaaaccgcctacaacctagggctcataaaatcgtgggatttgcattaacaaaataccgactgctcatgggaggttctctcttaaaagacccgcccataaaagcgaatttttagtttttgattttatttttagggaaaagaaacctgattttttttttgtatttttagatctatttggggacccataattttacacgtaaaatataggatttgaacctagtaccttacacttaacatgtagtctccatatgactgtatcatctcacctatgaagcagttctgtgactatggggatgctgctattctttcaacttcacctcttacaaaagctgtaatatatattttatactccctctgttttatattgtaagactttctagcattgcccatatttatatagatgttaatgaatctagacacacacacatatatatatatgtgtattcattaacatatatatgaatatgggcaatgctagaaagtcttacattataaaacagagggagtataataaatgttaatctagacataatcttgtagattgcgccaacctatacaactttgatgtagaccatatgtcacaccctgaaaattcaaaatatataaattgttgtttaaatagaatttttagaatttattttaaaagcctagaagagaagatctaattttaattaataaattccaatataaaatggggccagataaaatttcattaaatactttgcttaattctataattcatagatttttctgggatttatttgagctaaggaagtatttttaataaatggaattgcatttaagaaataatttaaattgaaaaaggttttaaaagtcttcttttggctttgggccgaaagtcggcccaaaaccgctctctctctcctcggcccagccggcccagtccgagccgccgctcttctctctctcccgctgacaggtgggccccacctgtcagggtcgtcgtcttcgtagcgccgccgccgcccgaaaccctagtttcgcgccgccgccgttcccttccaaatccggccgctcctttccttctccggccgaattgaaagaggggaaatgatccccgagatctcctctaccttttctcctttggaaacatcggctaaatcggtttggaaatcgatggattcgagttcgaatcggatcagcttttctctctgcgagctcgagctttccatctcgtcgccagccgccgtgggccttcgccgccgcctcctagcccctttaaaaggacccccggtgtctcctctacccgccgccaccctcgcctttgcctctcgtcgtcggaaacgccctagcgccgtgtgccctagcgccgccgtcgccgccgtcgctccagccgtgcgccgccgccgttccagtcatcgtcgtcgctcgggaagaccgccgtcgtgctcgccaagtcgtcgccgtcctcgtccgccgcttcgccaccgtcggagaccgccggagcatcgtcgccgtcgtcaagccgaagagcgccgccgtttcaacctcgtcgccgtcgccgtccgttggtcttccgccgtcgctttggtcgccggtgagttcgtcgtgccgtccgctacccgttggtgccctccgttcgtgccgaagcgtcgccgttcgccggcgagcgtgcaccgcccgagccgccgagctgccgccgccggtggtgacgtcatcgctgacgtcatcggggccgttcgccgttcaccggttgtggaccgatcgatctcggccgtccgttttggatcaagtcgatctcggccgtccgttcgcgtgaaccgccgccgtgcgcccggtccaccgaaaccctagcccgctaacgcaataaatcctcttttccttttcaaaaataattcattattgcgtcataattcaattaaaatcaatttaagtgttttaatccgatttaatcttcaaaattcataactaattcatcttagctccgatttagttggttcaagtctctaaatttttctaaaattgagatctacatgttaaaaatatccacatgtactgttcatgcttgtttatgtgctgttttggtgattttgctcttttctgcttagattccgtcgtttccggagagtccgttttcgccggagaagagtttgaagagttccaaggccagcaaggcaagtcacacagatcccaaacaaccctttgagcatgttgatcccgtttaaagctattgtttcttttcaactattgcatttattttcgaatgttattgggtggaattaacctattcattgttatagcccttttgttcttgattactttattccttgataccttgggttattataatttgactagttgagctttatttatattggttcaactagatattagatataattgcttagccctgcttagaaacattagctcacttctgggataacttatgactcactattacttaatgatggcttaatgatagctcacgatggacaatcgtgattggttaattaattaatgtgccaactaaaacctggtaatggtgggttttgagcatatggttttgagagtcgtgctcatgacaattaaggaccggttcacgagtttcggttgtgaaacattaaccgtgccagccacaagccagcgtgggcaacggctttatcttttgtatagcatggttcattgcggggcaccagactgagaattggcggagataagcccacgggggtcgctgggagtccatgccttgtttttaagggggtgattatgatccaggaaggtgcgctgcggtggattgtgttatgcaaggggtattgtcacaactcctttccgaggtaccgtggtggtattgaggcacatggtgacatgatgtggggttgtgtcttgtgggtacagtggtacacctctgatcagagtaaaactattcgaatagccgtgcccgcggttatgggtgggtctaacaatgtctttcgtgattagtctcacccttctcaccatagtaaatgatgctataactggtaataatttgatcagctcctggtttggaatggtatattcctggtttggagatagaactgtgcagccgggatggttgttcagaatggttgggcctatacaacagggtatgttgtgtagcgttggattaatattgtttaatacttaactgttttattaaattctgaaatatttgctaaatgctgcttttgcaaaagaaaccctactatgccatcctttggtatccttgtgcacttgtatatttgctgcgtggcttgctgagtatgtcatatactcaccttgcaatcattcatcagaggaagagttctacaatgatgctgatggtgtagaggattaggtgtagccttggtcaagctgcctatggagtggagtcgtctgcgccgtttatcttatttttttccgctgcatagatctttattgattgagaggaactatctacctctgtaatgacattttattcgcttattaattagagtaataattgtactatattatcaatttgttattgtgtgcctcggctgattcctggacgagggttcacacacatgtaagcgtttggaattttggatagaaattccgggcgtgacaccatatctccatcctagctcatttgaaaaagtttaaaaaaattgttttgcaaaatagatccgggagtttataatgaatatttgggtccctaaataatattaaattaaaaaatatacaaatactaagatgtagatctcgttaactggtgctcctatttttcaagggaaattttcttaaagataactgttcgtgaaaatcaatttttacgggctttccatttccaaggataattttcttgaagaagtctggctataatgtataggtcaaaagcttgtaaggaatatttagacatctaatgatcgcatatataaaacctttcaactatataaagttgtagatcgtgtcaagatatacagttttactagacaacatgtctcccatccaacatcgtttggaaaactaaaatataatctcaaaaatagatgtgagggcaaataaatgaatatctgaactcgtaaacaatctcaaatgaagaaactttcaactacaattgtagatctcattgagagctacaattttcaatagagtttgtaatcatctgaggtcgtttcagaaaaataaaaataaaaatttctaagatagatccgagagagataaatgaatttttgagagaaatgacctggaagtacactggtggagaaatgctttttagtcccggttcgtaacccccctgtagtcccggttttccaaccgggactacgaatccgggactaaagatcgctatctttagtcccggttcaaataaccgggattaaaaatcgatctttagtcccggttggtaacaacaaccgggactaaagatcgagctgaccttttttttttttggcatggccctgttgctgcatggtttatatatatatatatatatatatatatatatatatataaaccatgcatatatatgtttcaatacatatatatgcatacatatatatatgtatatatatattatattatattatatgcatatacgtgcataatatatatgtatttatacatatatatgttatgcaaatgcatatatgtatatagatatatatatgaccaaaatatatttacattatagaaaatgtgtacacatgcatatagaaacatatgtagtcatgtattaattacaatacattatatgtcctagctagctacgatttcgacgtagtagtagtcgctgatagctcagaagctaaggaccggtgaattgtgtttccgtcgtagtagaattcacccttgggatcaaggatttcttcgttgatgaatcccatgagttgttcttgaaccactgcgataaattccttgtgtgtggtcaggttatccctcatgcgaataaactatatgaatgtatgaaattgattagtaattaaacaagaaatcgttacgtaatgaaattttgaatttatttgtacgtacatcgagctctcttgtggtgatgatttggtctgcaaggcagtggcaatactcacacacgtagtagccacacaagttagttccctgcttttgctttgcgcactacaaataaatgacaaattaacggcgtgagatctaattaatatacagttgtatgtattaatttgaatcggagaaatataaatgtagagcatgtgtactcacaggaaatttgaacttccgcctaagtctttctctctatttgccgcggaccaaatgacggaaccgataccaagccctacatggagtttaaagctatgattcgtagtagcaattaacataacaagattttcttaattaacagaggaacttatgacggtacctgtctataagttcaaaaaccttgtcaaacgtagactcttttttatccattgagtcatatacgttgacggtgcaggccgacaggtcgaagagtaaaagcacccagtggaatctgcaatgtgcgtggggtgcattacatatgaaacacttagcaagttcgtacgggaatgaaatttggtatgtaggaagacagtaaaattgaactaactctgtgttgtacggcaatagtatgaacgtcttgtaatgctgcgccttcaggagatggacgagattgtcctctgt

SEQ ID NO: 27474 - DNA, 2407 bp, Oryza sativa
agaatggttgggcctatacaacagggtatgttgtgtagcgttggattaatattgtttaatacttaactgttttattaaattctaaaatatttgctaaatgctgcttttgcaaaagaaaccctactatgccatcctttggtatccttgtgcacttggatatatgctgcgtggcttgctgagtatgtcatatactcaccttacaatcattcatcagtggaagagttctacaatgatgctgatggtgtggaggattaggtgtagccttggtcaagctgcctgtggagtggagtcgtctgcaccgtttatcttatttttttccgctgcatagatctttattgattgagaggaactatctacctctgtaatgacattttattcgcttattaattagagtaataattgtactctattatcaatttgttattgtgtgcctcggctgattcctggacgagggttcacacacatgtaagcgtttggaattttggatagaaattccgggcgtgacaagttggtatcagagcccccttgaccctaggttatgccaaatggttacccatagaagccctctaaaaatattggaaaagtagaactgttctcctccctttctcttttaattaaaccaaactaatggcacatgcacttcataatctcttttaatggttctcattcaaaatttatcccagtgttattagtactgtacatctattactgtactaatggctcattttccagcaaaagttttacaatgttattttatttaatcttgctgcaataaaataaatttagcaagttgattttataactttcttttatttcttttgaaacctgttattcaaaagtacaaaatttgtaaccatgtttccaactgtttcaacttatcttgcaagcttggtttactttatttacttacctttttactttgattttctaactttattcaaattaattcaaaaacttgtgctattaattggataaatgtcttaactccctcctttcacttgtctttagatgccgcgctacaagcctgagtatttgtttggtgttgagggatttgtccaggagttgcgtacgatgtcttttgtcattggatttgggactgcccctttttatgcccagattcctcatgatcgtcatgaagagaagtgccgagtcaaagtcaccttgaacagtaatagcgaagatattccctcagtgatgttcgaagctggaggaagaaactacatccatgcatgtcaggaggtggcaaggatcgccataggagagcttcgcgatcgctacagtgatcagttggccgacacggagtatcgctaccatcctcgccaaccccagggaagtgaccgtggcagataccttgagactgaaggaattgagaatgatgctaccacaaggcatttggttgagatgctgtgggctatggatgaaagccttgcggagactgtgttagcagctcaagatcgtgaagaccggaatcgtggtaagatttgcaagttagaggacaaggtggatcgtttggagaaggaattagctgcgttgaagggagaagcaccgccgcagaaggccaggattcgtcttaccgcaaggaagagagctttatttgttcctcactatcaattggcgccaaaggtttgtgtggtggagaaagaagttaccccagctctagcggatcctccggtcatcatcataagtgacgatgaagaagaagaatccaagcgcacccattccaagattgagtgggtagcaactcaagatgatgaagacgagccgaacgagccttcaatcgacctccgatgctcggaagaactagagtgacttgttaagtcgctgtcttagatcgttgtgttagcttgcttgttttaagtttggttgtgtgtgtctcgcatgtgatttacatcagtggtgggatgtaagtgcatgtgtttgtttgcttttgagtgttaggaagttggtgagtttagtggtgtgagagtcttcagttttgtaataatgaaactcagttaagatcaataaaagttaaagtaattctctgtcctaagtagtttcccccggtttctcctcttgtgccctgttcatgccagatggtgaacactcgtagcaacgggaatggccccagtaacaataacaacaacaatggagagaatcccacacttgctcaagttcttgctcaacagactcagttaatgaacatgatgatgcagcaacttcagaaccagcagaacccaagaaataaccatgcacttccccagaacacgttagcagaatttcttcgtgtgaggccgcctattttttctagtaccacagatcctgttgaagctgctgattggctgcataccatagagaataagttgaagtggcttcagtgcaccgaccaggagaaggtctcatttgcatcacacacgttgcatggcct

SEQ ID NO: 27475 - DNA, 517 bp, Oryza sativa
ctgcagcccgttttgacttgtgattatttgttgatgtgatgatttgatgatgtgatgatttgtgatttgtcatttgtcatttgtcatttgtcatttgtcatttgtgggatcggcttgacggctcgaagcatcgagctgatttttttttttggctcatgtgcgcttcaaaggtgccggttttgaaaccggcacctttaatctttcattatctgtgccgcctccatggtgccggatgggaaaaccggcacctaagggggtttcctaactggcaccgacttgggattctgtagtagtagtgatgtctcatcatgattgatattgacggatcgtggggcttctcaccgggagaccgtgcaggcccccctttgccggttcggccgggggcgcgaagtgaggttcttcaccctcgatctgtggaatgttcgcgagagagcaaatgcacgagacacgggcgatgtagacaggttagggccgctgacaagcgtaataccctactcctgtgttatggtggatctgt

SEQ ID NO: 27476 - DNA, 1225 bp, Oryza sativa
ctaaatgtctttaaatgctgtttactgcaaccctaaccctttatattataattcccttgtactcccttgcatttattctgcatttgtgggtgtgtcttgttgagtacggtggatgtactcagtcttgctcaatttttcccaagtccagaagaggagttccttgaagatgaaggctttggtgtctagctcgtgcctgctgtcaagcgcctgtggtcgtcgccctagtcttccgctgtttttcgtttgtctttgtgtgctgggccttcgctgcccgtgtaataattctatttacgcttccgcttgttaaactctgaattgtatcagcttttggtgtaccttgcctcctgggacaaggattaatgcacgcacgtcaggaacgcccgttgggttatttccggtcgtgacaagttggtatcagagccacccttgaccctaggacgagccgtagatcccaagccttagctatattttcaaaaataaaaatctttggttatttgtgaaaattgtctagtctctctctgccttgctgcttcatttatcgccaaaatctgatcttttaaatgttgttttctttttgtttttgtttgtagatggccggcagcgtcacccgtcgtggtttgcacatgactggcttcgtcttggagctgcggggcatgtgcgtggtcttggggtatccacatggagtggattaccaggccaggccgctcccggagcaggagggtgaggatgcagagccccacgctggttgggaggtcactgcagtgatcctctctggctctcccgagcggacttcgctggcagtcaccgcgggtggagattccttccccgccgcttgccagaacgccgccctcctcgccatcggcacccttcaccagcgctacccggacgagttgcagcactcgccctaccgctaccaccctcgtcgcggaggagcccgcgacttcgccaccttccgggatgctagctcggaggatgacgctaccatcgtgcacctggcacgcatggtggaggcgtacgacgcggctcgtatcgacttccatcagatggtgcgccgcggtatggtcgagaacaacatgaagatcctggagctgcggcaggagaacctgcagctcaagaaggacctcgacgcggtggaggcgcagctgcatcagctcaagatcgcccagggagaggtctgccgccccaagcgtcgccgcgtctgccgcagccagaagatcaccgcccg

SEQ ID NO: 27477 - DNA, 1746 bp, Oryza sativa
tgacccaatttaataccagtgataaatttaagaataatggtagtcgggggggaaaagtttaaattgtaagcccctcctctgtttgcgggttctgtgtggggttttcagatggtgacgaccaggagaaatgctgttaccggtgatggcaatcaacctgaaggcagcaaccacaaccaccagggcaacccacctccacctcttccttcggcctccgccaccaccaccagacaccaacgccattctcacccaaatcctcgcccagcaagccaacatgatgactactttcctccaccacctccaaaatccgccacaacagaatgctccacctccacctccccaacactctaaactcgccgagttcctccgcatccgcccacctaccttctctagctccaacaaccccgtggatgcgttggattggttgcatgccgtggggaaaaagctggacactgtgcagtgcagtgatgaagagaaagtcatcttcgccgcccaccagctgcagggacccgcatctctatggtgggaccacttccaagctacgcagccagagggacagcctattacatgggctcgcttcaccgccgctttccggagaacccatgtgcccgccggagtcgtggccctcaagaaaagggaattccgagagttgaagcaaggcaaccgctccgtgatggagtatttgcatgagttcaacaacctggcccgttacgctccggaggatgtgcgggaagatgaggagaagcaagagaagttcctggcaggaatggaccccgagctgtccgtccgtctagtctctggggactatccggatttccaacgtctggtggacaagagcatccgcttggaagccaagcacaaggaactggagtcgcacaagcgccgcttggcgaatttccgcaatcaacagggtgctaaccaaagggtccgctacaccaatccctatccagggggatcctcctcgcagcagcaacaacagcagcagcaacctcgctccgcgcctcgacctcaattcgtggtgcgcgtcccacagccgcagcagcagcagaatcaacaagggactcgtgcgccccgtcctcttacgccagccgtgcagcctggtcaaggccacagggacgctcaaggtcagcagcgtctgtgcttcaactgctttgagcccgggcactttgcggataaatgcccgaagccaaggcgtcagcaaggccaagcgcctccccgctccaacaacggtggcaaggacgtcattcggggtcgtgtgaatcacgtgacggccgaggacgtgctgacaactccagacgtcatcgttggtacgttcctcgttcattccatccctgctaccattttgttcgactctggagcttcccactcgtttatatctgtgccattcgtggggagaaatcagttgggggtagaaaggcttaggaaccctctgctcatcaccacccctggaggggttatgacagcaaagtattatagccctgccgtccctatagaaattcaggggattccttttccctcggatctgattctgctagacaccaagaagttggatgtgatccttgggatgaattggttggctcaattccaaggagtagtggtttgcgcgagacgcactgtcctctgtaccgagggccggaacaaccggttgttttctttgcacccccagcctctgtcagaagttcagaacttcatcagataggactgtcagaaatccccatagtcagggagttcggagacgtgtttccggaa

SEQ ID NO: 27478 - DNA, 1227 bp, Oryza sativa
tgccgacctggtttcttacatacatgaccgtttatcggtggtgagtcttttctttccctcagtttgtcttcttggcaggacaagatatcttagtggtgttaatcatgctatctgttctaggaaatgacttcaatcaagcaatgtaaatatcctgattttctcttttcttttaaaaaaaaactgtgtaagccctaaacctcacaaaaccatttgttagtttagcactgaatatgcatgcctggctgacaaactgccatctgctttgacttcgattctttcgctgttaaaactgctgttaccaataatgctgtgaccaattaatattgctatgcaggagggtgcagagctgcgtgtcatctgtgaggaggttgttgagttcggcttggcatcgggcgagaacactaccgtcatcctggttcagttcaagcccggcgccttccagtaccagctggtggatcccgctggatttggcactgccgtctctaacattgccagcaccagtgctgcgccggctggtgccagcgacacaagcgacgagggcgtcgatgacgctgccactgccaggcccaccgttatgggctacgacgcggactccagcaccggcagcgccgatgccacggtcgacagcgacgaggtcgatcccaacgccacggctgacagctacaatcccagggggcacgctgagatcgttgccagccacaccgacgacgaggtctacaccagcggcagtgccagggttgagagcggcgagctcgccgtccccactcccagcgccaacaacaccgtcgcggatgaggtcaaggtcgacgccgctgtcgtcgccggcggcagtaccaccgccatggctgctgacgaagccaccgtggtgtcgttgttgtcgaccatcgtggataactactactccattaacaccagcgaggagccagcgaggaggttgatcccactgccactgtcgcagccgacgacaaggtcaccaacggcagcaccagcgccacggccggcagcaagctgcacaccagcgattcttcactcaattttgtcctggtcgaagatgatgtgtgatgatgcgtgcaccgctgcatgcgcaggatgatactgatcctaggtagcactagtatcgtagtagtagaactttgctttggtaggatcggaatagttggtttctgctacccttgtttttggtttatgcctcctggttggttggctgggtacgggcgcccccccccc

SEQ ID NO: 27479 - DNA, 7480 bp, Oryza sativa
cccccccccccccccccccccgattttgcttgccagactcggttaattaatgaggcacttgaatggtttttgagttttcaaagtacttaatctagtgatgcttttgttgacctccattttgaatctctatacatgctgggtatgaactacttctctgttcccgattcgggatcaacaaacaaaactgtcctgatagtcctagatagcagcaatagcttcaaaggttcagagcgaacgaaaataattttcaatagtgctggcacatgttttttcagaaacatcgagtggtctcaagtctcaactcttcaaatcgaacaactgctttcttggatccacatcaacaaaataggatgtctacggtctacctaccaagatcagcgctagtatctacttcctccgtttcacaatgtaagttattttaacatttctcacatttatactgatatgaatgaatctagatatatatatctatctagattcattaacatcaatataaatgcggaaaatgctagaatgacttatattgtgaaacggagggagtacttccttgtcaaatcttcgtgccggtgtggaggccgacaccagcagagggaggtgacaagtggtggcgcgggcgtagagcacgggagtataggggatgtgccaccgtcgatccgtcgtgccggaaggtggatggaaaaaggaaggaggcgcggccgtcgcgccggctcgaagtacgcgaaaaaggaggaggaggagggagcgtcgtgccatgcgggctgtaggcattttgtgcctgaaatcggcccatggtctgaagtaggccgtagcgggctgcttcttgggtcacggttactctttcagctcggcaacagcaatagactcactcactcacactcacggtcacaccgatttctccctaggcgaccataccggaaaacccgcgactccccaactccgacgagaacgacatggacgccggcggcgaggaggcgaagcaggagcgccacctggtgctggctcacgagctcttcctcctctcccgccccgacctcgacgacctcgccaatgtcgccctccgctccgatgccctcgacgccgtcaagtccgatggcatggcgccgctgttcgagtcgctggccaccgcgggcgtgctgctcaagccggacgacgcagctgctcgccgagatgcgcgcgcggatcgacgaggaggtccgcaagctcgacgagaagtgagtggattcttcctctcttcgattttatttctagccccacaaaaaagaggtcgcccgttgctgtgttgcgtatgcctgcagtagtactatgtggggataggttttgtgataaataactctggtgttgatatgatccgtttgcctaaactaacctagcttgctctcggtgcggaacatggatgctaaagctggtagacagtggcgaagctagagcaaaatggaggggggttcgagattttgccacaagtatatcaatatatataacttcaagctacattttcgatagaaccgttgattaataattttttacatcaacagtagagacacacatgcatcaataaaataaaaaaagtgacaaacattgtttttcaaaattaagaaatccactaataacattgataattgagaattggttactaacccatgagcaaaagatgatctgcatatgcaaacataagcaaacaccattctatttcattatctcaacatcctcgacgatgatttgataacctaaaacaagttaacatcaaaatcagttctcatttttcaaataaaaagtagaatccagcgcacttagatacaatcattaccttcaatcatcatcaaatatgcgtccttgcattttcatgaagcgacgaacaacggcctcattggtgactttcttcatttcttctttctccacataacaaataaggctatcacttaagtactcatcaccaattttattgcacaaatatgttttcacattcttcatagctgaaaagcacctctcaactgtggcagtagcgacgggcaatacaagtacaagttttaaaagttgataaaccaatggataacaaagatgttttcttgtctccaccattatttgagaaagctcggcaatagtttgtatgttggagaatctaccatcatccctcacatcagcgatgtagagaccaagttggtggctaaggtccctcaaatttccagaattaaaatcactaggatacaattttgctaaactcatcaaattctctagattgaaatcatgaaatgagtctcttggactaaaagccgatgagcaaataagcaattgagagcttgtctcactgaagcgattgtcaagctcttgaagtatccaatcaataacatcattaaaacaatccacttgatagtaatgcttgtttgtaattctagatttgtgcctacgcttcttgggatcaatatatgtatcttccatttccaatttgacaatatcatacttgtcacaaaagtcagagacttcatctagaactttctcccacttttctcttctaagctcatccaaattgagcctagttgactttacacatttcatagcattcactatgtcttgatccttccgttgcaatgctagtgacaagctgtttgtgattgttaatatagtcaacatgaggtgcaaatagaagacaaaatcaaaagattggaagtactccaaaagattcgatgcttgatctctaattttccaatcatttttgtctttttccacaatttctagcactttgactattgtagcaaacatgccaaccaaacttttgagagttttatagtgggaactccatcgagtatccccaggtctctgaagacattgctcttgattcaacccggttctagtttgaagttgcccacaacccaatgccttactcatttctttaacattaatatctctaatcaaatcccttctcttagatgatccacccaccacattcagtaagatggaaatcttagtaaaaaaatcactaacgcctttatgttttctcacaatagccacaagaacctattggagttggtgagcaaaacagtgaacataataagctgaactattttccctcatgatcaatgattgcaaaccattgaactcacctcacatattgctagcaccgtcatatccttgccctctaacttgctttagacttagcttcagttctgcaaatagagcatcaatagaagacttgagataggcagaagttgtttcagtcacatggacaagaccaacaaatctctctctcacaattccatatttatcaacatatctcaagaccactgccatttgttctttgcaagaaacatctcttgattcatcaactagcaagcaaaaaacatcatgcccaatttcttctagaatagcatgtagcacttcctttgcaaaacatttcacaatatccctctgtatttcaggagcaaccaaaagactgttatctgatttttttgtacctattgcctttcttaaggatgggttttgctccgctgtgtaatcacgaaattccctgaagttgcctctgttgtagggctcctttgactcatcgtgacctcggaaaggcaatcctagctttactagcatcctagcaacatcaatggacccattcaatcgagtaagatagtccctcttaccagtttctctcacactatgaaaagcaacatcaatgtgctgtctttttttgtaataaatcatcacacttcttcattgcttgatagtgtgaaccaccgacatcacctacatgcaatttcaacctttcttttctatgaaaaccattccaaccatttttaacaaatgcttcatatccaccatccttcttttctctaaacaagaaatagaaaaaacaatatgctcgatttttggactcactgtattcaagccaactttcaaactcatcaaaccattccgggacaaaccttcttgaacctgtcataggaaaagcaaatgtgcgaggttgacaagggccattctccaagtatttccttctcaccctctctctgagattaggatggtactcatcaatttgttttcttaatcctggatcatatttaatctcatcttcccagtttatatcatccaaacatgaattacatgcattgttagcactattcggctctggcactttccttttgtaaaatcgttccatcaattaacctatcattagatgatttaggaggatgtaaatatatactgattttatcattcattcaagtacagaagtagaatgaaaattgatatgacttacatccaaatagcaccttcaactcaaattctcaaatttccccccaatctgcaattttattccaattctgaaggattccaaattgacccctactggcctcctaattctacaatgtaaaaaaaaacaaccaataaaaattttaggcctttgtatctaataaatcaaattgattaaaaaagaaatagatgaagcatgctttcttaccttgtctctactaacgcacaatgtggctgtgtgctgatcagttgatggagatggatgatgtcattgttggcttcatggcttgtgaaagtgtggtctgacgcttgctcctggttagctggttgcctggcgaccggcttcctgccttcctggctcctgcggctggagcgagcaacgtaggcactaagcaagcaggggcgacggcgacagcgacagtgagctgccgagggcgacggccgacggcggcgcgtcacgatgccgagatgggcaagtgttgtctgggagactgggattggctgattgcagagcagtggcgtggaagccaaacagatgcgaggcggagtcgtcaagattggcagcgacgggacgcggcatacgagaagtcgagaagagaaaagattgatctggattcgactctcctcatgggcttacaacgttaactggactgttgtttggactgtgggtgcactatattgggccaaggggggtgcatatagggccgagatatgggggtaataactaaaaattttgtttgaggggggttcatctgcacccacgggcctctattgggcttcgcccccgctggtagatccgtagatagcttgcatttgatttggtagttgtaaatttacgaattatgcttagggtcaattcacctctatataaatctgtactacataatactaataaactttctccacagttttgttttagattcatgtacatattgatgattttgtacattatctctgcaatgtgtaatttagcatgtagaaaagtaattgagattgctaaggatcacaatgcacaacatcccaactgatacgaataatttgtgtgtcccttttatccagaaaaaataccagtgtaaactaatgtgaaggaagaatggcatgttgaacttcgttagtaatatggtatcgatttccttggtcgctactttgttgtcctaggtaaattgttatacatgctcggtgtctgtatgaagtgcatggcaatgcatccggaagcatcagctgtcgccccatgtcttcttgatatgatcagatctaggtatgccaagcctaaacaaacatttccctgttaaggaattttattggtaagttaccattttgacatcaaattttgttctatacagctgtttcacaacatcctgaagcatcagaaggtctgtgttgtttgcagctttttgcatattgatagtgctgcacccattgtatgtctcatcagctcttatagaaggaaatcgggacatttcaactggtttggaattgatacacatatgggctcttcatgttgcagaagctgatcctgatacagaatgaatatcagtatgtactttggtcactatggggggatatatctgttatgaatcaccgatttgcattttgttcgtcaaagtagagcaattatagtacaataggctcagcacataatactaatagggtcatttttgaaccaacaaagaagtacagttgttcagggtaaacgttatatcaaattcatttgcatcgtctttgattttaacctgaaagaagagtattttcactgtgagataattcactatctgaaaataaagagctaataactcccaccttatgctttagtttcctgtaacgtacttctttctatcattccatttggtcttctattatactcaaccagtgatccagctcttttcagtaatgtgtagagtaaaaccagactagttttttgttcaactcataattagaaaaccatttcagtacactggaaactcagtaacttctcacattgtcatctaactcttccattgtcatgtttgtctccttgcaggcatcatgacctgtttgcaactctgttccgagatcttcagacatcatgagcactgaatcagtggatcgcagcatggccaggaactgcaggtctctgccttttaagcttgataccatcaaaatgatcaatgtactggactagatatataaatcgattgatgtatttggtttcggagtgctagatttttcgtcattcatacatagaacatgaattgatttacgtgaaacaatttatgtaagtcttctgttccagattactactatgtttgaaaactttgaactgattagttgagcaaaagaaaatttacctgtggatgggtcatgcagggcgagaggaggaggaggagggcgtgtgctccatggggaccaccagccacagaacggggcactcctggagcgttggatcagctgcgagggacaatccgacggccgagatgcgtccagtgcaggtatttaagcgcaatgctgcttctccttgcgcggtttgctgcacaaccactttctgcttctccctccctcacaggctcacgcattctcatctcaagagcactagtggcgaaagataaagggcaaatgttatatccaattccgtctgcatcgcctttgattttagcctgaaagaactaataatttcactgtgatatgattcacaatctgaaaatgaaagagctaatatcactcatcatatgctttaattttcagtaacctactccctcctctcattcctttaatctaatgttatactcattcagtgatccagctctttcagcaatctgtaaagaaaagagatcttcaaacgagtagattaacaaaagcgtaaagtgtctagagtttttggaggcgtcaccctaaggtggccgtttttcttttcttttggggggcgttagctgcggctagcaccctgctcgactgtctaaggtcgattctgtaaccttcgtgacaccctctttcttcttaatacaatttgggcgacctctttcggctgtcccggcaaatctgtaaagaaaaacaggacctctttttaccttataaagagaaaccaatccactaagctggaaacgcaataacttttaacactgccatctaactccattggcatgtttgtcttgtagatggctatgagctgcatgcggctccattctgagatggcccttcagacatcacgagcactggaatcggcggatcacagcaagaccagcagcagcagcagcagcagcaggtctctctaccttct

SEQ ID NO: 27480 - DNA, 645 bp, Oryza sativa
cagttccttgtgcttggcttccaagcggatgctcttgtccaccagacgttggaaatccggatagtccccagagactagacggacggacagctcggggtccattcctgccaggaacttctcttgcttctcctcatcttcccgcacatcctccggagcgtaacgggccaggttgttgaactcatgcaaatactccatcacggagcggttgccttgcttcaactctcggaattcccttttcttgagggccacgactccggcgagcacatgggttctccggaaagcggcggtgaagcgagcccatgtaataggctgtccctctggctgcgtagcttggaagtggtcccaccatagagatgcgggtccctgcagctggtgggcggcgaagatgactttctcttcatcactgcactgcacagtgtccagcttcttccccacggcatgcaaccaatccaacgcatccacggggttgttggagctagagaaggtaggtgggcggatgcggaggaactcggcgagtttagagtgttggggaggtggaggtggaacattctgttgtggcggatttgtgaggtggtggaggaaagtagtcatcatgttggcttgctgggcgaggatttgggtgagaatggcgttggtgtctggtgg

SEQ ID NO: 27481 - DNA, 10915 bp, Oryza sativa
acggacgttccgaaaggctcgctacaaaggctctacagcggacaccaccaaccgggggcacggagggctgatccccgcgtccgtgttgaggtgacactccggacgaggaggcaccctccgttgcgtgggtagcacgtcgaccattacgccggcgctcgataccgatgcgggcatctggccccccacgctgatcttcccgggtcagaggtgctgacgagggagtggcagccgaacggcgagcaacagccgccgctcgccgcgccctccgctttgacgacacggagccggtggtagcagcgccagaggtcttggtggcggaggaccgcccaccaacacctaggtgctgccgtgccgtcatgaccaagttggctacgtcatccagccaacgttgggctggagactccgggtcagggacgacgggcgggtgacgtaggagcgcgcccgcagcttggagcgcgccctggggcgtgctaccgtcgccgtagacgaggaggcgacgctccccatctcggcgcccttctccatcacccgtggatgtcgaagtcgcggatccttcgaccctctcgagcgcctcctcccgcctaggactttggcgtggagggggcggtggagtacgagctcgacggcgtgggttcggctccccgtcgtcaccgctaacactcggagagagcttgtgcgcttttgcttgtttagccattgggctgaacaggaaaagcttggcgcacacgaaagagtatgagagcttagaaaaacacacgcagaaccccctacatggcgcgtcagatgacggagcgtggggctcctcaccgggagaccgcgcaggtccccctttgccggttcggccgggggccctgggtgaggttctaagctcctagtctgtggaatgttcgcgaaagtggaaacacacaagacacgggcaatgtatacaggttcgggccgctgagaagcgtaataccctactcctgtgttctggtagatctgtgtacgaagaagctacaaagagctggagaaccagagagctcaaactctagaaacccctttcctcctttttgcctctcgtgggatcttctcctggatcctccgggagtctccaatctctcctcccctggtcctctggtccggatcccctccctaagtgggcaaggtcctccttttatatctcaaggggataccacatgcaccacttctacctatttctctttttggtggggacccatcctcttttcactaaaacttggctcgcctttccttcataaatgggcggagatttgtaatggttgccgtccgaatgaccttctgatgggacggcccatacctacctccactttcgccggaagcaggtgcgacgtgggaacatggctgtctgccaacgacatgaccagtgtcagaccggtcacaaatcggtcattcttgtccaccacgcgtcagtttatcaatcttgcatgttcacccttcttcatacaatgtcttgcttgtaacggttgggatgaagcctggcatatatctgaccgggaccaacgtgtcatctccaggagctagcacgctggctccggctagggacaagtgcctggaggctcttatcctgacgggatggggcgaggcgtgtgtcagaccgcctgttgccacctaacccacgatctgaccggtctgtgaccggtcacagaccggataaacgagcgcgctgcactgcgttacatgcggcgtgacgcgctcgttcaaaccgcaataaatgcggttaggtgagccccgccgtgctcacctaacctatacacgcggcgcaaaacccacaaggggtcggggcgcctcggccctcggggccgaaacgggagtggtccgatccctcggggagacaaagagaggggcggcctcatcaccttcgggcccgacccccccgagggggtcaggccacgtgggtgattgctcctgcccaaacctctagtcatgatactcccggtcccatgtcaccgacatcatgcttcccgaagaaaccatgatgaatttatcatggttacaacagaaacatccacatctacataatggtagtactagtattgttctattctgcacgtattacattctgtgtgcggaactcaacacgtactgctcgagtacaatttctgagcagaggacagggaaatgaaaagaatgcctaccaggtatagttaagttaagggtgtgtttagttcacgtcaaaattggaagtttggttgaaattgaaacgatatgacggaaaagttgtaagtttgtgtgtgtaggaacgttttgatgtgatgaaaaagttgaaagtttgaagaaaaagtttagaactaaacaagggttaagaagaaataaaataaaactatgaatatatctgctagtattgtacagttatgctacgagatgttgaattcaaatctcacatactattatttttttttacttagtatgcatctttactacatgttgtttcaattggtactaattaaacatcaaaaagtttagtctcgattactagtctcgaacaggtattaaagatcgtttctcgtgcatgagcaataaaaactgatataacaagaggaagctccacgagaaaagcaaagaagacggaaagagaatctcatatcacctgtgccatggattgatgtcacaaaatcgccgttgttcgctctgaatcgcccgttgacaacctgatttatcgatcagggctgtcgagagggatttatatgcgagctcaacattgtttcgattttccgattaccgcggacggaaatttgtccaccgcgtgtggatccggtaacgggcttcatcggggcttgcttcgatggacggtcaataggagcgggagtatgtactccctaggagtacccattttcatatatatactgtactcgaaaaattggctttgagttgaacctgactcttattttgttcttctggattttaatattttgtaaactattttctcaaagataatttaccaagttgagctatcattcatagcaagatctctcgctgcaacacccagggtccttttagagaaaattgcaatattgggacaacaaacattagggcttcgctgtcttgacactccgagtggatgacaaatgggtccatatgtgtctatgaaatatgtgtccagtatcattatagcaaaggtcaatgtttgcagtgtcattattgcaaatctcccgtcatttttaccccgtttcatagaaaaatattatatcttatgaaattaaatcttataaaattaatagacgagatatagctacattggtgtacatctttaatgcatgccatccaattttagattaccatattactttcgaacgaatggagtaagaaatgctcatctggttggcatcaatattttaggcgactggtgatatggaagatgttctccggggttgattacagccgtagttcctcgttccatgtcgtagacacacagcgctttcccattgaaccccgagtagtagatacagttccctctcaagcctgttgtccgtgcatcaagtgacgctccaaaacagcctatctgaacgaagaacactctgccacctagcgaatccaccttcacccacgctgatctttgctcctgcgtcgtcgccatgctcagcctgtaaacgccaacaccagcgacaatccgatcacatccaatcgggtgagagaagagaatggagtgcagctccccgttcgattccacaaagatgctggtacgtttcatgtacaccgccggcctcctgtcgtcgtcgtctacggcggtcacggtgaacgccggctccagtgagaactcgaggacggcgacatggtcgatgagatcggtgtagaactcgccgtccatcgccgtgagctggcgtaacgccaggatgacgatgccgcggtgctcgtggtgaggcggcccaggctggaggtactggtgctgatgcctcttcacccagtggttgtcgccggggcggcaataccagagcaccgtgtcggcgtggtcgatgacgagcacgacgcagctggccgggtccatgggaccgcagcacgagaggaggcacctccggcgatggctgctgccttcggcggcgaggacggtgccgtcgtggtcggggggcagcccgacacggcggccggtgaaagggtcccacaggaaagtgcacggcgagccgcggcgcgccatgagcagccagccctgcgccgtggtccaccaccggtggcctctcatcatgtcgtcgacgccgccgtcgcccaccctccttggcagcagtgctctcgccggcacgctgtacagggacgtggcgtcgccgtggccgaacagaagcagaggagcaagcttgggatccagtactgctgcagatgcatcgcctgcctcctccatgattttgatggccgactgtcccacaggtaggatacggccggtcaattgaaaacgaacgaatttggcggtgctttataaacgaggagaggctttgagcagtgcaattactggcatataggaaagagaagcgaagaaatctgcacgcctacgacctacgattactagtaccaattaggacatgaattcctacacgacatcaaaattcaaacaaattatagtactagtactttgggccggtaaatcagtaaaaggaaacagtaatctgggccggggataaagagggatcaccacatatgcatctatggagattggatagcaaccaacaaaaaccaaccgtgccgggtatacaaactacaagcagaagcggaagccgacctatatatgagtccggaggaaacacgtcaagaaagcagagctccgtagcagcacaaaacgcagcgcgccaagcaggccattgcggtgcacgaaccctcgagattcgccaagcagatagatggaggccactgcgacggcggcgcagggactacgggactggtcgtctctcccgttggacatgctcgtgctcgtcctggatcggctcgggtggtcgacccacccgagcttcgcattgacgtgccggcactggcgctccgccgtgtcgcccttctacccggcgtggatcacgcctctcctcctgagcgccgccgacatcggcgtcacgaacgtcaggtactacagcccctactaccacaggtgtttcgagatcgccgacacgctcctcaaggtgcccaaaattgcggctaggatctgctgctccagtggacaacacctcacgctgtgtctacctagattgatcctccaagccgatctcgtagccggcaccatgtatgagctgccagagatgcctttctattcattcgagtttattgtctacgatgagcacgcgcggaggatgtattgcgtcaacacgacgtacgcgctacagctcgcccgtgcgacccaacaagacgacggcgagtgggggccctgggaattaacggactttgacgtggaaggaccgcaacttctggcggcgccgatcagcaacccggtgctccatggtggtttgttgtatgttcttggtgaagacgggaagatggcggtgtatgatccatgcaaccacgacaataattttacagttcccgataaacctaagggctttggaatcaaacaccaagttgatagccacctgtttgagtccgaccaaggcgcgctcatggctgtcctcgtcggctacagtggtgcgcctatccatgtcgtcaagctcaacgaagagacgatggagtgggagaagatgcggtcattggaaggacatgcgttgttcaccgggacatacacgacaatgttgaggaagactaagcttagattgatgcaaaacaaggtgttcctcccgaggctgtatgactggcctgagactatccatgtcgacattgttacacgtgatggcgaaacagcatttgtaccaaagtcatccagttcgtctaacaccaaggagatcacctcggacataaatatttggttctacgagtttgggcagcaagacgcaagagagttttggggatcggagagagtagattatagtatttgggttgattttagtactaattgacacaaattgacgttgttagctcttatattttcatatagtgaatcatctcacaatgaagttactcttctttcaggccaaaatcaaaatcgacgcaaatgaaatttgatataatatttctttgttggttgaaacatggcgctattaatattatgcactcagccaatgcaatttttgcatgaattgatattgatatttgtgcacagtaatttatgaggatttaagggaataataaaattataggcttggatgattttctcggaaaatttgaatttttttgggagggaaggatttagggtttgggtgattcacaaggatttaggcaagttttgaatttcaaaattcgaaccttgggatttgtaatggaactttgggatgaagtttttgggatatcaaggagagacccaccgagatcttttggcacacttaagtccttgaggatacagaaagatctaaaatttttgcaattaggatttcgttttatacaaaataagttagaaaaataattcattcgactgtgagttgctgaagatatggtggtgttatcggaagacttgaccgaatagccatcactgctaaatggtggcatggatctacttaatccacaaatagactttcccattaaaccaaccatatgactgattactcccttcatttcaccaacatccattatccaatgcatgaatcgatttaaaaccaaaacgtatcacatagagctagaagaatgaggaaaacttcaccaaaagcaaagtagttaacgtacaggtgcaagtagttaacgtacagtatcaatgatactggttggtgacgttggctttcatcatatacttggttatcttcttcttcgccttcttgtcttccgactcacacgtcttagcgtgagccagaagtgggtttctcgccctggccgaagaaggttcaagaagaatcttcttgtagccttttccgcagatccaacacttctttgggtcgaattcctcctgctgacgcacggccacctgatggcccgttgcagtggcatcgagggcgacctcgtcggactcgatgactgcgccgagagaaggtttgggagcgccgtcgtcagcgtcggcattggcgctggagttgggatcgaccttgtcgtcggctgcgacagtgccagtgggatcgacctcatccgtgacggtgttgttggcgctgggagtggggacgagctcgccgctctcagccctggcactgccgctggtgtcagccgtggcgctggagtcggccatgacgccctcgtcgcttgtgtcgctggcaccagccggcgcagcactggtgctggcaatgttagagacggcagtgccaaatccagcgggatccaccagctggtactggaaggcgccgggcttgaactgaaccaggatgacggtagtgttctcgcccgatgccaagccgaactcaacaacctcctcacagatgacacgcagctctgcaccctcctgcatagcaatattaattggtcacagcattattggtaacagcagttttaacagcgaaagaatcgaagtcaaagcagatggcagtttgtcagccaggcatgcatattcagtgctaaactaacaaatggttttgtgaggtttagggcttacacagtttttttttaaaagaaaagagaaaatcaggatatttacattgcttgattgaagtcatttcctagaacagatagcatgattaacaccactaagatatcttgtcctgccaagaagacaaactgagggaaagaaaagactcacccccgataaacggtcatgtatgtaagaaaccacgtccgcactgtccacgcaagacctgcagggggaaaatatacagtagtcaatgcaattagtatggaactatgagtgaaactatatatgaaccaaataggaggaaaaaaaaaaaagagaatgccaatgagtactggtgacataaaaatgatccaatagttattgacaggtattttttgctgaagagttaccacttaccagagaccttgacttgcaataacaagaaactccatgtcatcagttatgtcatcctgacattgaaagggcaattttccatcagatcccaacccggcaaaactgaacttcatattctaccaaacggacctatttacacttagttacacttacagcgaggatgtccggatcacataccagcatttgtttttcacgatctaaatctttgttcttcttgaaagcaaagtcacctgaaatgtaagtaggtaaaacgccaatcacagtgtaatgtgcttctttttgtgctattacatgcaatcaatgaaaaacagatccagacaagactataccaattgatcttgagattgttacacctcccccaaaatcaccgaggacccattgttccttgactacataattccccattacttgttcacacctaagtccaagagatctccctcctgcattttgaactctctctctttcagactcagttcttgtgcatggtttgtgatcgaaggataaatcaatagcctattgacaaaatggaaacaagcacaaatgttaggcgccacaatgaacgagcttgcaaattaggtattaaccagaaattcaatagggaaacaatcactataccaggccaccctgtcttgagagtacgcaacgagaatcaccaacatgtccaacaatcatttggttacctctgatgacaaccacacatgctgtgctcccttcatacgctggcccagtatatgtcgcctgggaaaacaacaaccaaactgaagtatataacacagaatcacaacattgttagaaggaaaagactaccaaaaaatagctcaagaaagccaacaggtatagaaaaacatttctgaaaaccaaaccaatgtatgaaagaaataaccatcgaagggatatcgcaaacaatacctcaatttggatagcatagtatgataagaaccaaggtgcaatgagaacttaagaacctgttggcctccaactcagtaaaccagccaattgatatgtaactaattgaaccttttttaataggagcaattagtcgagattagggttaaacatatctcctccaactccaaagtacatcacaagaaagaacaacagtctcgatatcaaacacattcttccatttcctttttcatagatacaatatgcacactgtccaacaaatacaattttgagtaacttcttcacgatatgaatatttgaggatgctaggggttaaaagattactacctgtgggaaaggcttagcacagacaccagccttgagaaaatacatacatccattatcatgaggaataactaactctctccaagcatcggactgttgcaggttctcatccatgctgcagcaatcacacgaacaatgatatcccacatttccaagtgcagctataaacaaaattatgtaaagtaggccaaaataaccttaaaaacacattgtccagtgcattaatcagatcgttgtgatagtcttcatgattgcatagctcaatgtgaaattgttttgcgcaatacaatgctacttcagctcctgagatagaaaaaaacaattcagtatggcgtctcgctcaatacgatggatcaagattacttctattgcatagaagcttataaatcaaaacactgttgtgaacattagtagcagaacaacacttgaataggcatcattaaaaaaaaactaacctgttaatctgtaattatcctctaaattatcatcaccatttatattactagtaactcatattcatgcagtgttttatctctcatgaattaaaatttctttttatgtagttcatgttatccttgcaagcatgccacacgaatgtgattactgattagctaacttgttcattatccataactgtagcatcatatttatttgaaaattgacaggtaaatgtttcaacatataccacaaagttttcaaaacatgcgcagagataaacaaagtgatacacacagacaaacatagcatgacataacagttacgccaacaatttggagggtttgaaattaaaaaaaaaatgagaatgaaagcaaacctccatggccatcataaacaccaaagaaagacgtggacgtggcatcatcaagatttagaatagctgcatgctagagaatatagagggcatatgtcagtcacagtattttgcagaactgtccctttttttttcatacaaaaggctgcaagtttactcacagcatcttccattttctcaccccatccttgcatagacgacacaacatacttaattctgtcattctcttcttcaaaagtgaacttcgattctacaggaaggctgttacccatagcggaacttgctttgctgaaaatttaacatgaatacaaatataaaataacattattaacaaaaacggggaaagacacttaaacaataatacagatcaattaaatgccagaaagctaggttacatatgaaataaagtgaagtagaatcatcaaacttgatatggcactacttatctagctcaaagcacagggtgtaattggtgctttcattcagggcccttaaatgcttaaatgcatttttgagatatataacatggaagtatcaatcttcagttgcagtgctgcattattttacacctaaatcttattttattactgcgaacaaaatacacacaaggttttctacaaacgcgatataagctttactgacacatatcataacaccaaatttcaaagtgagataagaagaggaaacgagcgcataaagtgtactgtacaagaatgatcgatttcctttagatatggcactgcttcggcgaatcaaaacttaaacaattgccaacaaagaatgaagaacagaagaaaaaaagcaagaccaccctaacagtacagtggggcacggaacaccatcacagagaagtgaaaaacgggttacagacaaaaaatgcacaatatctgggtaagggagaaggaagccaaatcaagattcag

SEQ ID NO: 27482 - DNA, 32814 bp, Oryza sativa
agcatcgagtaaacaaagccccaataggacagagagttctttcgaggcagaaaacagagagacgtgtagagaagaagcatcctgcatattgcatcaggagcagcgaaatgaacagaagaaggcatctagctaatacaaattcagaaactggcacttccgcagcataccaaaacagaacaaactgaaaagagaaacgaattgatgtggtttaatttctcgagcttgcactggtagaaatagagaaacggaaggcaagatcaagaccaaatagagaaacggaaggcaagatcaagactaacatgttccgaggagaggcgaacgagatcaccatgaagcttccgtgctcttcaacctcctccaagaaactcacacacccaacttcaaaagcatcaagcaacaacaacacgggaaagggaagccaagaacaggaggaaaaaaatgatcacggccaggtaaaatcttagcaaatttcggattccgaaacgccttaaaattcgagaagagaacgaggcgccgttctacttgatcaatacgtaaggaagacgggcagattgcatcaggaacagcaaaaagaataagaagagggcatttggtttatacaaattcagaaactgacacctccgcaacacaccaactgcaaaacaggagccaaaaaaaaaaacaaagcagagaagagaaacgaattcatggcgtctaacttctcgcgcacgcattggtcgcgccaggaaccgtcaagatcaacgtgctccgatgggagagaggcgaacggagaccaaccatgaagcttcggtgctcgtcgacctcctcatccaactccgagaaaaccacgcctcaaatgcatcaagcaacaacatcacgggtacgggaagcgaagaacacgaaaaaagaggaccagaccgcggtaaacaggaaccaaccaagacgcagggtgctgctcgattcagcgaagacaagaacgagagaaaccgcgacaccaaacactccaagcaaacaaacaccaccaccaatggagcaagatcgaagaagagtagggagaagaatctcacggcgctttcggagaagaagtagggtttagggatggaggcggcggatgaaaccacagaggagaggaggatgaagtgagagagagatctcacctctcacctttgccgctgctcttgagacgcgagagagagagagatgcggaaaagtggttgtgctgcgaagcgcaaaaagttgtgcttaaatacctggaccggacgaatctcctccgtcggatcgtccctcgcggctgatccaacgctcgaggagtggccccatcctgtggctggtggtccccacggatacctcgcccctgcatgactcgtccaattctcttttactcatcatcatcaactattagtcagttcatcaatctgggtacaattttcatcaattctctttaatctggatcaggacaacttccatacaatctccacacgaatcgacaaaaattctagcattttcaaatcccagattaaaaaaccctgtaatatgacaatatcaagcctaatcagaattagctgacctggaatttctaatattacatggcaagataatatatgcttatttacaacttaatctagtacatcgatcacatcatgttggcaaatggtatgatgatgttatcaagcttagaaggtagcgacctgctgctgctgctgctggccttgctgtgatccgccgattccagtgctcgtgatgtctgaagggccatctcagaatgaagccgcaggcaggtcatagccatcttgaagacaaacatgccaatgggaggagttagatgacagtgtgaaaagttactgagtttccagcttatactgaattgggctcttttaagtaaaactggttccagcttaaagtaaaagtaaaaaaattggtccctgtttttcgttacaaattgctgaaaagagctgggtcactgaatttgtatactgaaggaatgagagaaatgagtaggttacagaaaactaaagcatataagggtaggttactgaaatgattaggcgatgcagacaaactttgatacaaaaccagcataactgtactcctttgttcgtcaaaaaatgacctattattattgtgtgtggttttaagaaacaaatgtcatcctattataccataattgctctctacgtcgacgaacaaaacacgaacaagtgatcgataacagatatagaccagagtacttactgatgagcattctgtatcaggatctgtttctgcaacatgaagagcccatgtgcgtatccattccaaaccagtagaaacatcctgatttccttctataagagatgatgcaacatacgacggatgcagcgctatcagtatgcaagaagctgcaaacaacacagacctcctgacgtatgcttcgggatgttgcgaaacagccctgcagaaacaaaatccaatgtcaaaatcgtaccacttggttataactaagaaagtctttaacacggaaatgcttgttttaggcttggcatacctagatctgatcatatcaagaagagctggggcaacagctgatgcttctggatgcattgccatgcacttcatacagacaccaagcatgtatatcaatttacctaggacaacaaagtcccgattgagcaagtcaacaccatgtgatcttttatcatatccttgcataacagggagcataaaagcagcagcatataaaggaaatctgttttttgaccactctgtctgcaaatctttagcttttccaagaccccatttacgagattttcctgatttaacttgaccagatctagatggaacttctctttcataccggtgtgaccaattcagaagtgttcctgattctgagacttccctccaaggacctgcaccagcaggtccctgatcactaggaactagccaagagggagaggtgtcggatatcaagtttccatgccgcagctctctccttacaattttagtttccgcaagctcctgtgcagcctcagtcataacatcaataatcaaaatgcgctgacttacatccacgcttgatgagtacagcaacttggtgagaacatctaatgattcaaatgtgcaggttaccagcaaggcaactaatgccttctgtctcttttcttcagcagaatcttcctctccttccattgccacgtcagaacatcgaacatgcacaagtgctctaacaagatcacctgagttgtggcgtagttcatcaggtgatgctctcacaagcttttcggcagaactcagagcgttttcaaccttgggtaaaaaagaagggaggatgatcaggattttacaataatttgctctggaaagtacaggtagcactagatagaaacttacaccgtctggatcatcaggttttcgtagtgcagcagcaagatcttttaattgggtgaatttcttctgcaaatctgagtcatcgtctgacagatcatatggctccagggatgaatcactggaggcatcaatgttcattatttcctcatcacattcttcctcttcgaaatgcccattcacagcagaaccagacgtttcacaagaatctagtgatttgatctcaatgatttttgccctgttctctgaagtatcatgtttaatagcctttgcccttctctcaccagcatgtttcttgttctcaggcaaagatggtttcagtttgcttataagttctacatcctttgaaggggctgtgatttccttcggagataaaaccccaaagtcccactcaacattctcacaacagttatcatcaaggtatagaggattgtttggatcaacaactttagaaaatgtcaatgcaatagcactggccatcttccggattaaatcaattggactctctaacctacctacagcaaaagagcattcagtattaccataataataatatgataagctaatgcagggggggtggggggggatactcacagcttacaccttcaagaatattgttcaatacatctttagttgtttctaattctctttttgacatcttctccaaacacaacccaattgctgcagtgatgtctgagtgttgtttaaggggaacaagtcaaatgataatttgcaaataaaaagtgtgtaatgtaatacagttttgagtgcctcaaaggatacaagcttgttgctccactgagtatgcctggacaaactctttcttggaccaaacactgactaaagtttgcagtgtaccaaggaagctcgatgtcctttgcttctgtgtttctatgcctgaatttggtggcaattcaaagacagcatagtgaagaatccatctcagacaacatagagggaatgttttccaacgcaaaaatttgtcaacaaacattgccctgaagaaagcacagagaattaaaggatgaaagaaaagaaaagaaaagacacgttgaagattatttgatcaatcgctgcatgccaattatacgctgaatagacacccataatataagcccatgctgaaagttaagtaaacatacatggcaccctgtttgtcgttcataggaatgaagtaacaaagacatacagggtatctgaagactatcattcaccttacctaaaacatccactaactgaaaaaaataaacctcagaagtactttttccttcacagataaatgtagcatgccagacacagatgaaccaatgtggataaactaaaaaacaagcacgtcaagtgttgcatagtattaaaatgcgcacatgtactatctcattctcacctcaaaaacagttttgtgcatgaagctctgattaaacaaagtccacagaatccagtatgcctcctcatcgcttgtatgttgtgatgcaagttggcgcaacatctcttccgccaacctttcaacagaatgctggtctctaatagcctcaaccacattaaaccaaaattgggaaacatgcttgatcttgtcaggacttatggttttatgatcagattccatacatctctttaagtgactacggatcctaggaatcagctcagcaactaaaatgcctgaaaagagcaagatatattatcagaaatacaacaaatagtagggaaaaggatggctacatagattacaaacaagaagttgttaatgactagaacagtgtgctaggatgatcagccatgacatgaggcactgctatcctgggtgacatctcaagcattgcagaccccaagtctactgtgattgccaaaagtgaacactggataaaaacccaaaaacaggctaccttaaatgtttaaaatttcagctgaagggactattagtggaccatcagagaaaaccaaatgtgtaccactgtgttgtattagtttgcataaggattaaagattatatgaggacaaaaaaggatctgctccatcaccctagtagcagaccatcgcaaacataaatgttgagttgaatacactataatcctaccagacacaaatgcattgctaaaccattactgcaccaactagaactgcccccattagtaaatagaaatgtctaaacagataaactaacagcacactgcacacgtcaagctacatcctgaaggatgaatactcaccagtagatccacgacggctaacacgagatatcacttcacccacgaagaggaacacagaattggaggcatctagtccattagcatcttcgccagcagccaactccatagccgcttgttcagttgcaacaagaagctgatcgacaacacacttgaagaatgaccttggtttccatcaaggacttacagtttggaggaacaaacatagtgcaaataaatacatattagctgagaaaaagctaacagaataaaaggaaaggaaaaaaataacaaagatgtttgtgtttgtgtgtgtcgtgtttggggcggtgggggtgaggatacgatgatgtcagtgcaggtgaagctcccattcttgttttatctggaacagatgcaagtagttgagcaacccttgaaatgaaagctgctctgcctgggttcaagttgtcatcatcgtgcttgctgcttacagtaaactctgcaataatctggctgacccccttattctcgaccaaacatagaattaacagcctgaaatggggggaaataatgacacaccaagctcaaaacatagttatcgggtgagaaaaaaggaagataccagataggaacagacccatgaattttcagatgaagtgtgcatgctagattgtttgatttcctaatgactcgagcataaaatagacttaagaatacaaagcagacgattggacaaatacatgatattagtacagacccatgtagtcgaagtgttgaaacttgaaattttgtcctacaaggtttgggtgtaatatttgaagttttgaactcacagggaattgtcaaaaagaaggatgtgctatagacttatagtaaaagcaaacaaagttggaccaataaaagattcaggtgtaaacttaatagaattgatagattgttcatgaataacctttcaatatttgaacacataatgttatgatcttccttagagcctcctttgtgagacaaagcaggaacaagagcttgaatgacttcagttggaggtcctttgacaaaaaacgaatcatatatttccttccttgcagaggcacggatctgacgtaaccacttcaaggcaacatctggacaaccaaagtgtgagaatgggattataactgaaggaactttgcaactgacctaactgtgatgaacaatcaagaagttttgagtgtatagtaatcaaattgtagagatcgataaacaatacaaatgaagtatgacttgtatgactggcagataacattataagcaaacaggagagttgtacatgtaaagaatatcaatggtacaaagtatatatgcagtgatagattcaagagtaaacttacggccaagcaaaatcttagatatagtaggaaatgctggaccatggtaaaaagcatgcctccaagatccccgttcatcattgctgaggcttacgccattaattatctgaaagtacagaaaataattctccctgttacatcatggcctaaaaggatggaactccaattggctatttggctgaatcatattgaaggaagcatgtgtctttgaatatccatactaatttatctctcaagcatgaaacatgatcttctgtattctgaatgcattatcaaatgacacaggttttacaaaatgtgtgctgctacagctcacctagcaaggtcctgcaattcgattacccattgtgtgaccaaagttataggtttatcaactggaaaattctgtggatgcttatcaatccagtttcggagtaattccttccagagatcaatttcctcaaatatatgcaccacaattatgacattacagcggctgaaacattgtccacataaccaatagttcactatgatatcttaatgctccatttctattttttgtggcagaattactgctccatttcggcatacagtcctttgtgattgcaggtcaaaacaaaaactcaagacttccccattttttttatcacagaccccttccatgattattagaaatcacacatcattgtttatgccagaaccaaaaatagcaaatgataaaactactagtaatttttctcagatggacgaaataaaaggcctaaaattagcacagagcttcacctggctcctgaagggttcgtccacggtacctacaagagaggccatcagacaccccaagtgacggcgaatgagataaatgggaatagggagcatgtcggattaggattcggagcctcaccggctacggcagcggagtcgacggggaagacgagggcggcgacggcgtggatcgcgcggacgacctcgccggcgctcgacgcggcggcgaccgcgtcggccgcctccgccaccttgtccagtgctaggtcttcgaggcgcgcgccaccatggccgccgccctgggagcccgcagccctcgccgcggagctgcttgggttgctcgccatgggagggtgaagggaaacacacgacgaacctaagagagagcgcttgagaaggggaggttttggagcaagagtaattagggggttttgtttggaggagaaataacagttttacccggcttgactgccgttggctaagataaaattttggggtatgtttgagaatatcaaaatttgcaaatgaacttttgttagagaagatgtgtttgagataccaaaaaaataattgaaggaattaagaatgtcgaatgtcaattgtacttttattcatgataccagtagtatattactcctattatttctaagtttttttataaggatagaattggagctgctaagagcaagtttaatagtatagccaactactagctctaaatcatctatagtcaatctactccttccttcccaaattgattttatacaccaaaaccaaggataatttaaatcacatcaatcaatacaacatacacacattctcccaccatgcatcgattaaaacctcatgccacttacaccatagcatgcacacattcttccatgctgtattaactgtattctgctgaaatccgtgtccatgcagttatatgatgatcaatttaagaatttttagattcttttacatgatgatcaatttgggaaggattgagtaatagtaattcatacaatagttaactagaaacatataccacactattaatatctggtcccacatgtcatactcacattgcctcttggagtccgtactacagctgactataaatctgtagcccactgcacttctctatcctcttttatctttttaaaatatgtctatagctggcttagagcaggtacaatagcataccattagttagctataaacatatttttatgagataaaaaatgaaaaagaatagcagcgggctacagatctgtagccagctgcagcacggactccaaaacacagtgtgtgtatgactggggccatatattaatagtatagtaagcaactattgtatgaatgagctattagattggctatggatgaattggagctagtagtggactatactattaaacttactcttatagtatgctattgtacctgctataaaactaacttgcttcttttcctcgatacagcaattaactaacttttctcagtagtcgaattatgcatcaaaagcggaaggagcgagtataaccaactgccaaatacgaagcatgagtgcatgattctctataagattcgaaaacaagctcgaactttcgaacgctttcattacaaccaagaaacatttcgatttcatattattgacatcatgtgacggagcgtggggctcctcaccgggagaccgcgcaggtccccctttgccggttcggccgggggccctgggtgaggttctaagctcctagtctgtggaatgttcgcgaaagtggaaacacacaagacacgggtgatgtatacaggttcgggccgctgagaagcgtaataccctactcctgtgttctggtagatctgtgtacgaagaagctacaaagagctggagaaccagagagctcaaactctagaaacccctttcctcctttttgcctctcgtgggatcttctcctggatcctccgggagtctccaatctctcctcccctggtcctctggtccggatcccctccctaagtgggcaaggtcctccttttatatctcaaggggataccacatgcaccacttctacctatttctctttttggtggggacccatcctcttttcactaaaacttggctcgcctttccttcataaatgggcggagatttgtaatggttgccgtccgaatgaccttctgatgggacggcccatacctacctccactttcgccggaagcaggtgcgacgtgggaacatggctgtctgccgacgacatgaccagtgtcagaccggtcacaaatcggtcattcttgtccaccacgcgtcagtttatcaatctgcatgttcacccttcttcatacaatgtcttgcttgtaacggttgggatgaagcctagcatatatctgaccgggaccaacgtgtcatctccaggagctagcacgctggctccggctagggacaagtgcctggaggctcttatcctgacgggatggggcgaggcgtgtgtcagaccgcctgttgccacctaacccacgatctgaccggtctgtgaccggtcacagaccggataaacgagcgcgctgcactgcgttacatgcggcgtgacgcgctcgttcaaaccgcaataaatgcggttaggtgagccccgccgtgctcacctaacctatacacgcggcgcaaaacccacaaggggtcggggcgcctcggccctcggggccgaaacgggagcggtccgatccctcggggagacaaagagaggggcggcctcatcaccttcgggcccgacccccccgagggggtcaggccacgtgggtgattgctcctgcccaaacctctagtcatgatactcccggtcccatgtcaccgacagtagcccccggcgttatgccagggcgatcaccctcctcgagggaagcggtcgggcgtgacgccacttacttaggcctggtgacaagtggggctggtctctacagttgggcagaaacccaacggtcgcaaatcacgcacatcggcaatggtaactcgactgtcaataatgagcggcctcttcaagactgccacattactcgagtagcacacgaatcgggacgagccggttcgttttgcctggagatatggtgatggcacttcggtcggcgagtgcaattaacgcgcgcacgatatgttccatctcgactgccacagccgcatattcacctcatgcgccgcaagcgggcgaatgggattagtggaagcgtgggcgcgagaaacgagggagcgagatagtgggcgcgagaagcgaggagccgggcacagcgttggcaagggtataaagacaccgaggaagagatttgcttccttcctctcgccattattccccttgtcttcgccgcttgcgccctaactccttgtttcctgtgccctaccctcgccacacgcgctcgctctcaaacatctcttcttccggcgtcatggcacggggctctgctccactcgatggtagcgtgctgccgctttcccgcatcgtgagcgagaggcaggccgggctgccgcgccgcttcctgccggaatctgccaccggccaggagatagttacgctgggcgagggacgcccggcgccacgctacccggggcggaccgttttcttcctccctttcgcaatggcagggctggttccgctattttcttctttcttcatggatgttctggagttttacgatctccagatggcgcacctcacccccaacgcggtaatgacattggccatcttcgcgcacttgtgcgagatgttcatcggggtgcgcccatcccttcggttgttccggtggttcttcaccgtacagccggtgtcgccgccgtcggtggttggtggctgctacttccagccgcgggggccggtgctgaaccgctagattccctgcgtcctccgcaagaagtgggatgactggaagagcgactggttctacacccccctcgccgacgaagcgcgcctccgacttccgaaccagcccccggcgcaggcctccagctggcgggcgccggtagatctgggagatggctacgacgccgtcctcgaccgcctggcgggcctgcgatcccaggggctcacaggggccatggtgtacggcgactaccttcgtcgccggatcgcaccactccagcggcgcgcccggggtgcctgggagtacaccgggtccgaggactgtatgaggacccaccggggggtcaaatgggactgggtccctgaagacttcaaggtaatgatccaacgggtgctgaatctcagctccgcggaggcatcgctcatcccccaaggagtcctccccctctgcagcgatccagatcgcgccaccatcctgaccatcatgaaggcggtcggggcctcagaggagcaggctcctcgaggccatgatggcgcgggcgggagctgcaggggagaacaatctaccccaggagggggtcgtgcttccgggctccgtgacgggggctcggggggctgccgccctgccgacgcccgagggaagaggaagcaagagggttcctcctccccatctcctccccgagggggcggggcggcgcgtgtcagcagcaggcgcccggagggggccgcgccgacgccgcagcccgagggggagcggaagaagaaacggcttcgcaagatggggggacagaaccatcccggggaaaccttatttcccctccaaggtagtcgtttaaccgaccccctcgcaggttcgtcccacgcccattgtggctgtattcattctcccaacgcgagttttcactcacccatcttgtttgtcttctggtctttcttctgtttcagcgagatctcgtcgcgtccctcccgccattccaagtccggccagtctgaggccgaggatacggcgaccgcggaggcccggaggcgagaatctgaccggcgagaagccgcggatcgcctacgggaagccgaggaggccgcccgggaggccgtccgggctcgccaggctgaagaagccgcttgggaggaagccagacttcgccaagccgaggcggcgacaacttccgaggcagctcgcgacgaggccgcgggcacatcgcttgggcccactccctcgggcaacactcaggacaagccaggtccgggggacgtccccgagcccggcacgtccatcggcgggccgggccgcgcggcatcctcaccgaggcggctctcccccacgccttccgttgccccattgagcgcagagccccttttgcaggccttggccgtcgcaaacaccacggtgttggacgggttaagtgcccagatggaggccctgcaagcagagcgggcggagctcgacgccgcatgggcgcgcgtcgaagaggggcgacactcggtggaggccatggtggaggtgagccgcaaggcacaccgccggcatgcctcagagctcgaagcccgtcggaaggtgctggaggagatcgccagggaggtggaggaggagcggggggctgccctcatcgccactaccgtgatgaacgaggcgcaggacgacctccgccttcaatacgggagctgggaggcggagctagggaagaagctcgacgccgcccggggggtccttgacgctgccgctgcccgagaacggcgggcggcggagaccgaggtggcatcccggcggcgcgaagaagcccttgaggcccgtgccatggcgctggaagagcgtgcctgcgtcgtggagagggacctggcggaccgcgaggccgccgttgccattcgggaggtcacactggcggcgcacgaagccgcctgtgccgaagaagaatccgcactccgcctccgcgaggatgcgctcaccgagcgggagcgagccctcgaggaggccgaggccgcagcgcaaaggctggcggagagcgcgtccctccgcgaagctgcgcaagaggaacaagcgcgtcgcaatctggaaggtgcccgcgccgagagggccgcactgaaccaacgggccgctgaactcgaggcgcaggcaagggagctggatgcaagggcgcgtagcggtggggcggccacgggcgacagcgacttagccgcccgcctcgcagctgccgaacacaccatcgcggatctgcagggcgcgctgaattcgtccaccggggaggtcgaggcccttcgtctggcaggcgagatagggcccagcatgcttcgcgacgccgtgtcccgtttagaccgcgccgggcggcaggcgggtctctggggcgggcggactgcgaagtacgccgccaaccaggggggcctcgcccagcgcctctcggagatggccgggactctccaacggctccccgaggagctcgagaggacgattaagtcatcctcgagggaccttgcccgaggagcggtggagctcgtactggcgagttaccaggccagggaccccgacttctccccatggatggcgctggacgagttccctcccgggactgaggacggcgcgcgcgcgcgggtccaggacgccgccaaccatatcgttcacagcttcgagggttcggcccctcggctcgcgttcgccctcagctccgacgaggagggcgatgacggcggtgtgggcgacagtggcgacgaggctggcgacccgggtgcatcggagtgagcctccaggtccccgccaatctttaaatagttttttcttcttttctttcttccgaagccttcgggcctcctttttgtatagattaacttactctgcaatcaaaataaagaaatttctgtgtcaatttcattttactgtgtgtatgagaacgaggatgatctgtgccatggtccttttgtgtcttagctcgaacaagggctcgtgcccaggtcccagtcctcaaatggctcgggtcggggctagtgcctggggagatccacgtgtcgagactggccaggccgggagcgtggtgaccgagggttatgggtgacccggttgtgggtttttgccgattcccccccggagttcaccacgccccggggcacggctcggttctgggccccttttggcgattttagccgactcgagcccccgagggcaggatcgagcacgagtgacctatttcaagtcaagattcttcaaaaggaaacaacagcacagacacagcctttaggaaatcgaaaatgcttttattgaaatacagatagaagagaaataagaatatgcatgtgtggtagcccccggccaaccctgcacgcccgaggggggtacggggttggcccgagcccgaaacctgacacccgaaccctattaggggtagaagcgacgaaggtgttcgatgttccacgggttaggcagctctgtgccgtcgcccgcggccagccgaacggagcccggccgggggacgctgatcactcgatacggaccctcccacattggtgagagcttgctcaatccagcacgcgtttggacgcggcgtaggacgaggtcgttgacgcagagtgatcgggcccggatgcggcgctgatggtagcgccgtaggctctgctggtagcgcgcggctcggagggccgcgcgccgccttcgctcctccaagtagtcgaggtcatctctgcgaagctgatcttgatcagcctcgcagtacatggtggcccgaggggacctcagggtgagctcggatgggagaaccgcttccgcgccgtagacgaggaagaaaggcgtttccccggttgctcggcttggtgtggttcggttcgcccagagcaccgctggcaactcctcgatccacgaatcgccgtgcttcttgaggatgttgaaggtcttggttttaaggcctctgaggatttccgcattggcgcgctccacttggccattgcttctggggtgggcgggggaggcgaagcagagcttgatgcccatgtcttcgcagtgatcgccgaaaagttcactagtgaattgggtgccattatccgtaataatacggttaggcaccccaaaccgggctgtaatgcccttaatgaacttaagtgcggagtgcttatcgatcttgacgaccggataagcctcgggccacttagtgaacttgtcgatcgcgacatacagatactcaaacccgcccggggcctgcctaaacggtcccaggatatcgagcccccagacagcaaatggccatgaaagtggtatgatctgcagggcctgggccggctgatggatttgcttggcgtggaattgacacgctctgcatcgccggaccaggtcgaccgcatcattgagagctgtcggccaatagaaaccttgacgaaaggctttgccaaccaaggtgcgcgaggcggagtgggctccgcattcgccttcatggatatcggcaagaagctcgacgccttgttcccgaggaatgcacttcaggaggattccgttagccgcgcgccgatagagggtcccttctaccagcacgtagcgtttggagatgcgctggacgcgttcactcccttcgcggtcctcgggtagagtcttatctgtgaggtatgcttggatctcagcgatccaagcaatcaatctaagggagctgggagcactcccctcgggtcccgaggcctggactccgacgggcctcgggggccggtcaggcgcgtccgtctcccctaaggggtcgggtcgcgccgacggctgggcaagcctttcttcaaaggcgcccggtggggtctgggctcgcgaggaagcgagccgtgagagttcgtcggcaatcgtgttatcccgtctgggcacgtgccgaagctctatcccgtcgaaatggcgctccatacgccgtacttggcgtacgtaagcatccatctgcgggtcagagcaccggtactccatacagacctggttaacaccaggaggcggcggatccccagtccagctgccaccctaagtcccgcaaggagtccctcgtactctgccatattattggtcgcccgaaaatcgaggcgaaccaggtatctgaggatttctccgctcggcgaggtcaacgtgacccccgcaccggcgccctgaagagacagggagccgtcgaactgcatcacccagcgggcggtgtgaggcagctgcgaggggcccgagctggcctcggggagtgagacgggttcgggagccggggtccactctgccacaaaatcggcgagagcttggctcttgatagcgtgacgtggttcaaagtgcaaatcgaactcagaaagttcaattgcccatttcaccacccgtcctataccctctcgattatgcaagatttggccgagggggtaagacgtaaccaccgtgacccgatgcgcctggaaataatggcgcagtttcctcgaagccatcagaatagcataaagcatcttctgggcctgagggtatcgggtcttggcgtcccggagggcctcactaacaaagtagacgggccgctgcacctttcggtggggccgatcctcttcgccaggggccgcatccctggggcgctcttcgtccaagcggcctcgcggggcgcactcgtcttctgtgccgacgacctcggggtcggaggacgacaggcgcggccttcccacagtggcctcggggccgtcctgggggtcgggggctcctggcatcgtcggacaagcgggcaaagggccaactctggtcgtcgggggccttaggccaccgttcggctcgggggcctcttctccctgctctctcccgggtcgagtcggcacagggttaacctcgaggtcagagggcgataggtgcggccttcccgcagtggcccccgggccatcctgggggtcgggggcacctggcaccgtctgacaagcgggcagagggccagctccggtcgtcgggggccttgggccaccgttcggctcgggggcctctcctccctgctctctcccgggccaagccagcacagggtggggatgcgcggaatgaggattgtcctcatcgcgctccacaaccaacgccgcactaactacttgcggggtcgccgctaagtagagtagcaagggttcatctggctccggggcgatcaaaactgggggagagctgagatacgccttcaactgagtgagggcacgttcagcttcctccgtccaagtgaacggcccggagcgtttgaggagcttaaataagggtagcgccttctctcccagcctcgatatgaaccgacttagggcggccatgcaaccggtgacgcattgcacatccctaagcttgctgggggcgcatccgctctatagctcgtatcttctcggggttggcctcgatgcctcgggcagagaccaagaacccgagaagcttgcccgcaggtacaccgtacacgcacttatcggggttcagctttatgcgggcggagcggagactctcgaaagtttccgccagatctgaaagtaaagtttcttggtcgcgcgtcttcacaaccaagtcatcgacataagcctcaacattacgtcctatttggctacccaaagaaattcgagtagtacgttgaaaagtaggacctgcattctttaacccgaagggcattgtcgtataacaataagttcctatgggggtaatgaatgtagttttttcctcatcctccctagccatgcgaatctgatggtaaccagagtatgcatctagaaaacacaaaaggtcgcaccccgctgtggagtcgacaatctgatctatgcgaggcagggggtaagggtccttaggacatgccttgttaaggtcggtgtagtcgatgcacatccgaagtttgccattcgccttgggaacgaccaccgggttcgccagccactccggatggatgacctcgcggatgaatccggcctccagaagtcgcgccacctcctcgcggatgaaggcttgacgttccggggcctgccgccgcactttctgccggatcggccttgcgcccggccgtacggcgagacggtgctcaatcacctccctggggaccccgggcatatccgccggtctccatgcgaagacgtcagcgtttgcccgcaggaaggagacgagcgcgtcttcctatttgccatccagaagaccaccgattcgtgtagtcttggacgggccgtcacccagggcaacctccttgaccgggacctcgtcgcatgtgatcatccgctgcctcggggcggcgggaacggaggtgccaagcctctcgtcgccaccctcgggcttggacgcagcggcgaggtgatccgcgcgctgctccatacaagcaagcgcgactttgaggtcgccatggacagagatggggccaccggggcccggcatcttcatctgaaggtaagcgtaatggaccgccgccatgaacttcaccaacgcgggcctccctaggaccgcgttgtagggcagacttaggtccgccacatcgaagtttacccgctccgtgcggaagttgacggatccaccgaaggtgaccggtaggtcgatatgacctaacggccatgtgtgccccggcgtcacaccgataatcggctgggacggccagagcaccatccccggggccttgatggcgtcaaaggccacgggggaaaggatgttgagggctgcccccccccccccccccgtctatgaggacacgccccaacttcacgttgcaaacggtgggggaaaccaccatcgcgatctgtcctccccgggcaacacacggtgggtggtcggtctggtcgaaggtgagggcaacctccgaccaccgcgcccgacgcgtcgcctcatgagtgggggccgcggccagaagctctcgcttcatggccttaaggctccggcgagaaacgtgagcacacgctcccccatcgacagtggcaatggtggccccaggctcctgaaagcctaggtcatcatcgccgccatcgatgtcctcgacgggggccttctgcttggcctcacttcgccgattgccggagggtaccgccggggacttaccctctcggcgctcctgcctcctctcctcctcccactttctcgtccgctcagccaaacttttgactgcgcggcagtccgcgaggtcgtggagggaggtgttgtggacgatgcaccacttgccggttgggcgctccctgctgggagcgccggcctccttctttttgtcgctcgcaggcctcccctttcgggtggcccgcgaagcgccctcgacagtgaggacatgaccctcgtcgtcggaatgggctgacctcttcttcctcctcctgtcacgtcgccctgtctgagcagcggacccgggggcggccgaagttgccacaccggaaccggaggggttccaggtccaggcctcctccttacgagccactcggtccgcgagctgaaaaagctccgcggtagtctggggctccttggaggcgatcttttcgagcatgcggttgtgccgcacacccccctgaacgcgtagatcaccgcgtgtgcagggatgcatggtatggtgttgcggacttgacagaaccgctgaatgtatgagcgaagtgactcatcatcccttcgctgtactgcgtgtaagtccgcttcttcacctgggcgcggatatgtgccttgaaagttcatggtaaactgttggcacaaatcctcccaagagtggaccgacgcgggtggcaagttcattagccaaccccgcgcctgtcccttcagggccatgggaaagaaattcgccatgaccctgtcatcacccccggcggcctcgatcccggtcgtgtagacctggagaaactcggcggggttgacgctcccgtcatatttttcggcgatggtgggccggaaccttgggggccaacggacgttccgaaggctcgctacaaaggctctacagccgacaccaccaaccgggggcacggagggctgatccccgcgtccgtgttgaggtgacactccggacgaggaggcaccctccgttgcgtgggtagcacgtcgaccattacgccggcgctcgataccgatgcgggcatctggccctccacgctgatcttcccgggtcagaggtgctgacgagggagtggcagccgaacggcgagcaacagccgccgctcgccgcgccctccgccttgacgacacggagccggtggtagcagcgccagaggtcttggtggctgtcacgaccggaaataacccaacgggcattccttacgtgcgtgcatgaatccttgtcccaggaggcaaggtacaccaaaagttgatacaaatcagagtttaacaagcggaagcgtaaatagttaacttattacatgggcagcgaaggcccagcacacacagagacaaacgagaaacagcggaagactagggcgacgaccacaggcgcttgacggcaggcacgagctagacaccaaagccttcatcttcaaggagctcctcttctgggcttgggaaaaattgagcaagactgagtacaaccaccgtactcaacaagacacacccacaaatgcagaataaatgcaagggagtacaagggaattataatataaagggttagggttgcagtaaacagcatttaaagacatttagttgctcagggctattttgtaaacacgatcttagaactatacaatattattaatcaaggccgtgaacccacacgaacctgccttaacccaaggcctatgatgattcagaccgaactggcaacccgaccctgggtcccagctcgtcccaagccaacccaggccaaccattccatattttagttgttaagcaagttttaagaattaaaacactaacttgggtacattgctcggcttgcccataaccgagggctcggctattcgaatagattatactctgatcagaggtgtacatctttacccacaagacacatcttcctcacgtgtaaccacgtgccacataccaccacggtatacggacggaagacgtgacatagtttccaacccatcctagccttagacaagagtaccgacccaatcccgcctacggccggaacccccgggacaggcaggcaggactgagcccctagcagcagggcaccaaccctctgccatatgacatctcgactaccgggccgcagctcgtgtagccttcatttgccctggagaatgtccatcgacccccgacttcatccatctccaatccgtgtacttttgtttatgactagactgagccacaaactaagccttacccactagacatgtggaagtacggtagtgctttgcaacagaggcccgaagaccggtccttatatggccgaggtgctaccatcaaaaccatgcaccccgagcccagcctaaaaccattttaggggattttgaatagagggggcggtgtgaagccaattccacaataatccaacaattccatagtgtccaggtgatatgaatatttcccaagtctaaagttataaaaccacctaatgttacctaattaaattgcgaagcatctacctaaatttaaactagggataccacgagtagagtgtccactagttgaggttttgtttactctagggtgaacaaggtaataataataacaataacaataataatatggtcataacaaaggtaaataggcatggctaaataaaacagtgataacgcgggaatttaaataaagcgataatgcaataatttaaatcaacataattttacaaactgggattcaatatgttcaaagatgatatgacttgccttgctcgctttcccaaccgacggcttcgacttccacgaagagcggatcttccgaagctgcagcgtctacacgaccaacggaaaagaaaaggcttttacactactaaactccacataacagcagaaacaaagcacaaaaatgggttcttgacttcttaaggaaaaattagagacttgaacggtccaattccgagttcaaatggccaagatatggccatttgaagtttatatgctctttaaatggatatttacgaatttcttcatttaaattttaattaaaaatctcatttattgcgtcagccgagggagagggcgcgcggaccgggtccacgggagtggggcccacgcgtcagcctctcggtccacggtggaccgggagcacgcggctggcggcggtcggcgccgtgggtcccacgcgtcagccgcacccgcgggctcgggcggctgacggccgggtcccacctggcagccgcgagggcgcgcccgaaggcggcctcgccggcacggccgaaggtagggggacgcgcccgcgccccgatggtcaccgccggcgaccaccggcgcggcggagcggcacccgagagagaggagggaagggggaagcgaatggagcggtcttcggctcaccccggtcgacggcgacgacgggaacggcggccgaagcggaagaaggcggcggcgcggttcgggacgacgaggacgacggtgctccggcggtcggcgagcgaaacggaggcgcggacgaggtcgacgggaacgcggcgaagccgatggaggtgacgccgagtggggaggaagtccggagcgacggcggcggcgaaccggagcacggcggcgacggcggagagaaagtgcgacggtgcgggctcgattccgacggggagagtgagcggcgagtggcggaaacggaggagcggagctcggggattgattttatagcgacgggagagagagagggcggccggagagaaaggaaaccggccgcggagttctcgggctccattgaagacgccggcgacgattgcgggattcaaatcggacgaatccgagggagagagagagggaaaagagggggaatcgggagagggaatcacggggagtaattcgcccctctttatggcgcgcggggaaggcgggatgcggcggaatcggcggcggcggcggcgctagggcacgggcggcggcgggcgcggcgcggggttggggatgacaggtgggccccacccgtcagcgagggtggcgggcgggcccgcctgtcagcggcgcgcgctcggggaggagccgatgggccggaggggaggagagagagagagggagggagagaagtgggccgagccggcccaagaaggaaaaggggggggaaagaagacttttagggatttttctttttataaaccttttcaactttgtttatttcttttcaattattatttgtgctctgaaaattccactaaaatttatttacgcattttaggcttttaggaaatatacaaaaatcctccaagcctcatttgacttttatctttgcacattttaattgttggaggctttcacatgaattttaattattctttgcacaatttcgaggatgtattttagagtcgttttgggacgtgacaaacctaccccccttaaacggaatctcgaccccgagattcggaagaactggcgaagagatcgggatgggctgccttcagctcgtcttcacgctcccaagtagctttttcttcggcgtgattgctccactggaccttgcaaaaacggattacccggttcctggtcctgcgctccatggtgtccaggattttcactggcctctccacgtaggtcaaatcttcgcgaacttcaatttgctctgagtcggcctgctcggatggcactcgaagacatttcttgagttgtgacacatggaacacatcatgcacgttgcccaaggaggcgggcagctccaactggtaagcgacttctccgcgccgagcaatgatacggaaaggacccacataccgaggtgcgagcttcccttttgtctggaacctatgtactcctcgcaatggcgtgacccgaaggtacacaaaatcatccactgcgaattccaggtcacggcgacggttatctgcataacttttctgccgggactgggccacctttagattatcccgaatggttctaactttagcttcagcttctctcaggatatcagtcccgaacacttggctttctccaacttggtcccacaatagcggtgtccggcatttgcgcccgtacaacgcttcataaggtgccatttgtatgctggcttgataactgttattgtaggagaactcggcataggggagactcttatcccaggtcttcccgaaatctaggacacatgcgcgaagcatatcttctaggatctgatttagacgctcggtctatccatctgtctgcgggtggtacgcggtgctgaaatttaatcgggtaccaaactcttcttggagcttcttccaaaagtgagaggtgaattggcttcccctatcagatacgattttcttgggaacgccatggagactcacgatcctagcgaagtagagctccgctagtttgttccctccataggtggtcttcacaggaataaatcgagctaccttggttaatcgatccacaactacccatatagaatcatatccaccttgggtctttggaagtccagtgatgaaatccatcccaatttcatcccatttccattcgggtacttggagtggttggagaagtccggccggtcgttggtgctctgccttgacacgctggcacacatcacacagggccacgaactctgcaatttcccgcttcatgctaacccaccagtatttctccttcaagtctaagtacatcttggtactgccagggtggattgaataaggactttcgtgagcttcctgaagtatcagctgtttaagttctctgctatctggaacgcatacccgatttccattccatagggttccgtgttcatcctctgtgaaaccagcggctttaccctgtttcatattcttgaggagtccatgcatgtccggatcattcttctgagcctcgcggatttgatcgagcaaggtgggcttggcttccaacgcagccaaaaatccacgaccaactatgtttaggttcagggcttccatctgttggttaagttcgggtggaatgccacggacgttaagagtgttgcaatggctctttcgacttagagcgtcggcaaccacgttggccttaccaggatgatagtgaattcccacatcataatccttgatgagttctaaccatctcctttgccgaagattcagatccgactgagtgaagatgtatttcagactcttatggtcggtatagatttcacagcgattcccaatgagatagtgccgccagatttttagagcatgaactactgcggctaattccaagtcatgtgtagggtagttgccttcatgaggtcgtagctgacgtgaggcataggctaccacatgaccatcctgcatgagcacgcaccccaatccttggcgcgaagcatcacaatacaccatgaagtccttgcgggtatccggcaagattaacactggcgaggaaaccagcttttccttgagagtttgaaacgccttctcgcattgcgggctccacacaaatttctcttctttcttcaacaactgtgtcatgggtcgagcgattttggagaagttctcgatgaatctccgatagtatcctgccaaacctaagaaactgcggacttgggtaactgtcttgggttgcttccaatcggtgacggcggtcactgtttcgggatccacagcaactccttttgcagatatcacgtgccctaagaatttgacttcggacaaccagaactcacacttgctaagcttggcatacaattgatgttcccgcaactttcccaacaccagacggagatggtgctgatggtcttcttctggttgtgagtatatcagaatgtcatcaatgaaaaccacaacaaacttatccaagtattccatgaacactttattcattaagttcatgaagaaggcaggagcattggtcaaaccgaacgacatcaccgtgaattcatacagcccgtatcgcgtggtgaatgcagtcttcggaatatcttcttcacgaatacgtaattggtgatatccggaacggagatcaatcttggagaatacagtggcacctttgagctgatcgaacagatcatcgatccggggaagagggtacttgtttttgatggtgacttcattgagagctctgtagtcaacgcacatcctcttcgtcttgtctttcttctctacaaaaatcacaggagcaccccatggggaagtactcggacgtatgtaccccttttctttcaactcttccagctgtttctttacttcggctagttcatttgctgccatacggtagggtcgcttgtgcagaggagtggttcctggagcaagatctattcggaactcaatctctcgcttaggcggcataccgggtagttcttccggaaacacgtctccgaactctctgacgatgggaatttctgacagttctatctgatgaagttctgaacttctgacagaggctgggggtgcaaagaaaacaaccggttgttctggccctcggtacagagtaacagtgcgtctcgcgcaatccactactccttggaattgtgccaaccaattcatcccaagaatcacatccaagttcttggtgtctagcagaatcagatccgagggaaaaggaatcccctgaatttctatagggacggcagggctataatactttgctgtcataacccctccaggggtggtgatgagcagagggtttctaagcctttctacccccaactgatttctccccacgaatcgcacagatataaacgagtgggaagctccagagtcaaacaaaattgtagcagggatggaatgaacgaggaacgtaccaacgatgacgtctggagttgtcagcacgtcctcggccgtcacatgattcacacggccccgaatgacattgtcacaccctgaaaattcaaaatatataaattgttgtttaaatggaatttttagaaataattttaaaagtcttgaaaagaaaatctatgtttaattaataaattccaatataaaattgggccagataaaatttcattaaatactttgcttaattctataattcctagatttttctgggatttatttgagctaagaaagtatttttaataaatggaattgcatttaagaaataattttaattgaaaaaggttttaaaaagtcttcttttggctttgggccgaaagtcggcccaaaacctctcttctctctctcctcggcccagccggcccagtccgcagccgcgcgcgcgcgttcggccgctgacaggtggggcccacccgtcagtcgtcgtcttcctcgggccgaaaccctagtttcgcgccgccgagctgccgtcgccgccgctttccaaatccggccgcctctttccttctccggccgaatcaatagaggggaaatgatctccgggatctcctctaccttttctcctttggaatctttggttaaatcgctttggaaagctttggaatcgagttcgattcggatcggttttccctctttccaagccgcgagtttccttcgccgttgccgtcgccgtgggccttcgccgccgcctccgagcccctttaaaaggacccccggtgtctcctctacccgtcgcagccctcgccttcgcctctcgtcgccggagtagctctagcgccgtgtgccctagcttcgccgtcgccgccgccgcttcagccgtgctccgccgtcgctccagctgtcgccgccgctcgggaagaccgccgtcgtcatcgccaagtcgccgccgtcctcgtccgccccttcgcagccgtcggaacccgctggagcttcgtcgccgtcgacaacccgaaggtagccgccgcttccttctcgtcgccgtcgccgtccgttgcttctccgccgtcgttttggtcgtcggtgtgttcgccgtgccgtccgctacccgttggtgtcctccgttcgtgccgtagcgccgccgttcgccggtgagcgtgcgccgcccgagccgtctgccgagccgagccgccgccgccgtcggtgacgtcattgctggcgtcatcaaggccgtccgccgtgaaccgccgtggactcgatcaatctcagccgtccgatttggatcggatcaatctcggccgtccgttcgcgtgaaccgccgcccatgcgccggtccaccaaaccctagcccgctgacgcaataaatccccttttccttttcaaaaataattcattattgcgtcataattcaatttaaaccgatttaagtgttttaatccgatttaatctttaaaaattcataactaattcatcttagctccgatttagttggttcaagtctctaaatttttctaaaattgagatctacacattaaaaatatccacatgtactgttcatgcttgtttatgtgctgttttggtgattttgctcttttctgcttagattccgtcgtttccggagagtccgttttcgcggaagaagagtttgaagagttccaaggccagcaaggcaagtcacacagatcccaaacaaccctttgagcatgttgatcctatttaaagctattgtttctattcaactattgcatctattttcgaatgtcattgggtggaattgacctattctttgttatggccctttcgtacttgattaccttattccttgataccttgggttatattaatttgactagttgagctttatttatattggttcaactagatattagatataattgcttagccctgcttagaaacattagtacacttatgggataactaatgattcactattatttcatgatggcttattgatagttcacgatggtcaatcgtgattagttaattaattattgtgccaactaaaacctggtaatggtgggttgtgagcacatggttttgatggtcgtgctcatgacaattaaggaccggttcacgagtttcggttgtgaaacatttatcgtgccaaccacaagccagcatgggcaacggctttatcttttgtatagcatggttcattgcggggcaccagactgagaagtggcggagataagcccacgggggtcgctggggagtccatgccttgtttataagggggtgattatgatccaggaaggtgcgctgcagtgaattgtgttatgcgaggggtattgtcacaactcctttccgagataccgtggtggtattgaggcacatggtgacatgatgtggggttgtgtcttgtgggtacagtggtacacctctgatcagagtaaaactattcgaatagccgtgcccgcggttatgggcgggtctaacaatgtctttcgtgattagtctcacacctctcatcattataaaagatgctataactggtaataatttgattagctcctggtttggaatggtacattcctggtttggagatagaactgtgcagccggggtggttgttcagaatggttgggcctatacaacagggtatgttgtatagcgttggcttaatattgtttaattacttaactgttttgttaaattctcaaatgtttgctaaatgctgcttttgcaaatgaaaccctattatgccatcctttgttatcctgtgcacttgcatatttgctgcgtggcttgctgagtatgtcatatactcaccttgcaatcattcatcagaggaagagttctacaatgaggctgatggtgtggaggattaggtgtagccttggtcaagctgcctgtggagtggagccgtctacgccgtttatttattttccgctgcttagaactttattgattgagaggaactatctacctctgtaatgacattctattcgcttattaattagagtaatatttgtactctattatcaatttgttattgtgtgcctcggctgattcctggacgagggttcacacacatgtaagcgtttggaattttggatagaaattccgggcgtgacagacatccttcccgccgttgttggagcggggaggcgcttggccttgctgacgccttggctttgggcatttatccgcaaagtgcccgggctcgaagcagttgaagcacagacgctgctgaccttgagcgtccctgcggccttgaacgggctgcacagctggcgtaggaggacggggcgcacgagtcccttgctgattctgctgctgctgcggctgtgggacgcgcaccacgaattgaggtcggggcgctgggcgaggttgctgctgctgctgctgctgctgctgcgaggaggatccccctgggtagggattggtgtagcgaaccctctggttagcaccctgttgattgcggaaattcgccaagcggcgcttgtgcgattccaactccttgtgcttggcttccaagcggatgctcttgtccaccagtcgttgaaaatcaggatagtccccagagactagacggacggacagctcagggtccattcctgccaagaacttctcttgcttctcctcatcttcccgcacatcctctggggcgtaacgggccaggttgttgaactcatgcaaatactccatcacggagcggttgccttgcttcaactctcggaattcccttttcttaagagccacgactccagcgggcacatgggttctccggaaagcggcggtgaagcgagcccaagtaatcggctgtccctctggctgcgtagcctggaagtggtcccaccagagagatgcgggtccctgcagctgatgggcggcgaagacgactttctcctcatcgctgcactgcaccgtgtctaactttttccccacggcatgcaaccaatccaaagcatccacggggttgttggagctggagaaggtaggtgggcggatgcggaggaactcggcgagtttagagtgttggggaggtggtggtggagcattctgttgtggcgggttttggaggtggtggaggaaagcggtcatcatgttggcttgctgggcgaggatttgggtgagaatggcgttggtgtctggtggtggtggcggaggcggaggaggaggtggaggtgggttgccctggtggttgtggttgctgccttcaggttggttgccatcaccggtagcagcatttctcctggtcgtcaccatctgaaaaccccacacagaaccagcaaacagagagagagaagctaacaattaaaactatccacccacgactaccataattcttaaatttattactgctattaaattggttcattaaagttcaagttgcttaggcaaataaaataagacaggctccgacatagttacaccacacaccggcataaccatgccccacacgactccaaaaaagacaaacgagaaagaacacacgcgcaagcctactaactgctcgtctactgctgcgacgggccagggcggaaggtgagcaacagcgcaccctccgtgctaccaacgccggaggcttccccctcctggggaaccacgggcgcaggctcggcacgaggggtctcgacgaagcaggtccacgccagggactgacggacaagctcaggcctggaggtgctcttgcgggcggtgatcttctggctgcggcagacacggcgacgcttggggcggcagatctctccctgggcgatcttgagctgatgcagctgcgcctccactgcgtcgaggtccttcttgagctgcaggttctcctggcgcagctccaggatcttcatgttgttctcgaccatcccgcggcgtaccatctgatggaagtcgatacgagccgcgtcgtacgcctccaccatgcgtgccaggtgcacgatggtagcgtcatcctccgagctagcatcccggaaggtggcgtagtcgcgggctcctccgcgacgagggtggtagcggtagggcgagtgctgcaactcgtccgggtagcgctggtgaagggtgccgatggcgaggagagcggcgctctggcaagcggcggggaaggagtctccacccgcggtgactgccaacgaagcccgctcagaagagccggcgaggatcactgcggtgacctcccacccagcgtggggctccgcgtcgtctccctcctgatccggaagcggcctggcctggtagtccactccgtgtggataccccaagaccacgcacatgcctcgcaactccaagacgaagccagtcatgtccaaaccatgacgggtgacgctgccggccatctacaaacaaaaacaaaaagagaaacaacattttaaaggtcagattttgatgataagtgaagcagcaagacagagagagactagacagttttcacaaataacaaaggatttttatttttgaaaatattgctaaggcttgggatctacggctcgtcctagggtcaagggaggctctgataccaacttgtcacgaccggaaataacccaacgggcattccttacgtgcgtgcatgaatccttgtcccaggaggcaaggtacaccaaaagttgatacaaatcagagtttaacaagcggaagcgtaaatagttaacttattacatgggcagcgaaggcccagcacacacagagacaaacgagaaacagcgaagactagggcgacgaccacaggcgcttgacggcaggcacgagctacacaccaaagccttcatcttcaaggagctcctcttctgggcttgggaaaaattgagcaagactgagtacaaccaccgtactcaacaaga

SEQ ID NO: 27483 - DNA, 4010 bp, Oryza sativa
gtgtgtttttttaagctctcatactctttggtgtgcgcaaaccttttcctgttcagcccaatggctaacaagcaaaagcgcaccaagctctctccgagtgttagcggtgacgacgggaagccgaacccacgccgtcgagctggtactccaccgccccctccacgccaaagtcctaggcggaagaaggcgctcgaaagggtcgaaggatccgcgacttcgacatccacgggtgatgaagaagggcgccgagatggggagcgtcgcctcttcgtctacggcgacggtagcacgccccagggcgcgctccaagctgcgggcgcgctcttacgtcacccgcccgtcgtccctgacccggagtctccagcccaacgttgctggacgacgtagccaacttggtcatgacggcacggcagcacctaggtgttggtgggcggtcctccgccactgtcacgtcccaaatcgactctaaaatacatcctcgaaattgtgcaaagaataattaaaattcatgtgaaagcctccaacaattaaaatgtgcaaagataaaagtcaaatgaggcttggaggatttttgtatatttcctaaaagcctaaaatgcgtaaataaattttagtggaattttcagagcacaaataataattgaaaagaaataaacaaagttgaaaaggtttataaaaagaaaaatccctaaaagtcttctttccccccccttttcccttcttgggccggctcggcccaactcccccccctctctctctctcctccccgcggcccatcggctcctccccgcgcgcgcgccgctgacgggtgggcccgcccgccaccctcgctgacgggtgggtcccgcctgtcatcttcctcctcgcgccgcgccgccgcccgcccgtgccctagcgccgccgccgccgcggattccgccgcatcccgccgtccccgcgcgcattaaagagggggaaatcactccccgtgattccctctcccgtttccccctcttttccctctctctctccctcggattcgtccgatttgaatcccgcaatcgtcgccggtgtcttcaatggagccgagatctccgcggccgtttcctccctctccggccgcgctctccccctctcggcgctatatatttgctccccgtgcctctctcctccgtttccgccgctcgccgctcgctctcgccgtcggattcgtgctagcgccgtcctcctctctctccgccgtcgccgccaaccttcggttcgccgccgtcgtcgctccggacttcctcccgactcggcgccacctccatcggcttcgccgcgttgtcgtcgaccccgtccgccccttcgtttcgcccgccgaccgccggagctccgtcgccctcgtcatcccgaaccgcgccgccgcgttcctccgctccgttcgtcgtctccgccgtcctcgtcgtcccggggtgagccgaggaccgtccttcgctttccctcttctctccgctctctcgggcgccgctccgccgcgccggtggtcgccggcggtgaccatcggggagcgggtgcgccgcctcccgtcggccgtgccggcgaggccgccttcggccgcctcccgcggctgccaggtggggcccggccgtcagccgcccgcgcccgcgggtgcggctgacttgtgggacccacggcgccgaccgccgccagccgcgtgctcccggtccaccgtggaccgagaggctgacgcgtgggccccactcccgtggacccggtccgcgcgccctctctctcggctgacgcaaataattcgatttttaaattaaaatttaaatgaagaaattcgcaaatatccatttaaagagcatataaacttcaaatggccataacttggccatttgaactcggaattggaccgttcaagtctctaatttttccttaagaagtgaagaacccatttttgtgctttgtttctgctgttatgtggaatttattagtgtttgtgtcgcgaccgggaaaattgccttttcccgaacgctagtgtattaatccccgtcccaggaaaagccggggtacaccacacaaacatggtataaaagacacatctttattatatcgataatatttacattattacaaaggcacttaaggcctgacaatcaaaaataaacagcagcggactagcgggcctacggctcaatcttcacaggcgctcaactggggtataagccaggactccacctaagacatcttctccaaagcttctcttactgaagaggggaaagattgagcaagaataagtacaaccacagtactcagcaagccacaccggagatgcataattaatgcaagggagtacaaggggataataatataggggttaagttttgcagtaaacagcatttaaaagtcacttagttgccccaaagccattttataagacaatcctagagctacacagtattattaaacaaggccgtgaaccctcacgaacctgccttaacccaaggcctacgatgattcagaccgaactggcaacccgaccctgggtcccagctcgtcccaagccaacccaggccaaccattccacattttagttgttgagcaaattttaagaattgaaacactgacttgggtacattgctcggcttgcccataaccgagggcgcggctattcgaatagattatactctgatcagaggtgtacatctttacccacaagacacatcttcctcacgtgtaaccacgtgccacataccaccacggtatacagacggaagacgtgacatagtttccaacccatcctagccatagacaagagtaccgacccaatcccgcctacggccggaacccccgggacaggcaggcaggactgagcccctagcagcagggcaccaaccctctgccatatgacatctcgactaccgggccgcagctcgtgtagccttcatttgccctggagaatgtccatcgacccccgacttcatccatctccaatccgtgtacttttgtttatgactagactgagccacaaactaagccttacccactagacatgtggaagtacggtagtgctttgcaacagaggcccgaagaccggtccttatatggccgaggtgctaccatcaaaaccatgcaccccgagcccagcctaaaaccattttgggggcttttgaatagagggggcggtgtgaatccaattccacaataaaccaacaattccaaagtgcccaggtgatatgaatatttcccaaagtctaaagttgtaaaaccacctaatgttacctaattaaattgcgaagcatctacctaaaatcatactagtgataccacgagtagagtgtccactagttggggttttgtttaatctagggtgaacaaggtaataataacaatagcaataataataaggtcataacaaaggtaaataggcatggctaaataaaacagtgataacgcgggaatttaaataaagcgataatgcaataatttaaatcaacataagtttataaactgggattcaatatgatcaagatgatgtgtcttgccttgctcgctttcccaaacaccgtcttcaacttccacgaagagcggatcttccgaagctgcagcgtctacacgaccaacggaaaagaaaaggctcaaacactaataaattccacataacagcagaaacaaagcacaaaaatgggttcttcacttcttaaggaaaaattagagacttgaacggtccaattccgagttcaaatggccaagttatggccatttgaagtttatatgctctttaaatggatatttgcgaatttcttcatttaaattttaatttaaaaatcgaattattgcgtcagccgagagagagggcgcgcggaccgggtccacgggagtggggcccacgcgtcagcctctcggtccacggtggaccgggagcacgcggctggcggcggtcggcgccgtgggtcccacgcgtcagccgcacccgcgggcgcgggcggttgaccgcccggccccaactggcaaccgcgggaggcggcccaaggcggcctcgccgg

SEQ ID NO: 27484 - DNA, 554 bp, Oryza sativa
aaggaattgagaatgatgttaccacaagacatttggttgagatgttgtgggctatggatgaaagtcgtgcggagactgtgttagcagctcaagatcgtgaagatcggaatcgtggtaagatttgcaagctagaagacaaggtggatcgtttggagaaggaattagccgcattgaagggagaagcaccgccgcagaaggctaggattcgtcttaccgcaaggaagagagctttgtttgtccctcgctatcaattggcgccaaaggtccgcgtggtggagaaagaagttgccccagcaaatcctccggtcatcatcataagtagtgatgaagaagaagaacccaagcgcaacaattccaagtttgagtgggtagctatcaaagatgaggaagatgagccgaacgagccttcaatcgacctcctatgctcggaagaactagaatgacttgttaagtcgttgtcttagatcgttgtgttagcttgtgtcgcgtcccaaatcgactctaaaatctatcctcgaaattgtgcaaagaataatttaaaattcatgtgaaag

SEQ ID NO: 27485 - DNA, 5030 bp, Oryza sativa
  unsure (1)..(5030): unsure at all n locations
caagcgcctgtggtcgtcgccctagtcttccgctgtttttcgttgtctttgagtgtgctgggccttcgttgcccatgtaataattttatatacgcttccgcttgttaaactctgtattgtatcaacttttggtgtaccttgcctcctgggacaaggaataatacacgcacgtcgggaacgcctgttgggtgatttccggtcgggacagcttgcttggtttaagtttgtttgtgtgtgtgggtctcgcatgtgatttacatcaatggggggatgtaagtgcatgcgtttgtttgcttttgagtgttaagaagtgggtgagtttagtggtgtgagagtcttcagtttgtaataatgaaactcagttaagatcaataaaagttaaagtaattctctgtcctaagtagtttcccccgttttctcttcttatcctgtccataccagatggtgaacactcgtagcaatgggaatggtcccaacaaccccaataatatcatcaatggagagattcccactttggtccaagttcttgctcaacagtcacagcttatgaacatgatgatgcggcaatttcagaatcagcaaaaccaagggaataatcatgcacctccccagaacaagttagcagactttcttcgtgtgaggccgcgtgttttctctagtgccactaatcctgttgaagctagtgattggctacatcccatagagaagaagttgtatttatttcagtgtactgatcaggaaaaggtctcatttgcatcacatcagttgcatggccatgcctctgaatggtgggatcacttccgccttaacaggactactgctgaacctatcacttggcttgaattcaccgctgctttccaaaagtcgcatataccatcgggagtagcgtctctcaaaaagaagaaattcaggtcgcttacccagggatctcgctctgttactgagtatctgcacgagttcaatcgtcttgctcgttatgctccggaagatgtgcgcaatgatgaagagcgccaggagaagtttttgggaggacttaatgatgagctttcttacccacttatggttggagattaccctgatttccagaaattagtggataaggctattcgtcaggaggacaagtacaatcgcatggagcagaagaaacgtcggattgctcaattcaagacacaacagggaaataatcaaaagccgcgtcttaccttaggaccccagtccatgccacagggaggttcttcgtctgttgttcgtccgcaacgtcagttcttcaacaacaatgctggcaacaacatccgtaatcaagctccacgtcctgttgcagctccagcacagcaacaaccctgccaagagggagcaagccagcaagcccgtggtgtgtttcaactgtggagatccaggacattatgctgacaagtgtccgaaaccccgacgcgtgaaggttgtccctgtccagaataactctgctgtaccagcatcaaaggcccgtgtcaatcatgttgctgctgcagaagctcaagatgctccagatgtggttttgggtacgttccttgttaatcagttactgcaacagtacttttcgattctggtgctaacacattcattcttatctatgagttttgcgggaaatcatgggatggaagtagaagatcttagacgtcctttgatggttagtaccccaagtaatcaagcactctctttgcaacgtagcccctcggtcagaatagaaattaagggagtaccatttctggccaatcttatcttgttagaatccaaagaccttgatgtcatcctagggatggactggttagccagacataaaggtgtgatagactgtgccaacaaaaaagtaactctcaccagctatgatggtcgagttgtaaccgttcatgcattgtcatctgagtctttaaggtcaagactgaaccagataactttggaagagattcctatagtccgggagtatcctgatgtgttcccagatgatttaccgggtatgccgcctaaaagggatatagagttcagaatagatttggtacctggaacaactccgatccataagagaccttatcgaatggcagccaatgagttggcagaagttaagaaggcaagtaggaatgatttttgggggcccttttttaaacccagaaggatacatagaccgagtcataccatgggagctncgttattttttgggaaaagaaagccatactcagagaatgtggtggactatcgtgcactaaacgatgtgactatcaagaataagtatccactacccacgattgatgatttgtttgatcagcttaaaggtgccactgttttctccaagatagatcttcgatcagggtattatcagttgagaatcaaagaggaagatatacctaagacagcttttaccactaggtatgggttgttcgaatgtactgttatgtcttttggacttaccaatgcccctgctttcttcatgaacttgatgaataaggtgtttatggaatacctagacaagttcgtggtggtctttattgatgatattcttatctactctcgaaccaaagaagagcatgaggaacatcttcgtcttgcattggagaagctacgagaacatcaactgtatgctaagtttagcaagtgtgaattttggttgtccgaagtgaaattccttggtcacgtcatctcagccggaggagttgccgtcgatcctagtaacgtggaatccgtaaccaattggaagcaaccaaagacagtttcagagattcgcagtttcctaggcctcgcaggatattaccggaggtttatagagaatttttccaagattgctaagcccatgacacgactgcttcagaaagatgtgaagtacaagtggtcggaagaatgtgagcagagttttcaagagttgaaaagtcgcttaatatcagctcctattttgattttgcctgatccaaagaagggtttccaagtgtattgcgatgcatccaaacttgggttaggttgtgttctgatgcaagatgggaaggtggttgcctatgcatctcgtcagttacgtccgcatgagaagaactaccctactcatgatattgagttagctgcagtcgttcatgcattaaagatttggcgtcattatcttttcggtactcatacagaagtgtacaccgatcacaagagtttaaagtatatctttactcagccggatctgaacatgagacaacggagatggttggaattaattaaggattatgacatgggaattcattatcatccgggaaaggctaatgttgtagcagacgctcttagcagaaaaggctattgcaatgtgacagatggacgacagttgccattggaattatgcaaggaatttgaaagattaaatttgggaattgtcaatagaggtttcgttgcagccttagaagcgaagcccactctaattgatcaagctagagaagcccaaattaatgatcctgatattcaagagatcaagaagaatatgagaagaggaaaagctattggtttcttggaagatgagcacggaactgtatggttgggtgaaagaatctgtgtccccgacaacaaagacttaaaggatgcaattctgaaagaagctcatgatactttatactccattcaccctggtagtaccaagatgtaccaggatctcaaggaaagattttggtgggcaagtatgaagcgtgaaatcgcagaatacgtagcagtatgtgatgtttgtcagcgagtcaaggcagaacatcagaaacccgccggtttgttgcaacctttgaagattcctgaatggaaatgggaagaaataggtatggattttatcactggtttgcccagaacgtcatcgggccatgactctatttgggtgatagtcgacagacttaccaaagtggctcatttcattccggtaaagacaacctattctggaagtcgcttggcggaattgtatatggcaaggattgtgtgtttgcatggcgtccctaagaagattgtgtctgattgaggcagtcagtttacttcaaatttttggaagaaacttcaggaagagatgggttctaagttgaactttagtactgcttatcatccgcagacagacggacaaaccgaaagggtgaatcaaattttggaagacatgttgagagcttgtgctctagatttcggtggaagttgggataagaatctaccctatgcagaattttcgtacaacaacagttatcaagctagtctacagatggctccttacgaagcactgtatggtcggaagtgccgcactccgcttttgtgggatcaaacgggagaacgtcaggttttcgggacggatatcctaagggaagcagaagaaaaggtaaagatcattcaagaaagattgcgagtggctcaatctcgtcataagagttatgccgacaatcgccgcagagatttgagttttgaagaaggagattatgtgtatcttcgtgtcacgcctcttcgaggagttcatcgttttcagaccaaaggaaaattggcaccgcgttttgtgggaccttataagattgtcagcagaagaggagaggttgcttatcagttggagttacctcaatccttggcaggagtccataatgtgttccatgtgtcgcaattgaaaaagtgtttaagggtacctaccgaagaagctaatattgaccagatagaagtccaagaggatttgacttatgttgagaaaccaatccgtatactggaaacaaatgagagaagaaccaggaatcgagttatccgtttctgcaaagttcaatggagtaatcactcggaagaagaatcaacttgggaacgagaagatgaattaaagtcagctcatccgcttctgttcgccagttcttccgaatctcgaggacgagattctgtttaaggggggtaggtttgtcacaccctgaaaattcaaaatatataaattgttgtttaaatggaatttttagaaataattttaaaagtcttgaaaagaaaatctatgtttaattaataaattccaatataaaattgggccagataaaatttcattaaaa

SEQ ID NO: 27486 - DNA, 1278 bp, Oryza sativa
gtgagagcttgctcaatccagcacgcgtttggacgcggcgtaggacgaggtcgttgacgcagagtgatcgggcccggatgcggcgctgatggtagcgccgtaggctctgctggtagcgcgcggctcggagggccgcgcgccgccttcgctcctccaagtagtcgaggtcatctctgcgaagctgatcttgatcagcctcgcagtacatggtggcccgaggggacctcagggtgagctcggatgggagaaccgcttccgcgccgtagacgaggaagaaaggcgtttccccggttgctcggcttggtgtggttcggttcgcccagagcaccgctggcaactcctcgatccacgaatcgccgtgcttcttgaggatgttgaaggtcttggttttaaggcctctgaggatttccgcattggcgcgctccacttggccattgcttctggggtgggcgggggaggcgaagcagagcttgatgcccatgtcttcgcagtgatcgccgaaaagttcactagtgaattgggtgccattatccgtaataatacggttaggcaccccaaaccgggctgtaatgcccttaatgaacttaagtgcggagtgcttatcgatcttgacgaccggataagcctcgggccacttagtgaacttgtcgatcgcgacatacagatactcaaacccgcccggggcctgcctaaacggttgtcacgaccggaaataacccaacgggcgttcctgacgtgcgtgcattaatccttgtcccaggaggcaaggtacaccaaaagctgatacaattcagagtttaacaagcggaagcgtaaatagaattattacacgggcagcgaaggcccagcacacaaagacaaacgaaaaacagcggaagactagggcgacgaccacaggcgcttgacagcaggcacgagctagacaccaaagccttcatcttcaaggaactcctcttctggacttgggaaaaattgagcaagactgagtacatccaccgtactcaacaagacacacccacaaatgcagaataaatgcaagggagtacaagggaattataatataaagggttagggttgcagtaaacagcatttaaagacatttagttgctcaaggctattttgtaaacgcgatcctagcactaaacaatattattaatcaaggccgtgaacccacacgaacctgccttaacccaaggcctacgatgattcagaccgaactggcaacccgaccctgggtcccagctcgtcccaagccaacccaggccaaccattccacat

SEQ ID NO: 27487 - DNA, 1270 bp, Oryza sativa
tgatactcccatgcaaagcaatcaacatactctttaagtagctcgattatcttaaccttataatcgcactctcatatttttgtttacaaaagtcggccttggtttggttccatcacctatgtctactgcctccaacggatcggccgatgtaaacccttgtccaagcttctccacttcatcaaaatcttcaatagtttcaccaatatcgttctttgtagaccgatatttttgcaccctcttttgtaaccactctaaattagcctctttactcattatacaaatttatatggcttagccgtgctacactagccagctttacagagataggtacaaattttccatcggagatactaataaaatcatagctagaaagattcctccccgataagcattgaatattcccatgacgccactcaaaagtagcatcggccattgcaacctcggctgatgtatccgcttgaacaatttcaacatcatcgccgtcccattgaattaaacattgatgcaaggtagaaggcacacaacaattggcatggatccaacaacgacccaaaataacattgtagttaccttgcacatcgacgatgaagaaagcggttggtacgtcttgttccccacggtaagttctgccgaaaagataccctccgcctccgttggttcaccattgaagccattgagaatcatgttggtcttcttcaactcatcatctccacgcccaacttcttgaacaacgagtacggcatcaaattcacggcggcacctccatccactagcatcctagagaccgacttcccatctatatgacctttgagatagagaggcttcatatgacggtttgactcatcggcttctcaaaaaccgcatctttaggacctagtgaaaattgagcaacctcagcttcatccatagcacaaaactccataggcaacatacacgccatgttgacctccatgtcttcctttggagatgcttcatctttagtaactgattgttcttccttttcctcttgcaaaacaactggttcttccttctctacgaatttactcctccataccggtggtggtcacaactcattgaacctcctatctctttgttcttcggcctttttctctcttatctcttgagcccgaagacgttgcaaccttctccttggagtagccgtcaaatcctcaggcatccacctaggtttctgctttgttccaggaggtaaatagaaacccctgttaagtctatttgaagacgaggaagcccctacattgcttcctgcaaa

SEQ ID NO: 27488 - DNA, 693 bp, Oryza sativa
aagcttaacaactcgcaaccaaccgttgaatccaccaattggtctattcgaggagagggaagtggtctttggggcacgccttgttgagatcggtgaagtcgacgcacatcctccacttctgttggctttgcgtactattactggatttacgagtcactctggatggaggacttctcttatgaagccagctttgagaagtttgtctagttcttttcgtatggcttgtttttggtcgggtgcgaatctccgcagtttctgcttaactggcttggcatcgggtcgcaacatcagtttgtgctcaatcacctccctggtactcccggcatgtctaacggttgccaagcgaacacgtctgcattgtctcggaggaaggtgatgagcacgagttcctatttgtcgtccaacgatgccccaatcttgacagttttgtcggggttggagctagacagtgggatgatcttgatggcgccatctggttttggtgtcttcttgggcttgctcactttcttggggttttcggttgtggcgggcgggttaggagtatgctcgaccatgtcgaggctccgcttgtcgcattgtactgccaacttggtgtctccctggatagtgattgtccctttcggtcctggcattttgagcacttggtatgcgtaatgcaacgcccccataaatttgcgagtgcagtcctcccaa

SEQ ID NO: 27489 - DNA, 17762 bp, Oryza sativa
atatatatatatatatatatatatatgaatgtggataatgttagaaactcttataatatgaaacggatgaagtaatattttagagaaaaaaaatgaaaactaaaactacacgtctaaccgagggagtaatatataagcaggcattttattcgcgatttcgcatcggtttcttcgtcaactgatccaattaattcatcgatcgtccctgaattcaaacagtacttacattatatagtttggcaagtaacacggaaattaacgtcagctctagcagctatatatatataacattctacctgttcagacaaacattcaatcgtgctcgattgacctcactaattcatccctgtaaccagctaccacttcaattttcccgcgcaaacgccttaataattagatcgagtacgataatctgacgttcttgtgctaaccaaattataaggggacgatcagcctaagtaggagtaggcgagtagctatcatccgagacaatggggttcgcgtacaggatcgcgagcgcgtcggagtacctggcgatcaccgggtacggcatcgccgacgtgaagctggcgaagaaggcgtgggtggcgccggggcagcggtgcacccgcttcgatatctccccggtgaactacaccttcgaggtgcaggccatgagcgccgagaagctccccttcatcctcccggccgtcttcaccatcggcccccgcgccgacgacgacgactgcctcctccgctacgccaagctcatctccccgcacgacaagctctcccaccacgtcaacgagctcgtcaagggcgtcatcgagggtgagacccgcgtgctggccgcctccatgaccatggaggagatcttccagggcaccaagtccttcaagcaggccgtcttcgagaacgtccagctggagctcaaccagttcggcctcatcatctacaacgccaacgtcaagcagctcgtcgacgtcgccggccacgagtacttctcctacctcggccagaagacgcagcaggaggcggtgaaccaggcgaaggtggacgtcgcggaggcgcggatgaagggggaggtcggcgccaaggagagggacgggatgacgcggcagaacgccgccaaggtggacgccgagacgaaggtgtacacggtgaagcggcagggcgagggggcgaaggaggaggcgagggtgaaggcggaggtgaaggtgttcgagaacgagagggaggcggaggtggccgaagcgaacgctgacctggcgatgaagaaggccgggtggcaacgacaggcgatggtggctgaagtggaggccgccaaggcggtcgccattcgtgaagccgagctgcaggtggaggtggaacggactaacgcctctaggcagactgagaagctcaaggccgagcatctcagcaaggctgtcgtcgactacgagatgaaggtccacccatctaaccatataccaccttcagtttttaatatattataccattgactttttataaacgtttgaacatttattttgttcaaatatttttacaggtatgaaaaaattaagttatgcttaaatagcatttgacaataaattaagttataataaaataaataataattacataattttttaatataacgaataatcaaatgtatctcaaaaagttaacgtcatatattaaaaaaaagaacagtgtgagtacaatcaaaactttaaaactacattgactatgaatgcatgttttagtttattaaaaaaactttcacaatacaatattgcttgatgacctataaatagtcaaatgtcgtataattttgaccggtgaaagagggaggtaaacttttttttttctcttgaggggatgttgaaataaaattttaaaaaattctctggatttttctcctcgagagaaatagaatatatgaatttttttattaatgtgcatatttttggttaatatgaaaaaaagaggggatatccttttgagggacaaataaactttctcgctgaaatagtacataaatctcgattactttgatgtgtacatttacactatgccatgtgattaaaaagggatttgctaaccgttattcaacaaaaaaaaattggagaacaaatcttactaattttggaccatcttatgggcatatcttaaagatttatacaccaaacttcttaagctccggcaactcgttgcaatggggcgatgaccccacctagttaggatttagagcagggaaagaggaaagaggggcaattccatggcttatagggagaacagggcaccgtcggcctagcggatgcatggtatgagcgattaggaggaggaggttggcgacgacaaggccaccaatggggctatgtattgcaagcagcggggggcatcaactggtgaactgttaggaggcggcagttgagagcagctagaccaccatcggcaacaggccagtggtggcatcacgtatttcttgacgatgttgacaacgaaaaaggcgatgggagggagggcgggtgggcagcgtgggaagtgaatcggtcgctggtagcggtggatgggttaggggaggtagcggtggatgggttagaggagctgcggtagccaggggcggatccagcatgggggcggcgaggtctcgaacccccactaaatttttttaccatatgtagataagagtgaggattgtaactctatctagtttgcttagatcctattgctatttctttctggattcgctactggcggtagcttatgtgtaaagaggtggatggatcccaagtcccaaccactgaaactaaattgggtggctcaaaaattcaagcgatagagcttcaaaatttgtcaaaggttatataggtagttgcctaaaaagaattgttgtacatacatgacaaatctgattggaaagtgtgttttgtgcagggttcaaattttcggaccgtaatttttgaagtttcgggtctatcggacccaatacaaaattaattattccacccaagttttttttatcgttttcatattatttttgtgaatttggaaaattttgttaaaaattcaaattatttcaaaccgaaactactgcaatttccaaaatttgggaaaattcggtcttatgggtaccccgatagaaataggcaaaataaaaatttgaacactggttttgcgcatggcttatgcgtgtatgtaggtgcaagaagcgaactgggagctgtacaaccggcagaaggcggcggaggctctgctgtacgagcaggagaagcaggcggaggcgcggcgcgcgtcggcggacgcggccttcttcgcgcggcagcgcgaggccgaggcggagctctacgccaagcagaaggaggccgagggcctggtggccatgggcgacgcccagagcgcctacctctccgccatgctcggcgcgctcggcggcagctacgccgcgctccgggactacctcatggtcagctccggcgtgtaccaggagatggcgcgcatcaacgccgacgccatcagggggctggagcccaagatcagcgtgtggagcaacggcgccggcgccggcggcgaggtcggcgaaggcggtggcgcgatgaaggaggtggccggggtgtacaagatgctgccgccgctgctgacgacggtgcacgagcagaccgggatgctgccgccggcgtggatgggcactctgactggcggcgccccctcgtcgaccagttgaccttgacgcgttttcgatatttcccgtactatgtgtctatgtgtatattgctgtgtaactgtatatatatactcccttcgtctcataaaaaccgtgacacattctagtaatagtactacgaatttgaacatacatctgtccagattcgttgtattatgatgtgtcatatccatttgttttttgtcagaaggagggagtatgcatgctgtgtgtgccatgtgtcctcttcagtatgccttggatatgtatgcttgtatttcatcagaagaacaaatgtatgtactgattgtgtgaagatttacatgagtatataactgcatatatattttgatatttccaaagacaataatcgaaagagaccgtcagcgagttgaagcccttgccaccaaggcccatcgctgctagatctggcattaattagtgggatgcaggacaagtattttctacatggcactcttggccttattgctcagaattaataataccgatgctgaatgcatgcagcaacagtatatatatacgataataattaacttcttcttatacattgatggagttgtcatcgtcgtggttgagtgtcggctggcgatgggcgacgacgacgtcgatctgctgctcgtcgtgcactagtacatcatgttgctcgggaggcggctggcgcgtgatcccggcgtgcgtgcacagtgcccagaggcaggtgatgaggtcggcgccccatgaggccaacgccttggcatggccctgcacgtcgttggacggcgcgaggtagatgacgaggtgcacccagaggcgcgccagctcgtcccacgcctcgtcggcgggcttctccctgagccagtggaacagctttacacctctccgcaccgtcgggtcttggaacgaattctcccactggtcgcctgatatggcggtcttggcgatcttcttcttcctgcaccggcggctcggcgggcacgcgcggcagccgcaccgcctggacgcatgatccaggcagctcctcgttttctcgtagcagctggacacccacgtctcttcgtcgggcagtagctcggggagttgcaccaccagatgcatgcactacttggacagcaccgacgcgatctggcattctttcttctgcttgtccatcgtcgtcgtcgtctcgagcagctccgtcgccaggtgccacgccaggatggcctcggtggtggtcatctggttggaatcgatgcctgatggaaggttgatggctccagtgctgcgattgataatgtgacatgaacacaaggcttggatgatctgcgcagtggcactcgccggcagggtaacctgggaagtccttgcaaaatgcttgtcgattggaccacaggcgtcaagaatggatacctggcagattgtcatcttgtttttggatgaagaaagtaaacaagagcgtatgtagatgaccacggaatagattttctgtagccaccgtctactgggccggtcgtaggagcacagcatgcggactatgttccaatcggagaacacaaacgaggtcaggaagtcatgagcctcgatgagaatgaccgtgagcacaagcaacatggtcaaggagaggatgagggacggggaattcacaggggttcttccccagcccatgattcggcaatataatggtgctgcatccttgttgacgattagtatgtcaactacggcatcgatgaaaaaatacaagaagataatggaggacaagaagttggtgcagaaaaggataggttgggacatcaccacaggggcagccgcttgctggtagtagttcttgaggagctcaagctccattagaagcacttggaaaggcctttggagttgatcatgggatgagttgctgcctgggctagagaagttgagtttgaggaggccgtcgagcatcatggcgcgagccatgtcggagccgacctccaccatcgggtagtgctcgaactggcgccggagcatcttgaaaagagagaaagataggcataagtcctcaaggaaatcccctatcttgccatggaagatgttcttgtgtttttcgcgcatctcccatattgttttcacagtgaccaagggccattccttgttggagtcgctgttggagtagtcatcgggttcggcgatacagagatgtaaatgcttctgctcgttttcgttgcagtaggtggcttggtgttggtggccaccgccggcgacgacgacgcgccttcccatcaccacgaatttgcagttggacatgtcgttggccggcacggcgctccggccatcgccgtcgcggttgtacttgtccatgactttcgtcatgtagcctgcaataacaagagggttcctcgccgtgtggaaggagtagctggcgaaccacctgttcacagcgcttagcacgagcttcacaaagcacaggaaccagagcacagcgaaggtgatgctcagggatttatcatctggcaatttggagcatatgaggtagccgatccacactaggtgactagtgtgtcgtaggcgtaatccatgagcgtgaaccgtccgatccccctattgaaggaggagccatcggttggcagcagcatcccctgcaccttcttgcggatgatctcggcgaggagcatccacaggagtatcaggaggagctcggttttgctccggttttcgctctgtgaaaaggctgaggagaggagaggaacgaactggaagaagacgaagttgagcacaaaacgcacgatccgggtaaggtcgtaccggtaaaggaacatgccaccgcaggtaggcagccgcctgaaggagaggcgtagaaagccggtgctgtagatgatggagcccatgagagccatgagcaccaccatgaacgtcagcttcatgttcatcaacaaggcttcatgttggtcggcctgagtaatatatactatgggtgttgccggtgttgttccgggaagaggataaaactccatcgcaccatgtcttgttgaaagctcgcaaaccgggagggaggccaatgccaaccctatgatgaaatggcaatgtgctcatgctggtctgtgcatgcatgatcatatgctatgtgtatgttctagctaatggctatcgcatttgcatgcaaacaaatactcgcatgcatacgcgtatatatagtccccggcaatataaatatatattcatcgacaagatactggcctcctcattccttgcttagtttaatgatgcactcaacgaacgtgctaggcatcgtatatgcagatccggcaatttatgctgcaggccgggatttcacctagctggcttctattccttttctctacaggctatatatgcatgatctgtatcgatgctttaatcgttgttacaacgaaaggaacgcgtcgtatgaggtctgttacgtagttcttattccatttagagatggttctctttgtaacagttgagacgataaaagactaataattaatgcatcaaaacatttttttattacttattattattattcttttcttggtattcatgtagcaaaatttcttttatatgcgctaactatctttttctcctactcacttctatttctatatcaacaaaaagagctcgctattaattacagttgtacatgctctaatccccatttcatttattaaggcttataagttcactctccccctacctttattttttcttaaatcgactttgcatgctctctatatgctattataaaagcgaagtcatcctcctctcttcatgtaaaatctcatgctaaaaagccatattacccaaaaaaaaccatctctcccaaaaccagtttcccaaacaaaaccaacgacctaccaaataaaataaaagactattaattagtttttttatttttctctatacactgttgcaacacattttgtattttttttctccatacagtactgttgcaacacacgggcatcgcactctataaaaaaaatatacaggagttccttgctcattgtacctgcaaaggacctttcaacatatacctttccatgttcgtgattacatttgcatctatacttggaaaataagtgcaggagttcgttactcagtatagcagcaaaggaggacatttgaattcaacctcggaggcagatgcttgtgcatgctcgtgcatattagaattaaatacttatctatcatcgtaagcaactaaaagaaagctagctctgctttactccatatacttgtatatatactactttgctggcccataaagtaatggtaaattaatgcggtataaacatctacctcaatctcaaaatacaaagagttttagacttggacacaaatatgaagaaagtagataaaattaaataggaaaagattagaattggttgagaagatgaagcacgcaaagaaattgaatgatacaaaattgtaattagttgagaagagaataaagatgaggaagttgttatattttataggaaaaagtacgaattacccccctcaactatcgcggtcgattgaattacacccctcaactgaaataccagacattatataccctcaactatttataccggacaaataacccccctcaacgctgttttgagtggttttgacttgagcttgcttacgtggcgccaacgtagcaatccagtcagcgaaaaaaataaaaaattccctgggtcccacctgtcattccctagtggttatctctcgcgcacaggccacgcactatagatggccataaggcccgaggcccgaaggcccggcccacggcacgaccttttggcccggcccaagcatagcacggcccgacttgggtcgagcccgtgctagcccagcccgaccgccgtgccgtgcttgggcctccccaccggcatgctgggctggcctggcacgatcaggccggcccggcacgatgggccggcaggctaggcccggcacacaaagtatagggactaaaaatagacatataaatgtcatggtccaaagaaaagggacctaaaatagacttattttatctatttatatcacaacccaaagaagagggaggttaaatagactttttgagctatatatgtcacagcccaagaggagggaggaaaattagacttattctgagaaaaagcacgatggaccgtcgtgccttcaggccggcccggcacagcccgagtcatgttgggccatgtgtgcggcccgtgggccggcacggcacggcccggtgcgtcggtcgggccgtgccggcccgacaagccttggcccaggcacggccgggcctgggccgtgccgggcggcccacatggccatctataccacgcactcgggcggccggctgtggagcacgcggaggtggaggcggactgggcgaccggcggcggaggcgaagaacgcccgcgcggcggccagcggcggcgcacgcgcgtgcggcagaggaggcggagcacgcgcgtgcggctagctgcggagcctgcggaggaggaatcgcggaatccggccgagaaagagcatgcacactgcccgagatgtcatgcccctctcgctctgtttttactccactgccgtgtgtgtgtcacaggcaacacgcgtgcaaaagatcaaacacctacgaggcgagctcatctctatccatccatctcaacctcgcggaggcagcggcgccggcggcgatggggttgtgccagtggaggctggagaggcaggaggcggtgtcgaggtgcaaggcgaggcgggacatggcggcggagcatgtggtctacctccgggcgctgcgtgccatgggcgtcgccctgctgcagttcgccagtgtcgatgcagaccatccgaggcagattccgcgatctcgggtggctagctgcggagctccggataggcaaccgtcgccgcgtcctctgcgcgctcgccacgctgccctcgcctccacctccaggccgctgccggcacgcgccgccctcacctctgcctccatgccaccgtcggtagcgccgccgtgctgtgtcgcctcgtcttcccccgccgccgcatgcttcagaagaggagggagaagagcgccggtcgcgtcgcaccctttcgccggccgccgcgtgctttagaagggatggagaagagagaggtgggtggggattctgacgagtgggccctagcgattctttttagaaaaggatgactggactgccacgtgtgttatttgaaccctaaaccgcttgtaacagtgctaagggggggtgttttatctggtattgaaagtttagggtgagcaatgtctggttttcgagttcaaagtgtaatttggtcgatcacgatagtttaggaggtaattcatacttataataatttttaaatactaaaaatttattatatttcgagatggatagagtacttaatgggagaagaaaggaacagaatcagttttcattatagttgcctgcagggaggcgggtgctttaaaaaccaagagctcggtttaggccagatggacaagtcaacacagcggaactctaaggtgacgcagcgctggaacccaaggctattcctattgcaagtttcataagagtttagatgtcacataagctaaattgatgatacgtcaagaaatttatgaagagagaaggaatgagtttcatctagaaaggatgattttcatctagatgaaacttggtttacacactatctatgcagtgaaattagaatgaaaccccacttcaacttgatcattttatccttataccttggaaacgaaaataaaaccacattaatcaaatagtttcataatatcattcaataaataaaaattgtggatagcatatgaaatcacgaaatgaagctatgcatcaaagatcgacatttgtttcattcatcaatccgaagctcttttaattatgtagcactcttgaaaaccccaaaataaaactctccactaggaatagtctaagtggcgcaaaaggttaaacgtgaatatctccttgatcaagttctgtagtaaaggcagaacctaaatattgttacaactaagtattttaatttctttttccttccactttaaccctgtacatggctttgattatttctaactcatagatactccctccatcctaaaatataagttgtttatgtttcagagaaagtcaatgtttgactaacaaataaatatttcatctgtcttaaaatatattaatttaggatcagatagaatatatcctaatattattaatctagatagacccgtagaatatgtcctatccagttctaaagttactatatttaagaacatgataagtatgttatagttgtgcatgttatatcgttagatatatctgaaaatatatttatataataaaatttcatggttattaataatatattagaaataaatgattaaagatgatgtaaaaggctaatacgtctaggggtgggcattcaatctgatcaaagaatttagcctcggtcttcgatctttggttttttggacagctatagataaattgcacagtaaaatagtcaagaccgagcaatttggtcctggtcatgatcacaattttaggagataaaaaaacacacatattactaacaattttcagtcatccaaaatatcacacacaaatcacacaaatttcaataaactcagtgtcacaccctaccctgacaccacctaacagtgatgccagaggggatgcatcataggagatcggtgtgaatagactcccatagaaccgcgatgccggtaccaatcctaagacacgactgctggtacctgcggttaactcgagaggaatcattgcaattaataatataaataattatacctttaagaggtcacatcttcgaaacggctccgagagtgtaaccgacaaactagacccaatccacaagcaacggcttgggattagatagatggatagagaggtggatggatccaaaccatttggacttaattgggtggctcaaaaatttgaatgatagagctttgaaatctgtcaaaggttatataggtatagaaacaaaggtattgtacatgcatgagggtgtgtcgttcggccctatcgttcttcaccctaatgtctcagtctagtctcccgataaaaatctagtttaaggatgtctggaatatataaccacagtgatgttatatatgttgttgccttcttggaggcatcgcattggagattctgttttctggttgagaaagccaatgactacatacaacttgaaagtcgctagaaagaaacaactatgcagattctgaccaattattgtaacaccttgatctgacactaccgtacaacgacacttgatagggacatgttgcaggagaaggatgcaagccacttcctacaatacccgatattagtaccagtcttaggacatgttagaactcatgatgatagttatgaattattgcgatccttaacataaacattaaacttatttatgttaacttaacataagttgcagcacgagacgaccagagaatgcagctgacaacaaataaggaaccagcaacagcgaaaggagcgagctaactcccaactccctaaacaatagctaggaacctggacgaaacactaaatcttcttcacatcacttcaagcagggatgtggtttgtgaaagggcatgtagtctagtggttacaagagtctcagaagcaccttaggtcctgggttctcgactctctatgggagcgaattttacaggatctaacgacattgtgctttcagtggtaggcgacgtacccatcgacagcgagacacctgtggtgacttcgtcaatctcaaggatttgccggcccagttttcgaagatgctcatacgggtagggtttgcatgcgtgcgttcataggggtggttgcgttgtactgtgtaattcaaaaaaaagagacgcctgtggtaatttcgtcaatctcaaggatttgccagcccagtcttcgaagatactcataggggtggtgagtgtgcgtgcattgtgagtttctacgttccagtcttcgaagatgctcataagggtaggttttgtcggtccagtcttcgaagatgctcatagaggtagggtttgcgtgcgtacgttcatagaggtggtaagtgtgcgagcgttgtaagtttctgcattgtactgtgtaattttaaaaaaaaagcagggatgtggttaccaatacgttacctggatacggcttccaggccgcgtatccgtatcaggtacatgacggatacgggatacgtatcagatacgtattccgtacgtatctagcgatttgatgcagagccgccgtcctccgtctcccatcccgatgcatctcgcacgcgccctagcgagatgtcgccaccacacgctgggtacaggcatgcgtcgccgccgcgcccggcagcacaacaccttctctgcaaacaggcacagccgcacagcacctccgccgcgagtttagaggccgggtggcagccggccagggccgtcaccgcccaaggcaagcacagcaccggcagcatcgaagcaccgttgcagctttttatttgtttccctcactacttgagataaatccactcctctagtgtttcatgcttgatctgcaatgtctttattattttaggataagtagtcaaggactattgtttttgttagatccaacctccaaatgctactgtgcagtctgtactagtgcatctagcaattctaggggtagtgcggaatgttgatgcacatcaatcaaagagcaactgtgttgattgaactattaaatttgcgttttgtatgctatttgtagtcttgcactttattacacaccaattttttagggggcttaaatcgcttcgtcaactatagcagagttggagaagatggccatggaatgaactgcaactgcactaatcctagtattatattgccattttcttaaaagaatccttaattttttgtatttctaatatatatataaatatataaatgtattcccgtatccttgttttttggaaaataccgtatccatgtatcgacgtatcgaggtagcataggttaccatgggagatcgagccaaggagtaaaaaaaaaagtaaaagtaacagcgacggtgtaaatgtcctacaataactagagaaggggaaaaaaaggaaaaggagaatagatgggctaagttggctggtttgtttgggcttgacccattgcagcgaggagagagagttgagagtaggccctgtttctttgggccaagctaagctagcatgcacgcacgcaagatcaggccggtcagcaagctagcagcaactcaatgcagcagcagcggcatacagtgcaaaatattagtacaccttggagggagtggattctctcgagggaatatctccttattatttgcatgttatctaaataattataaaaaaaattcaactaaatagattaatatgtaatagatcactccacaaacatgaaagttaaaattcaacttctgcaagttgcaaaaaaagatattaaactatggctagtaaacgtatattcacattcaaatttatttttttcgttgtaacttatagaagttaaatttgaccttacatgtttatgtagtgatttaattatcatatattaatctatcttattggtttttttcaaatattttcataaccatttagaacacatgcaaataatgagggatgtcccttcaagagtttagaatagcttcccccaccatggaagattgaagaagagatgaagtggcttataaggatgagtgcctgaactttgtcaactttgacttaaataagtttatgtaaaacgaggatgaaaacactgagttaaaagtatagatggccatatggcccgtggcccgcggcccggcccaaagcacggctgtttggcccggcccaagcacggcacgacccgactggggtcgtgctcgtgccgtcccggcccgacagccgggccgtgcttgggccgcaccttcggcacgctgggccagcacggcacggcctggtcaaataaaaaaatatagggatgcaaaatagacttaaataatcgtataatgcaaggcccaagacaagaggtatacaaaatagacttattttccagccatttaaacacagtccacagagttgagggaccaaaaatagactttttctgtgaggagtatacagaatagacttattctccagccatttaaacacaacccacagagttgagggaccaaaaatagactttttctgtgaggaagcacgatgacccatcgtgccttctggccggcccggcatggcccgagtagtattgggccatgcctgggctgtgtatgccgccattaggctggcacggcatggcccggtgcgtcggtcgggccgtgccgacccgacaagcctcagcccaggtatggccgggcttgggccgtgccgtgccgggtggcctacatggccatctatagttaaaagtatatagttgtggttcaattcaactcatcaccgttttcggaactctaaaaacaggtgaacattctttttataaaatcacaattaaataatttaatggtgtaggatatcagttatggcgaaaatgtttgtcagggttatggataaggcataccctctatcctacgacttatgaaatataccgataagatataccttcacgtatacggatcgtttccgtacacgccattaggaactcgtctcaagttatggaaaatatctctgagttaagaaattgccgaagtcctactcggaaagggtaaaatctctgttatatcgtgtcggtttacatatccctaagtcttacatgagggtcaaggtattacacggtataaaagggacccctagggggaggcgaagggcatcgcatctcatcgaccacacacccaccaaagtttacgaaatcggagtgcacggagccaagtcaccgggagatctcgtcgaatccctcgactacgatctcgtcggtaccatctgtttcgactactctctttgtaatatgttcttatcgtcatcaatctcatataaactggactagggctattacctgacaaggggcctgaaccagtataatccttatcttttgtttgcttgatgtcgtactacgtagaccctcgttccaacataccccaataattaactcatccggtccgcgagtatcccacgtcgacagtggtgcgccaagtagggggacttggtgctcaaggatctaccagtatgacttcaggacttcccgacaacagtgtcatcgccagcgtcgatcaaggagtttctacctcgacaccgctagtgtggacttaggtcggatctattgtctttctggtctataccgttacaccaatctcggctggcccaatcatcattgggaacgagagaggtacggcaacgactgagagaaacgacgccccgccgacaattcctcccactcaggtggagaacggaacatcgacggccccaacatctgggaggaaccctcaggcggctgaaattcacccttcatgtgaaagatcaaagccgacaaggatgaccaccctaagaccgagatcttggtgtcctgtgcataagacaaccaagcatactctcgaggactgtccggtgatactccacgtacaagctgaactctacgcctgttgggaacgagggattcaacacacttcaccaacgggaaccacctactgtccgatccacagatctagatctcatgatttcacaaattgcagaatctttctctggaccctcaaaccagcgcatcatcgtgtccaacaaccatgagttcaaaccccgtgcgttgccaaggaaccagatgtggcaccgattccagataggtttgtgggatctgtcggtacaaacgagccatccgtgttgcacctccttgaaggcaacgaaccctcctcgcagtcacctagggatgtaaacgtggtcgacaacactaagacaagtgcgtccgcagcagcgagaatgcccgctcatcagttgcggaacttggacgcgatattgagagaaagtcctttcgatccagtaacaaacccagacgccagccaattggcagagcgactacgggaaactgtgacgaacctcaatgccgcgtttgccgaagcagcaggcggcccagagccgcacaggaacggagagcgacccaccaaggacgcggatggagaagacctcgccggaagacatgccaccggtgatcattcccctcgagaaagacatgatcctacaccaccacgccgtgaagatagcgatcttcgcgagcatctgaacagacgccagcagagtaggagggatcgtaacgaagacgaccatcgtcgccatcactctccttctcgtcgggaggacggtactccacatcgacaacatcatcatcgctctccctcgcggcgagaaagagacgacggccgaggaaataccccaaatgaagatcgagatcatcggccccataatgatcgatgcgataacgacaacaaccgaggtcaggagaataatcgccgaagacaggagagggacggcgacaaccgacgtgatcgaaactcccaatctccttatccgagtcgagatcgaggacgcgatcatcgctcgagaagccaagctcctgagccaagtgacccctcatcctcgtcttcgtcgtcctcttcggatcggcctccaagacgatgtcgcgaccacgggccacaccctatcccaggaaacggatgcagggcgttcacaccagcgctccgcaatgtgcgatggcccgagaagttcctaccgggatcgattgagaaatatgatggaggtacagacccagaagaatttctgcaagtctactccacagttctctatgccgctggtgcagacgacaacactctggctaattatttgctagccgcgttgaaaggttctgctcgttcatggttcgtccatctctcgccgaactcaatttcttcgtgggaagatttgtggtagcagttcatcgccaacttccaagggacatacaagcgccacgcgattgaagacgacctacacgctctaacttagaacccgagcgagtcattgcgggactatattcggcactttaacaagtgcaaaaatacgatccccgagatcaccgatgcttctgtcatccgagcattcagatcaggcgtccgagatcggtacaccacccaggagttggcgacgcgccgaatcacgtctgcccgaaagctattcgagatcatcgata

SEQ ID NO: 27490 - DNA, 41549 bp, Oryza sativa
gcaaatctcgagaagatcaaggcgatcgagaacatgaagtcgcccacaaggctcaaggaggtccagcggttgacaggatgcatggcttcgctaagccgattcatcgcaaggatgggagaacgaggacaacctttcttcgccctgctcaagaagcaggaccaattcgagtggaaccaagaagccgagaacgcatttatcgcgctcaagcgctacttgtcaaacccccttgtactcgttgctccacacatcaatgaagaattattcctgtatatcgctaccacgccttattctgtgagtacggttatcgtcgtagagagggaaaaagaacaacatcccgtgtactacgtaagcgaggccctccacgacgcaaaaattagatacccacagatccaaaaactgctctatgcggtggttatgacatcgagaaagctacgccactacttccaggctcacaaggtcaccgtcgtctcctccttccctttgggtgaagtcattaggaataaagatgtggtcggctgaattgccaaatgggtagttgagctaagccaattcgatatccactttgtgcctagaacaaccattaagtcacaggtcctcgccaattttgtagccatctggactatcccagaggatagcccagccgcccaaacggacaacgaaacctggatcatggcatttgacggagcactgaatagccaaggagcaggcaccggcttgacatcccccacaggagatcaattcaagcatgcaatccatctaaacttccgggcaacaaataacacggccgagtacgaaggactactcgcagggataaaagcagcagccgcgcttggcgtcaagcgactaatcgtgaagggagactctgaattggtcgcaaaccaagtacacaaagactacaaatgctccaaccccgagttagccaaatatctcgccgaggttagaaaactagaacgcaagttcaacgacatcgaagttcgacatgtctaccgaaaagacaatgtcgaaccagacgaccttgcacgacgcgcttccaggcgagaaccactcgagcccggaacgtttttggacgttctgacaaaaccatccatcaaggacacgcacgacgaaagcaccacagccaataccagcatctcgcagggagctgcagaggtcacaattcacaaacgtcgttgcgaacatagagacaacagacgactggcgcaccccgctaatcagattcttggagtcagacgagctgccggatgacgacacagaggtagagaaactatcccgtcaggccaagatatattgtatgatcagcaacgatttatacaagaaggccccaaacggaatcctcctcaagtgcgtatcatccgacgacggaaaaactcttctccttgacatccacgaaggcatttgcggatcacacgccggcgcacgtactctcgtcggaaaagctttcagacaaggctttttctggccaactactcttaaagacgcatgtgaactagtgcaacgatttgaagcttgtcaattctttagaaaacacaccaaattgccagcacaagcgctccagactatccctttgacatggccattctcatgctgggggctcgacatactcgggccattcccacgaggacaagggggctacaaattcctgttcgtgccgatcgacaatttcactaagtggattgaagcaaagccgacaagagaaattaaagccgaaaatgccataaaatttatcaaggggatattctgtagatatgggttgcctcaccgcatccttaccgacaacgggtcccaattcaccaacggtgatttccaagattactgcatcgaacttggagtcaagatctgcttcgcctcagtgtcccatcctcagagcaactgtaacatcctgaaaatttcgattctgaaatatggaattaaaaattcggaataatcaaaaatctttttaaacctttttacatgctaggatttattatgcatttgtgtgttttttatgttgtgtgccaaagatctcgattaaatcttatctccgaaagggacgccctcagtccaacgtcctttccttcccttaacttcacggtctgatttattaagtgcttcggtactaaacaaatcatagatctggatatataacccgaaaatcttcccttatatcgcaacacgacatatcttcctcaattcttaccctacggttatttcaaaccattctattaattcaacttgatatccccttcgaatgtctacgatcggtcgacatatttatttatcgtacgtcgattcgaatatcctcaaatttattcctactgcgacgattggatttctatgccacatgtcgtccctaaaatccttccttcactaccatcggtcgttcgtacgaacactctcaaaataaaataatcctatgaataaaataatcctacgacgaccgatgaattcgttcgtcaggcgttaagcctaaattcctatttggcaatgcaggttccataaataccaaacctcgtattgcagtccaaacattcaatccttgtgcataacggaatttctataccgaacacaaccatacactccatagtaccatacaagcacagtccgatatacagagccaaataaatgtccagattatacattccaaaatataaatacagtccaaattacaagttccattaatacatatgtcattccaattcaatccctgcaatatgcaaaagttcctattgcaaccaggccacctcccttccctgtcagcccagctcatctcacagaaagtctgttttgcctccctaacctcagagctacagccaccaagcaaccttctcagccaaagtctgttttccctccccagccgaaccagctgcctgcacagaagctgttcgatgaattgcctacaagccgcaacagggtttagcaccaactattgccggctcacaacaggattttgcaccaaaatatgcggccattcaataacatgggtcccttccacacagcaaaccatgcacccatgctcccggttcacaaaattcattcccaaaatacaaacaacacaatgaggaagatccacaacaccaagttcacaccgaaaatggcagagccaagtgcaaggggccatgcatacctggtactgtggcgatgtcgacattcagagctgctccccgcctaccctcacattgcctcccatacacaggcagccagcaaacctatatgaaccccaccaaagacagcagcagctcggctcctctccatttcttctccacctccacgctcgagctctgccactgcgctcctcagtcccgtgcacaagctgccatccctccatttgctccgccgcggccggctccggctgggcctcagttgagcaagaggacggataggccgccgcaccattgatcacccgagaacgactaactttaacatctaacccttagactcactaaccagctaaccctttactttctgtttcactgactcttccactttccgtttcgctaacttctaactccctaactcttaccttgcactaacccgctgacatttatcccctaacactgtgtgttcgcttgttaccgacgatcgaacacgtggtgtgcgaggacgaacagcaagcctaggatgatccgcgagccgatcgtcgacgcccgtcgaccacgcacggtgtgccgctactcggctgccgcagtgtgagcatctgctccttcccttccttgccctccttcccattgtcgtcccttagtgttgtcgatcgccttctctctgtttttccattcgcttgtcgctgtcccggcgcggtgccaccatcgtgcgctccgtcgccacctccttgcgtggccgacgcgtagccggtccgcgcaccgtcccccatccgacgcgcccggccgcgccgtcgccaggccgtcgcctgcgcctacacgcccggccgctgccccaccgacgtcttggcctcgcccaggacgccgccgagtggccgcgctgtcagccgcgccatacgcgcggcatcatcgtcgcgcccaccattcacgagtccggccgacgccgcctccgtagcgcgcgccgaccccgacatcctcccgccccgccgccgagcttcttcctcggtctcctctccattacccaccgctgccgccctctcaaccatccccaccgctgccggtctccatctccccaccgccggccttccctccctccctcaccaccggccaaccgtgccaggccgccgccgtcacccagccgccggcccctcctcccccactgcgctaggccgccgccacacgccgcctcttggccgccggccctccccacttccccgccgcccagccgccatgtcgccttccctccgggcgccgccggacaccgtcgcccacggccgcgccgccccgtcgcctagcgccctagccaggccgcctccccatcgccgccctcgctccctctctctcagtcgcgcgtgaggagaaaacgagaggagagatcgagaaggagagaagagaaacggataagagagagacaaaaagaaggaataaggggagatgacacttacatatgggacccatgcgggccccacctcatataatccctcatgcacagtaatgacactcctaatccctctcaaataatcccagtgacacgtggacccatcccggattaattcctgttaaaccatcttttagagatatgagtcacttacatgtggaccccatgttctagatctttcattcctccatataagtctacattagatccctctactccctcggccaaacccagagaacccatgtaccacagaagtctataaattatcccccagagcccaccatcggcctactcatacactaaagtccataagacatcccatgtgcaacccagagccctctctgaaagtctataacccgtccccaacccgaggagcaactccccttcggtttataaactcttccaacttcgaaaacccatatctttccaaccgtaactccgattgactccattcaacttccataatctctctaaaattgagatctatttaatggaaccattagttgcattgaatgttgctttattttacttcttttaggattgtgtgtggtttctttggccgtttatcgagcgtgattattctgggtattcttcggtcgtggatattctaattatctaactgttgcggatatcttgaagtcattagaaccaatagcaaggcaagtcactacgctcccatccttgaacatatcgatcctatgtttacaaatgtgttgttttacaaataaattgcatgctatttataaattgcgtacctatgcttgattatgcctacccttgatattgattacctttatacatgttgtatgcctttgattacctgagtcatttatttatatgcggtcaattattgatgatgcttagtaatgctatggtagacatacgtacactccatatttatgctagatgattatggatgtgagatcactcgatgtgagtgattgatgatttgtgggtggagacatgagcaccacccgccatacacaaaccttctgcgaaaaccaaaacttaatacaacaaaactatttcaactgggacgacacgaatagaatatgggtggttctgggaacggtaagccgctgaccccggtcagttaaggaccaagtcaagaagctaagcaggaaacgaaccgagtacgaccacacttcttgagtggggttagacccggtggactaggttattctcgtggggtggcaccccagacatggtaggttctggacattggtatggaaatgtggaagtatgtggtttaatgacgtcaaaactatatatatgtataatgtaatctctgatctcgggagcgccaggactcccctcacaaccggctcgaggtaggaatgtggcaccgggggtgcaatggggattcatagtccttggagcgggtgccgccatgcaagggtaactgaaaaaccgggccgtgacaagtctcatgtgttgggtgcgtcacggagtgtgggattaaaagcgtacatccactgcagtgtgagtaaattaaactattcgaaaagccgtgctcgtggttaatgagcgctaggacctgtactacccttgactagactcatagattttaatactacttagagtagatatgagagacatgagaaacttgcccaaagagtgggaaggttagtatagtagagttggtataggatgaaatgtgagggtaaaccgaaccaagcggggcttggagaggtggatgaaccctggataattacaacttcaacaataatgttgtttttcagttaaaactgctaggtcaataggtttgtgaaatgaattgtgaaaactagctttatgcaaataaaccaagccatacttgaacctctgtgtgcattagattcattttgtagtagtggcttgctgagtacgtatgtactcacccttgcttaattaaatcttttagaaaggagttggagtcgattatattcatgccatgctactatcaagtgcgtgtcgaagatgatggattagggaccataggttcaccagtcgttgcttgtggagttcgatggaccaccgctgcttcgcttccgctgttctatctagtactttggtattttgtattgtaagtgaccatgtttggtctatttcgggacccaatgaggttacccttgtattattattgtagaaacacctgtaaacgatgtcagttgtgatattatactatgctatgtgtgtaccatctactgatacaaggagtggtactatataacacatgggattaccggtgtatataaccgtacacgcgtacaaagtacacgcgtacagaagtatactgacgaggaacaggacgaaaggcgaagcgacaatgtgaatcttctcgaggaacatcgtgaacgagttgccattcgagcagccgcataccaacaggccctacgccgatatcatgagaaacgcattagagctcgcacactcaccatcggcgattacgtcctccgacgagttcaaaaccaggcaggacgcaacaaactcttgcctaagtgggaaggaccatacacggtggtacaagtactgcgaccaggcgcgttcaaaattgtagatggcgatggccgcgagttatccaactcctggaacattgatcagttacgtaaattctatgtataaaatcaatgtatcccaaatatgtgcaaatccattacccaaaggtattttgattttctcatgaaatatagcagtgccttacccagagatcccttaccacgataacacctactcttgaaatcgaacctactgaccctttacgccgtttcgacaagcctccgagaaacctacgggaattttggctggggacgcccagagcagataaggtcttgtcggatttgaagagccgaacgaccatgtaagacctggtcatgtaagagtgctcaaaaggtgtattagctaagccgtgtaatcggaaattggtttttccaacttcacagctagggcctaggcaaaatcgcaattttagataggcaagttacgagtcatcgagccttcccctccgagagcagacctcaccgaggacaaggctaggggctagggagagtaccttactcaataatgggcaaaaggcagcctataaaaagagtagtactcgttcacagcataacctgtttaagcattttcactagataggtttctgctttaattacaaaaccttaataaagataacagtatattacaaattcttgctagatgtttcttttacagggactaaagcctaccacgacggctattgccagttgatggaagcaaaaacctcctcggctagaggagcaagggatcgtgccagtcggtcgacctcgtccgccgataaccgcgaacggcgaaaacccccacgcaggaacccgagatccatctgcgagcggcgatcttgaatacaggtgaggacatgacctccagcgtaacggctggcgcgacgacattcctcttagaggctgatgtcgatctgctgtcctatgccctcaagctgagcacatgcccccctcatccaggacaagtagcccgccgtactctcctcgggctccgcgcgattaacctttagctgacgacaaacgtcggccatggcactgtagcagctcttaaggtacgagttcagccaaacctcgcagcctcggagagcctccacggcctggtccttcttcacgaccacgagcgaccgctcgagttcggcgacctcgaacttcgtcctccagtacgcgatacgcctatctcgttcagcgaggacgtcgtcgagatctacaaaggggagaggatgtaagggatgctgccttttaaacaaaacaacaagtttaaaagatgaacttctctatgacatcgcacccgagttctcgcgagggaatgcgaccacacccgggttagacgggccagaggtcatacccacctccccatcgttaacaatggcaggggcaggcgcatcgctcgaggaaggtaggtcgatcctcgcgacatcaggacatccgccttgctggacgtcctcagaatctacgcagctacgaaagacaaagaaacgcggcaaatcaacaaatggtgcgaagtaaaggaagtcgctctgcccataagacaacaaaagtgtttgtacaaaaatcacaatacaagacggagaaagtttactccttgtaaaggggaggatgctttccccgagatccgacacgctggacatcacgttctcccgcgtggcatcgacagcccccttcgacaagatctccttgaggtcgacgccagggagagctagcttcacgcacgcgaggacgtaacatgcccccgtgtggattccattggagatctcctccgcaacatgggcagcgtgccgcgatgggatggcctccatctcgcccgccagctccgacaacgccgatgtcagggacgtctcgtcgggatgtgtcgggatggaggactccatgccgcacgacaacgccagttgatgcaggctggtgaagctcctgcggagggagtcacggagggagaagaggatgtcatgtgtatcgttcatcttcttctctaggccctggcgttgcatctcgttgccggccacgatttccttcatcttctgaagatcttcatgggcaacctcgagttgcgcctccagttgaaccacccttccgtccgctgccgtcccgcgggccaccacatggtccatctgggctcccaccgcccgagaagtgctctcgagaaggcggtggcattcggccactatatcggaccaattggccactccgggcggcgacgcggccacaggagcggtggtaggccccacggactcaacgacaacaggggcgacctccacgcggggaatgatagcggctggagatccactcatcgccgtctcactcccgctttgcacggagaccgccaatgctttcctgtcaatggagtgggtcaagaggatataatcagcaaagatcaacaatgcgacaatggagtgggtcaagagtttcacttacttgccggcgggcagctttaacaccctcctcttcagaggaggagcgaggctgcccaagtcctgcgtaagatggcgaactatgacctcattctagcatatcaagaaaaaagggcgacaacggtgcgctttacctcggagccggcaaacttctgccgagaactagaaggagcgctcgacctcgcccagggctttcgcttggtcccgctgcctcctgcgacggcgggaacagaggaaatgttggcaacctcgtcggcgaccttgtccttgagcgaggcgaaggcctggtggtcaacaagaagaccgacaacatccgtcaatggcaaggcctacaggagttgaagttactttggctcttaaaaagaataaaaacacaaggtcccccggttctcgcttacattgatagcggccgccttctcggctgccaacttgtcgcagagcggggccggcggttcgtcggccgtggaggcagcgctgatcaagacctccttcacccgctgcatcacgagaaagacctgaaataaatatacaagaggatgagttaggcttcggcctcaaagtcatcatcaaaaacaggaggaagatcacaatataaagacgaataccccgcgaagagattcgagttatatcctccgctcccgtgtagtcgaatgcggggtgagcacgggcctgcagaggctagatccgacggctaacgaaatctttaacgacttcgtagccggttagcccttgttcccgaaggtcactcacggcatcgacaaaggcttggagggagggtgtaattgggggtttcgaggtccagtcctcggaacgctccggttggacctcgggcacgacaagaactgggtcgagttcttttatctcgaggtagaaccatctcgatctccattggctccgagatgagtggcattggagagggatgtacttcgccttcatgccatcacgaaggcggaatccgcaacatcccgaaacccgattgggctccatccaccggagttcatagaaaagcggaaaaggtctaagaaaggcactaccccgatgtaggcctcgcaaagatgaacgaatatgctcaagaaagcgatggaattggggttcaggtgcaagaaagaaaggccgtagaagttcaagaccaacaaaagaaattcggaaggaggaggcagaaaaccgcatcggatgaaatcttttacagctaccatacgacctaagacaggagaaggattggtacctcctgcctccctcgccatgatctgtttcggagggacggcctcctcggtgtgcagcttcttcaatgcagcagcgtcggaggaagactggtaaaggtctgccattggaagaagatcaccggaagaggatcgccggtgaagggtgttgaggattggggaaacgtagagtctgaggaagccggggaatagtaagggttttctggcaagcggacttgaaatggatctcaaaattccattaaataggagcactacctggcggttcgtatttcgaggaaaggggagagattgccgctgaaaattcctaaggcccgttggagaccgttgttcagacttcaatttaaattcaaaatccgcatcgatgggttccctgtaagtgttgtcgatagctccgtgtctctacggttaaacaaccgagattgacctagcgagtacgacaacgcactatcgggagaagtcgcatgcgataacatgaattcatttaagttgaagtcgggggccactgtcaaggttatggataaggcataccctctatcctacaacttatgaaatataccgataaggtataccttcacgtatacggatcgtttccatatacgccgttaggaactcgtctcaagttatggaaaatatctctatgagttaagaaattgccgaagttctactcggaaagggtaaaatctttggtatatcatgtcggtttacatatccctaagtcttacttgagggtcaaggtattacacggtataaaagggacccctagggggaggcgaagggcatcgcatctcatcgaccacacacccaccaaagtttacaaagccggaatgcatggagccaagtcgtcgggagatcttgtcgaatcccttgactacgatctcgttggtaccatctgtttcaaatactctctttgtaatatgttcttatcgtcatcaatctcatataaactggactagggctattacctgacaaggggcctgaagcagtataatccgtatcttttgtttgcttgatgtcgtactacgtagaccctcgttccaacgtacttcaatacttaactcatccggtccgcgagtatccatcgtcaacaatgctaggttgcaatgggagaagcatagaaagtcataattcattggtgtatgataggaattatgccaaaatgctcgatacctttatatcataatataactagcatggtggcccgcacagattgcgcggctagcatcgttatgttttttctcatataacagcttaaatatttttcatattttttttattaaaatatatttaaaatagcaacataattttgaattttgtactgtattgacagtgattaattattttctaatttcgaattttacttatttctaaattatattcctatatggactctagactcttctcctaatcatgcttatttttaaaattttgaattttagttatttataaattgtatttatatatggactctaaactctacttttattatttttcttaattttgactttcaatttgttctaaattcctatataaactctagactcatctttcaatattcctattttttaattctgaatttccgttgtttttaattatatttctatatggactctaaattcatcttttaatattctttatgttttaattcctaatttcaatttttctaaattataacctgtatggggtatagaatcttctttcaatattgcttttttttaattccaattttagttatttttaaattgtatttctatagggactctgacttctaggtttagttttcttattttttttaattccaaattttaattagttctaaattgtataccggtatggactttagtctccttttcctatattccttatttataattccgaatttcatttgttttaaaattgtattcctatatgaactctattttttttcttttttcccgattaatatgagaatttctagtaaggtagcccgcgcagattgcgtggcttagcatcttttttattttcttattttatttttaaaatatagtaaaatgggaacatgatttaaaattatggtctaacttgaccaaactaaccaatgtgtaatatttttattgtgttatatatacatgaaaattattaatcatttttttagttttatagttatttgtaaattatatttttatatgtactctatactcgtcgtgtaatattcgttattttttaaattccgaatttacattttatgtttttttacttctacatggtttcgaaagagaattgttaggaacagtttttaaattaaaaagagattcttttgatgatagaaatggttgtcagttgtcactggcttttgcagccgatgtgttttaggccattttacatctcgtcacctcgaacgcttgaacacctgtatgaattactaaatataggttaaaaaaataactaattgtacatattgcaactaatcatctcgtcacctcgaacgcttgaacacatgtatgaagtattaaatataggctaaaaaaataactaattgcacagattgcaactaatttgcgagacgaatcttttaagcctaattgctctatgattcgataatgtggtgctacagtaaacatttgttaatgacgtattaattagacttataaaaaaagtctgtgtcatttgctacagtaaaaagaaaaaaaaaacatcacagccacgcaccacacaataaaaatcatgggcatttcatggttgtgtcgactgtcgagagagtctcgagacacagagacagcggaaaaaaaaaaaagagaaggatgcgtagctactctgccataaccacttgctgctcctcacccaggtcgtcggtcgctgctctcctccctcagctcgcctctcgttgctcgtgcttgccccgctcgtctcttgctggtctttgttcgtgcttgcctcagctcgtgtccatggcggcccccagatcggaggatggtgggtggagagaaagaagaggaaggatggagaggaagaagaggaagattgagcacgtggccacgccgtcaaatcgaaaatatcctctctttctccatctagctcccagatccggccggcgtggtgggggaagggaaggaggccggcggcacggtggaagatggggaggaggcctcaccttcgtccggcatgccagtggcgaggagagcgcctctcgtcaccgtccgcctctcgtcgccgtccgcctctcgttgccgggagccggatccgccccgccccgcctcggcgccgtccgggccaggtgcgccgaggaccgcggtggccgtgagattgtatagtatgattaggggtttttttttttttttaccgattgtccgattccgtttccagtgtatagtatgattaggttttcctttttttttttaccgattgtctcatttcgagtttcttaatgctttttttctttcttcagtttttaactaatcctaatctagttctattttttttatttttttagattaatgtgagaatttctagaccgtgagagcgaatgtggatgctcatttttctagggagtaactatatttatggcgccatatttttcaccaaaatatagtcagcatgtatttacattgcaagtctctaaattacatatataattttagtgtatttgtaatgtaagttctaaaattacatgtgtaagtctataaatttcatatgtaattttagtatatttacaatgtaagtcctaaattacatatgtaagtctttaaattacatatgtaattttttcatgaaaacacatgctgacgtgatgagaaatttaaatttaattgtttggcttcacgctgcaacacacaaagacgttcaatgcactggtatttcaatcgtagcacgaatctcaagggagatcaattggacagaaattcgactgtgattagctggaaaatgtgtcgacataattatagcaacaccgtttttctattactttataatagattttgtttcgactctagccgatcaattgcacgggtcatcttgtgctagatagatggaacaaaagcctcatgtacatatgcaataagcccctcagcttattaaaaaaaaatgcatcatatcatgctttatttacattgaagcaactcagattttatacaaggaagtcaatacaaaagcacacgaaaataacacatgctcacactcacacgcggggccaaatcaatcaaacaagcactgtaccatgcatgcaatcccccattacacacttggccttattgcccagagttttagagagataccgatcgatgcagcagctgcagatatatatatatacgttgatcattactagacattgctgtcgtcgacggtgagctcggccgcctgctcggaaggctggcgcgtgatcccggcgtgcgtgcacagcgtccagaggcaggtgaggaggtcgccgctgccccaggaggccagcgccttggcgtggccctgcacgtcgttggacggcgcgaggtagacgacgaggtgcacccagaagcgcgccagctcgtcccacgccttgtcgaacgccgggccccgccgccggagccggtggaacagcctggcgccgcgccgcgccgccgggtcgtcgtcgaacagctcctcccaccggctcgatcggacggccacggctatcgccttcttcctcctccggctcgtcgggcagacgacccgcctggacgcgaggtgcagggcgctcgccgtgtcgccgtacctgtcggacacccacgtctcgtcgtcggggagcagctccgggatctgcgccaccaggaacatgcagtacctcgacaacaccgacgcgatcttgcggtcgtcttctttcttctccttcttcttcttctgctgctgctggtcgtcgtcgttttcgtcggcggcggggggagggtggtcgtcgtgttcgttgtcgagaagctccgtggcgaggtggcacgccaggatgatctcggtggtggtcatggtgcggaagtcgaggccatcgatgtcggggaggctgacgatcccggtggtgcggctgacgacggcgtcagaacgcaaggcgtcgatgatccgtccggtggcgatcgccggcagcgcgacgtcggccgccctcacagttgcgtagagtttttggagtggagaggcggcgtcgaagatggacatctggtagatgaccatctccgatttgcccacagaaaacgtgaggaaccttaccctgatgacaaggaagcagagccaccgtagccacgggcgatgggcagcacggtgataggtgcagaccatgcgaacaatgttccagctggagaacacatgcacggtccagaactcgtgggtttcaatggcgatgaccgtgagcacgagcagcacggttatgtagaagtagacgttggagatggggccgtttccggtggtcgtccagacgatgatttggcaatacaccggctcaccttgacttgagatgaaaagtatgtagacgacggtgccgagcagtagacacaggaggaagagggaggagacgaagttgacgacgaaaaggataggttgggacattaccactggggcagccgcctgctggtagtagtgcaccaagagatcaagctcaagctggagcacctggaaacccctctggatttgaccttgtactcggttcagcgtgaacttgctgcagagtttctgggctttgcccacaggctcacatccctcgagcttgaggacgccgtcgagcatgacgccgcgagccatggcggagccgacctccaccatcgggtagtgctcgaagcggcgccggaacatcttgaagagggagaaggagatgcacaggtcctcgaggagctgacgcctcctgcctttgaacaggttggcgtgctgctcgtgcatgttcatcacgtcttccacggtgatcagccgccccttctccacgcagtcgtgctccgtcaggcggagatactcgtcggggtcggtgaggaggagatgcacatgcttgtgctcgttctggtcgccgccgacgcgccttgccacgccgtagccgtatccatggatcgtgaccggctcgagcaccccattatccctcctcctcattctcctcttcctcttgttgttgttgttgtcgtcatcgttgttcaccttgttgtagtggaggacaagtcgatcctcgcccatgacaacgaatttgcaggtggacaaggtgatggcgggggggcttgtggccgtctgcttctccatgagtttctgcatgtaagctgcaacgacaagagggttcctcgccgtgtgcaaggagcagctcgcgagcctcctgttcaacaggctcagcaccagcttcgccaagcacagcgaccagagcacagtgaagatgtagatcaacgtcaaccctaacaaatagtatcggaattctaacgtctccgtcctcgtctgcctcgccaagtttgcgaagatgaggtagccgacccacaccaggtggctcacctcgtaggagacatccatgagcgtgagcctcccgatgcccctcgagaaggaggagccgtcggtcggcagcagcatcccctggaccttcttgcggatgagctccacgaggatcaaccacaggagcgccgccaggagctccgattcgttccggaggacgccgtcgttgttgccgccgctgttggcctggctctgggagatggtcgccgagacgagagggacaaactggaagaaggcgaagttgagcaggaagcgcgcgatgatggagaggctgtacttctggaacccgatctggcgcacccacgggaagaagacctgcacgaagccgttgatgtagagcgtgcagcccacgatcgccatgagcaccaccatgaacagcagcttcatattctccgtccccgtccccggtcgtgggacgttgccgccgccgctcacatcgtatagacgattactgcaccattttcagtggcgaaccagaaataaaaaatatttactgcaccgtttctagtgacgaacccagaataaaaattatcagggatacaataaatactaatcatctaattattaagtgatatactccatccgtttcaaaatgtttgtcaccgttgactttttagtatacgtttgatcattcgtcttattcaaaaaattttatgaaatatgtaaaattatatgactacataaaaatatatttaacaatgaatcaaataataggaaaagaattattaattacttaaattttttgaataagacgaacggtcaaacatgtttaaaaaaatcaacggtgtcaaacatttcgaaacggagggagtactgattaacatagttctatcctgtgaccccggctaggactgtataggatcgccactcaccatgcagagaggttgaatgccggctcaatcgaatgaatcgtcccaaaaggcaacgagaacgaccccatattaattatatgctggtgaacgagcactactgcaaactaatgtcaatagctaattaattgctatcgcatttcatctgcatgcaaacaaatgatcacatgcatacctatatgtagacggcccccggcgatacagtacattatattcatcaacaagatatatatacatcaattctttgcttagtttaacggtgcactcaacgtatgttcatgctgccaggcatcgcatgccagccttctctcttttctccactggccagccaggcgcgtgtgtgatcgatgctttataatccttcctcccaagcactgcaaaaattatgcatcttaattaagaggccacaagtagtactccatgattccatgtaggttttttttattaaggctcatttaatttcatttcatttagcaacaaaaaacaagaactatactcccaatttgattttattaagaactatttggtagagctcctacttctaaatttagctaaaatgagttgggtctaaaataaagttctagagcaacctaaacacagctccacctttctagttctttttgtgagagcgctacatccagctccgctttcattatagatgaaactgaaattgtttagttgagttcaagctaaagagatgaagctggagctgtgctaaacagatcccaaggctcaaaagtagtagcaagtattcataccttcaattagacacacatatatacatattcctcctacaggaaaatcaaattacaacacaagtgcacgtgtatatcttcaattactctaacactatgctttttttttcttagggcgtgtcttgatttcatgcacctcgaattttcaaaaaatatcagttacttttcccatccaaaaattacaaacgatggatctcattactctaatacagtattacttagaagtcctttctttcaatgataaaattgttgaacaataaattagtctaacctaaacaagaatacacctacaattcatacaaatgtaagaaattacatgcaaaaataaattcaaacttgcataaaagataaatgtaaaatcatagaaaactacaaaattgtagttaaataaactaacattacacacattgtgtgtatatatatactgcaaactttatacttaacaataccaattttagtgacattgacatgaaatcttgggaaaaaaagaccttatccttaattgacctgcatattagcgtatataaatgggaaaaaagtgcagcgtttactcaatgtgtagcagcaaaggaggatacatctaattcaacctcggaggcagatgcttgggcatgcttgtgcatattagaattaaatagttgtctatcatcgtaagcaacgaaaacaaagctggcggtgaacaaagaaaaagctagctctactgctttaattaatatgcggaagagttactttcgctacttaaaaacgacttttcctagaataaccccttttatttttcaggcgggtaaaataaaaaacgctcgtgaaactgtaaccgaagatctgcaagcggttatctttacataactgtttgtaaaaataagtctatttttatcagcgattgtttgagaaggtcacttataaaaatagatttttacaaacggtcatccataaaaaatactggaatgagatgaagaaacaaaattatatttttttcttatctttatctatccaatacccactctcccaccacccaccacatcattctctctttcacaccctatctcttctagatccagtggcggggcagcaaaccggcggccgccgcacaggcgcgagcgggcttcgacgagagctctgtcggtcggtgttcacgcaggcttcggcgagggctccagcgtgggcgggctccggcggtggattcgactgtcggcagtcgcccgggcttcagctgtgggcgggctccagcggtggatcctcttgtccatggcgccaacaaggggagctcatgcatggtggtggtagatggggcggtggcgagagcgacctctaccagatctggtggaggggaggcaggcgacgtctcctccctcatggcggcagagggtgtgatggtggcgtcctctctcccatcgtggccagaggtgcgcgtgtgttaaatatgtgatccgaattttggacccacaatatattcggattagtttcctagtaggagtcctattaggtgtctttctattatcccctatatatactcttgtaagccgtacgggaaggggtgacgttcccattgtgattcccctacgtttgtaatcatctcctctatagtgatcattgccggtcggcgcccgtggttttttcccgcaagggttttccacgtaaaaattcgtgtctccgttgtgcatctatttttataacaagtggtatcagatcattggagattcgatcaacaactatcccaccatcgttctgcaattcggcgagattatccaccggcgcacgttcatcatcggcgacggcaggcgcgtgtcgtcgctcgtctcgtcgattcgtctcgtcttcgtcgtgctgcctacgcacgcgagaaaaaacaggaggagcagcagccggtctccacaccacacgtcgggggaggagaaaaagcagcagaaaccaatctaattgcgcacagatcccaaagtgaagaaaaagtagggcaagtcagtcagagccatcatcgccctgttctgtgaattcaatttcacgttgagaattgctacggccacctaagcttgtgtaccaggagattccctgatctacgctacgtgcacacagaaagtgcacccagaggttcgcgattttgctaggtttaccctaatttcttactagcaaatttcaggattaattcctatggcgagtttgaagtatgatctaccgctcctggaccgagacacaagattctcactttggcaagtgaagatgcgagccgttcttgcacagcaagacctcgatgatgcgctttctggatttgacaagaggactcaggattggtccaacgatgagaagaaaaaggatcgtaaggctatgtcatatattcatcttcatctatctaacaatattttgcaggaggtgcttaaggaggagacagccgctgggctgtggttgaagctggaacagatatgcatgactaaggatctaaccagtaagatgcacctgaagcaaaagttatttttgcataagttgcaagatgatgggtctgtaatggaccatctctccactttcaaggaaattgttgctgaccttgagtctatagaggtaaagtatgatgaagaggatttaggccttattctattgtgttcattgcctagctcatatgcaaacttcagggatactatactttatagtcatgatactctaattttgaaagaagtttatgatgctttgcatgccaaagaaaagatgaagaagatggtaccctctgaaggttcaaattcacaagcagaaggcttggttgttcggggcaggcaacaggagaagaacacaaagaaccaatcaagagataaaagctcaagtagctaccgtgggagatcaaagtctagaggcaggtataagtcatgcaaatactgcaagagagatggacatgatatctctgagtgttggaagctacaggacaaagacaagagaactggaaagtatataccaaaaggtaagaaagaagaggaaggtaaagccgcagttgttactgatgagaagtctgatacagaattgcttgttgcttatgctggttgtgcacaaactagtgaccagtggattcttgatactgcatggacctatcacatgtgccctaatagggattggtttgccacctatgaagctttgcaaggtggtactgttttgatgggtgatgatacaccatgcgaggttgcaggtattggaacagttcagatcaagatgtttgatggctatatcagaacattgtcagatgtgcggcatattccaaatttgaagagaagtctcatctctttatgtactcttgatcgcaaagggtacaaatattccggtggagacggaattttgaaggtaactaaaggctctcttgttgtgatgaaagctgatattaaatctgccaacctgtaccatctgcgaggtacaactatattaggtaatgttgcagcagtttctgattcattatctaattccgatgctactaatctttggcatatgcgtcttgggcatatgagtgaaattggtttggcagaattgagcaagcgagaattgctagatggacaaagcatcgggaagctcaaattttgtgagcattgcatctttggcaagcataagagggtgaagttcaacacatctacacataccactgaaggtattcttgattatgtgcattctgatttatgggggcctgcttgtaagacatcttttggaggtgctcgttacatgatgactatcgttgatgattattcgcgaaaagtttggccttatttcttgaagcacaaatatcaagcttttgatgtgtttaaagagtggaaaactatggttgaaagacaaactgaaaaaaaggtgaaaatccttcgtactgacaatgggatggagttctgttctaagatatttaaatcatattgcaagtctgaaggcattgtgcatcactacaccgttcctcacacacctcaacaaaacggcgtagctgagcgtatgaacatggcaattatatcaaaggcccgttgtatgttgtctaatgcagatttgcctaaacagttttgggcggaagccgtttccactacttgttatcttatcaatcgatcacctagttatgccactgataagaagactccaattgaggtatggtctggttccccagctaattattcagacttaagagtatttggttgtactgcttatgctcatgttgataatggtaaattagagcctagagctattaagtgcatttttcttggttatccgtctggtgtgaaaggctataagttatggtgtcctgaaactaaaaaggttgtgattagtagaaacgttgtcttccatgaatcagttattttacatgacaaaccttctactaatgttcctgttgagagtcaggagaaagcaagtgtgcaggtggagcacttgatcagttcagggcatgcaccagaaaaagaaaatgttgctattaaccaagatgcacctgttattgaagattcagattcttctattgttcagcagtcttcaaaacgttctattgcaaaagataagcccaaaagaaatattaaacctcctcgaagatatattgaagaagcgaacatagttgcttatgctttgagtgtggcagaagaaattgaaggtaatgcagaaccttctacatattctgaggctattgtttctgatgattgcaatagatggataactgctatgcatgatgagatggagtcacttaaaaagaatcatacttgggaatttgtgaagttgccaaaggagaagaaacctatccgttgcaagtggatcttcaaaagaaaggaaggtatgtctccaagtgatgaggcaagatacaaagcaaggttagttgctaaaggttatagccagattccaggtattgatttcaatgatgtcttttcccctattatgaagcatagttcaattcgcactttactcggtattgttgcaatgcatgattatgaactagagcaaatggatgttaagactgcatttttacatggggagttagaagaggacatttatatggagcaacctgaaggttttgttgttcttggaaaagagaacctagtctgtaggttgaagaaatctctttatgggttgaagcagtcacctagacagtggtataagagatttgactctttcatgctttctcagaagtttagaagatccaattatgatagttgtgtttatctcaaagttgttgatggttcagctatatatttgcttctttatgttgatgatatgttgattgctgcaaaagacaaatcagagatagcaaagttgaaggcacaattgagtagtgaatttgggatgaaggatttgggtgcagcgaagaaaattctcggtatggaaattactagagaaagacattctggcaagttatatcttagtcagaaaggttatattaaaaaagttcttcgtcgtttcaatatgcatgatgtaaaaccagtgagtactcctttagctgcacatttcagattatcttcagattatcttcagattatgtccacagtcagattatgatattgagtacatgtctagagttccatattcaagtgcagttggttcacttatgtatgccatggtatgttctcatcctgacttatcacatgcattgagtgttgtcagtagatacatggctaatcctggcaaagagcattggaaagctgttcaatggattttcagatacctacgtggtacatctagtgcttgtttgcagtttgggagatctagagatggatttgttggttatgtggattcagattttgctggagatttggataggcgaagatcgctcacaggttatgttttcactataggaggatgtgatgttagttggaaggcaagtttgcaagcaacggttgccttatctactactgaagcagagtatatggctatttctgaagcttgtaaagaagctatttggcttagaggtttgtacactgagctttgtggagttacgtcttgcattaatatattttgtgatagtcaaagtgcaatatgccttacaaaagatcagatgttccatgagagaacaaagcacattgatgtgagatatcacattattcgaggtgtgattgttgaaggtgatgtcaaggtatgcaagataagtactcatgataacccagctgatatgatgacaaagccagtttctgctactaagtttgagctttgctcaagcttggtgggtgttacagtatagtcctagagactatttggcgcgcgataattttacctacatgaggtatctttggtgattgatgtttttatgctacaagaggaaattcgtctcaaggtggaaattgttaaatatgtgatccgaattttgggcccacaatatattcggattagtttcctagtaggagtcctattaggtgtctttctattatcccctatatatactcttgtaagccgtactggaaggggtgacgttcccattgtgattcccctacgtttgtaatcatctcctttatagtgatcattgccggtcggcgcccgtgctttttttcccgtaagggttttccacgtaaaaattcgtgtctctgttgtgcatctattttcataacagcgtgcggcattgtgggcggaggattcggctgctggaggtgtgcgggtggcagattcggccgtcggaggtgcgcaggcggcatgaggcgtcgtgggcagaggatccggccaccggaggtgcgcgggtggctagaggcgtcgtgggccgtggatccggccatcggaggtgcacgggcagcaggcggcagcgaccaatgatggcgagaggagcttcgggcgggaggcagccattaagtgcggcgagttggggccacactcccgctagttcccaaagaaggagacagtgtaccagtcggagcaggccttcctcttgcggctccaccacaagcacctcgatgagtttgatgagtagctgctcgtctaagagtatacgaagaacggcgcgctctacggccacatccacaatggcagttcgacgacggtaactcagctccctcccacgccgacagcaaccagtgatgcctacgttgatttggacaatgatttaggattttgattggggatttggaacaatgatttgggatttggggacaatgatttgtaatttgtgaaactattttgggcctggattttcaaaattctttttgctccaaaaaagatttcgcttgagggtctcttaatattgccgccagcgaaaaccgattttcatgtctaaattcgatctacacatgaagaaaaaataataaattatatttgctctttacaagtattattcattgtctgattttattattttggtttcgttagttgtaaagacttatataatctcaattaatgttttcaataatctcaattaatgttttcattttttataataactatttaagtcgcatataaataatgggtgccatgacatctaaatgtaaaaaatcattgtgttttactcatggactccacatggggtaaaatggacatctcgtccccgcgttccacattagcacatcaatgtgttacgccacgtagttaaaagggtcaaagtggtaaaatacaaggacaaaaatctgaaatatagtgacatttgaagagtacaagtcatctcctatagtggcaatttgttaaatccccctgatgactgcaggaacggcggcagcatgtcgtacacgtcggccgccgccacctgctgcaccgcgcctgcgctgctagcaccggcgttggcgccgccggcgccgctcctgatgctgatcttgggctggatgccgctcatcgcgctggcgttgacgcgcgcgacctcctcgtacacgccgccgtcgatcatgaggctgtcccggagcgcgccgtggtcgccgccgagctcctggagcatggacgccacgagctccgccttggccctgcccaccccggccagcgcctccgcctcccgctgcctcgcgtacagcctcgcgtcctcggccagcttctgctcgaagaacttggcgccggcctgcgccttgcgcgcctccgccgacttcacctgctcgaacagcgtcgcgtccgctgccatctgcctgtcgtacagcgccgcgtttgaatcttgcacctacgtacgccagcagatagaataagtaaaacttctcttaattagatgatttgacatgagcaaactcgatccaagtttgaatcatgtttgtgtggctgtgtgtatgtaaccatataaatagggagatggacttttatcccttggagaacatcccttgttttattcatgttgtttaaaaagtcactaaaagtaaaaaaatattgataaaataaattaatatatgatttgtcattttacaaacatataagttcaaattcaacctatacaattaaaaaaaataaataaattcgactatgcgaattacaccgttctatttttgttatttttgtttttacttgtataaattaaatttgaacctacatatttgtaaagtgatatattaatttttttactatttctttaggaaaattatggtttttttagtgatatgaaaaaacaagagaacatcttcttgagaaataaataaagtttccctataaatacctgtgtctcgtactggacggtggccttgctgagcttctcggccttgagcttctcggtgaggcgcagcgcgttcttgcgctccacctccagctgcagctcggcctcgcgaacgacgacggccttgaccgcctcgacctcggcaaccttggactgcttgtccagcccggccttcttcaccgctagcgccgcccgcgccgccgcgatgtccgcctccctctcgttctcgtacacctccacatcggccttcaccttgatctcctccctgcagcccacaccctgctgccgcgcggacagcaccttcgtctcggcatccaccttcgccgcgttctgaagcgtgagcccctccctctccttggcgccgatctcccccttcatccgcgcctccgcctcggccaccttcgccttgccctccacctccgcctgcctcttctgccccaggaaggagaagtagtcgttgccgggtgaatccgggtcatcgacgagctgcttgacgttggcgctgtagatgtagaggccaagctcgttgagggcaagctgcacctggtcgaacacttgttgcttgaacttctttgtgccctggaagatctcctccatggtcatggacgaggcgagcacgcgggtctcgccctcgatgacacccttcacgagatcgatgacgtggtttggtgatctgatctgggaagcagcaatgagttttgcgtacagtagtagctgcttgttccaggagcacaagtagacaaagaagaagaagaagaagggattagactgccaacttgagcagaaaattgttcaaacgaaagctggttgcatatttgaaacatcttcagcttttatagtagtgtagatatatgctaaagctgcagtcgtatatcgtcataggttttattaggttagccaatttaggtgactgacaagattagaacaaaatatatcgactaacaaagagcaaaactaggacatataatttttcatgcttgatccatgcatcgcttttttttcaatgttatacaaatgtgaaaaaagaggaaatggttcaattcgaaccactcggcaaaattgttaagctagctgaccaagaataaagcccaatgcaactagcctaaaaaactgatttaggtagcaatttatatatcttcctagtaaaggtattcccggcacctaatattgcgtcatgttgcttgtgcaaatttaattgactgacggataagagagaaaatgacaactagctaatagcaaaactaagatactttaatacttcttgcctcaataatagtttttttttcaatttttttagttggtgagcttaaaaaagaaggtattcaattataatgaacatcagagtgattttacagttattaaagaaatactgagaggtacaatattttctagtataaaatttgttctctctcaatgtctgtacaatttctcttaacatcaagaactcggcgagacatggtgagcgtaggtaaaagaaaaaaaatcatatatctacatgagctacatataatgtatgttagtagagtatttggaagtatcaattgtatcaaagggaacataccatgtccgcacatcatgcaaactactaacaaacaaataccatcgaaaactctaaaaaagtgtacatacatttttaataggattatcacctacatgtgatcagcatcatctttaaatccataatatatagatagtaataaaaaaaagacaaggttctgacatatttatagtctcaggctttttatttttattgttttggctaaaatagaatatatattttaaagttgatactttacacatgcatatataaacctatcaaaaatacatgtgtatttttctctagtttttctataatatttgttaattagtgtgcactgagtatattatttgaagcacgtgtagagttaatttaaagaaatagtagggggagtaaaaatatctgtgaatcatgcacgcataccgcttcctcgtcgcaatcctccagtctccgttgtgtgtcggccggcggcgccggtccgtccaccacagggttccgtttgatcttggggctggggccgatggtgtaggcggcggggagcctgaagggcagcttctcggagctcatggcctgcacgtcgatgtcgtagctcaccggcgtggcgtcgaacttgaggcacttctgccccgcgaacacccacgccttcttcgccagcttcacgtcgtcgatcccccagcccgtgatggccaggtactccgacgcgccggccaccacgaaacgcgccatctcgatttctcgatcgatcgtgtctcgcggcgattgagtgagttcgttgttggatcggcgcggcgccggcgaggaaaccccaagttttttttttttttttgtagcggcgcacgcacggacgcgcggcggcgatcgaggagagaattgaagggaggaggatatgatatctgatgcgatctactgatccgtacgtgacaagggcaatgaggaagggaagacgttgtacggtggagatgagatcgaaatcgaatgagatgtgtcggactcgacaacgcaaatcgaaccgatcgcgtcgtatcggctcaggcctcagggtcgcacgtggcctgcctccgaatcgtatgggctcgcccaagctgcacgatggcccaaacggtctcggtctcgctcaccgtctcaccgatcgcatatgcgcatgtggggcggcctccaaaccgtgtgggctcctacctgagccgtctcccacttgggccgtccaaacgaggccgcgtctgagcaaaacctacagacctacagtatgtcagtggggggtacggctaggggtggagaggaagctcgtggctcgtgataagctcggcttggctcggctcgtttaaatttcctaacgagcagagctggctttaaagctcgttagagataacgagccagctcgagctagctctactcgcgagccttaacgagcttttcattagccaacagctcaacaacagcaagccacaaagcccactaagccaagaccacaaagcccgtaggcgcataggcccatcagataaggacataaggtaaagactagtaaaccctagctgactgttcgctccacttccctcttccctgttcgctccgccgccaccatcgcgactcgcgtcccctctcctcttctctccactccgcgcggcgccgccagcccgccacagcgccaccatcccgtgcactgccgcctctccagatcttcctctcctcttcactccgccgcttcaccgtcaccaatccaccgtcgctccgccgccgccaatccacctccgcgccaggctccagcactctagcagtgagtgtcgtgcgcccgcgccgccgctcatcacccacgattccacgacgccgcccccacaccgtgccagtcatcatccacgtccgtggttcgccgctggttgtgtggccacgccgccggctgccatggaggagctgcctcaaccagatctcggagcaaatgcttgatttgttgttgttgatctcgtgtttagtactttagttcttcaattatcggttcagcttcagcacctctctgcacttacctgtgtatccattgcaaaaattgttgggccggtgttttaggtcattagctcgcgagccaaacgagccagctcgagctttgcaacgagtcgagccgagctggttttttaggtcgttaggataacgagctagaccgagccgagctggctcgctacccacccctaggtacggcacagaatactgatcggtatagaggctgcctgattctttcgactactctggagtacaatcttaatcctttcatcccagtttgatcattccctaaagtttgatcattccctaaacgaatggcaccaagaccaaggacactattatctgcaaccggttggatgaagatgggagtcatttcttcttcagatgcaaggaagtaaaatacatttggagagacctgaaccttgaagagactagggacaagttagctggtatgcaatcagcttgggcagtcttaaactccattttggagttggaggaagaaaagagattgctagccattgtcctaatgtatggttggtggaatgagagaaatcggaggagagagggggaaggaagaagagtagctagtgtgctggccttttcggtgcagaagcaagtcgatgaactcctaaatttggccctgcaacagcgaagggagcataaaaatagaacagttaagaagtggacacaacctgcagctgaggtgctgaagatcaatgtggatggagctttcaagcatcaactgctcctaggcggttggggttatgtaatccgggacgtgggagcacatgtgatacaggcgggagcaggaagttcatcgaggatgcaagatgcttttcacgccgaagttatggcaggagtaaagggtttacaggcagcggcgaacctgggaatggccaatatccagctggaatccgactccttgacgcttatccaggctctgagggaagaaaactttcgctatgctcctttgggcggcctgctgcttgaagcgaagaacattatcacttcgtcctttgtatcttgtcagttcagttactgtcctcgcgagtgtaataaggtagctgatgcaatcgcatccattggttgtaatagtcctctaaacactgatctcgtctgggatggtgtacctccgggtgttgaggatctggtggtcggcgattatgccgcttccttgggttaatggaaactaaagttttcctctaaaaaaaaagaccaaggatactaaaatatttatcactctcaaattaatccttatcggttagggtgtttcatcatttcatatcccgtagattgctgatgttttaaatattgcatgccattgcaccaataaaaattaatcttggttggttacatgcaacatattcaatgatgcacatttactctttgcacaaataaataaagagacacttgttagatgatgatcattttagaaaaacctcaaaaagcttaaaggatgatcaaaatgggatagatggagtcctggttttaggttcctttcactaaaccagtaaacctcctttgatcgatagaaaaaacatacaaattaattttgaagtatttcaatcaaagaattacatcatatcatatatatatcctttgaaatttttaggaaatggacaaccctatagggattttgaagaagagttagcaagaggtgcggcctgttagaaaatttcagttcaatctatatctctaatccgaaatttttaggaaatggacaaccctatagggattttgaagaagagttagcaagaggtgcggcctcttagaaaatttcagttcaatctatatctctaatccgattcctttgtttttcctgcactctattccaatgatcatttcggtgtttttcctaaaatttacattcctttgtattgcacttaaattcctatcaaaattctacgtttttttatttatatattccttcatttttttcaatcctacgtttcaaatgagccttaagttttgagttatactctatcataacataggagtttattatcactttaattttcttgcatgagaaggcctgtctattgttcccagatcgcaaagaggaaaaaaaacatctacttgattatataattttcacattaatttgctactgcctctattttttatgtctaaatttgactattgtaatgttttttttcttatttgtataaatagaaaaacatacaagccacacaaagtctttttaatggtagatttagtggtacttttttcgctttacgtaataactaagtaattgaataaatagtgtcggccaaatttgagggaaaataactgtattatatattataaaaaagaggtagtataatttacacattatttaaagagattttttatgaattaccattgacgattgtttggttctaaaaattgctattgttgaatacgagttttgactttggacgttaatgtttccttttgcttttacagtcgtccattagttttctactccctccatatatcaatataattgtaacctagtacatatgtgatatatcttataactttctgtctagattcgtagttctaagatatgttaaatttgtagattcgtagtcctaagatatgtcaaatttgtactaggttgcacttatattagtacggagggagtattaaactagatgtttatatgatactaatagaagtaacatataatagaaatagcttgtaagatagctacactttgtattttttttatctcgaaccaactattaaaaaagctataaattaattaagatgatgtggtttataacaatgtaaagtatatggatcgattgatcgtcaaaaaacaaaattaaagtgatatggctcagatcaatgagagaaggaaaagaaagaaggtatcgatggttgcacctatattgctacggagggagtattaaactagatgtatgtttatatgatattaatagaagtagcatataatcgaaataacatgaagatagctagctacactttgtattttttttatctctaatcgactattaaaaagttataaataattaaaatgatgtggtttataacaatttaaagtactagaaaaatgcccgtgcgttgcaacgggtgaaggctattttaatcttattattgttcactgtgagaattcgcttggatatatatttttcaagaaaatcatgttaggttagtatgcaagtttttcttttcaagagattaaatcatgttaagttagcatacgagtttttttcaagagatttcttatacgactccttatgtattttcaaaagcgaacgaaattaaaacccggctcaaatatagatctggatttctaaaagcgaacgaactgtatttttcaatacggttaaaaaccaactcatacacggatgacgtaccagagtaccggtaaaattatcttcaatttttataatagtagaaaagttttagtgattttggtgtcagcaatctctactacttcaaaaatttcaaaacgtttccttcgtccgtcaaaataaaaaaaaaagagcgaaaaaacaacaaaaaaaaagtccgactcccctaaaaagatggaaaaaaccgcagatccgattccccctaaaaaaggaaaaaatagcgaaaaacaactaaaaaaatccggttccactaagtggcaaaaaaaaaccgtagatccgaacgtgaaaaaatctgattcctataaaggtgaaaaaaagtaaaaaaaaagatccaattcccataaaaatagaaaaaagtctgattcgtataaaaggcgaaaattaaaaaaatctaaaaaaacatgtaaaaaagttcgtccgatttcctaagaaagtggcgaaaaatggcaagtataaactaaaaaaacacgcgtgaaaaaaaaagagcagaaaaaaaagcgtggaaaagaagtccgatttctattcgttttagtagacagtatatatctcttctccaactctaatctaatataactacttaaaaagagaagttttcattctacaactaaaaaaacatgagaaaataaaaacgattaaaaaatgcgtgagaaaaaagtcagaaaaaacgttaaaataatgttttgtcttttgtaaaaaaataaaaaatgcatgagaaaaaagtatttccatcgtccgtaaaaaaattaaataaaaacatgaaaagatgttccaattttcttattgtcttagctacaaacgatccatacaaacattgttattgacatggttacgagtgaaaaacgtatattatgattaaatatttttttcacccgttataacacacgagttttttcgctagtaaaaaataataattaaagaaaacaacactaagtatatacgtgtatctcaacccactgtaatttttcagcggaattcaattcaatgtcgtagatttcattttagtactccatccgtctcaaaataagtgcagttttgcactattcatacttaacatttgaacgttcgtcttatttgaaaattttttatgattagtatttttattgctattagatgttaaaacataaatagtactttatgtgtgactaaatattttcaattttttcacaaaattttcaaataagacggacagtcaaacgttgggtacgaatatctacggctgcacttattttgggacggaggtagtataagaaaaacagaagctggtacagtactttactgagaaaatatcgtgactgtttctagtcaaagaaccttatctctatccaccctctctcgtttactctctctctttccccgtctctctcctgtcgccagccacacatcctctcctctcctctctagttctctacgcctcctctctccctctacccacgacccgccgtcccgcggcaatgatgcctagagagtagagagcaggagcagtggtgcacaacgagctggggagcagcccggcaagctactcctcggtgtcggcggctctccttccgcgcagcgacgcctctccgtccctcgcctcctctccctcgccatggggccgcgggagggctcgatgctgatgggtggtggcaggtggcggcgccctcccttccggtgggaggggaggcggcggcggtccgacgtcccagatccgtcctcttcctgcactcacccttcctggcaagggcacggtgactcgaggcggcggcgacggcgactcggtcttccggactcctcccgccgccggctacggcatcaaccggcgacgacctccatggtaacgagctgacggcgacagcgggctgcaggtgcgacaaatgcccttcttctcctctctttctcctctactttcctctggtggcttggccgatccattggtgttggaggtcggagatgggccgatctgggaggtgcgatggtgacgccgccccctcctgttcttcctcccacaccagaagcagaagcagtgacgatggcgatgataatgaattactcgtgtgatttgttcatgtttattcatgcttttttttatcttgaggatttgtatgtgttgttcatctgttgaaataaggatatggggattattgtttgttgttcgtatattcatcttcaatttggggatgggcattgaagtactcaatgaagaaaattggatcgatttgagccggtcgtgggctttttttgtgcgattttttttgtgcggtttttttattcttcttgtttcattttctttttctctagattctatcttcgattggattttgtatcgatatttgaatttgtgcaacatccgccttatgtggtaagggcgctgtggtgcgacacgagggggaacggggagggagtcggactggaaaataacacagaaaaatcgcaaaaaaaaaaagatcgcggggagggaatcggacaacgtacgaaaaattcttggcataaacatcttaaacttttataataggtaaagatatgcatcgattgattgttcgaaaaacaaaacttaagtaatatggttcaattagagaaggaaaagaaataaggtaatatggattatctacttatggaacatttccctcaacttctctttataaaagttttgaaaaaaaataccgtttaggtgtaaaaaacgaagaagtagaagttgagaagagatagtagtatagaacacctcttaaataaataatataatccaaaactattacactccaatgccaacacgacgtactctgacacaaaactgaaaattattatactctataactctagcacgatgtacttttgacacaaaactcagaattattacaatgtaatgctataatacgacgtacttaatgacacaaaagtgttggtgtggctatcttaattagttcattagttggcgccgtcttttggcagggagcccatccacgccggcggctgcatgccggtctgctcgtgaaccgtcgacagcagcggcggcagcatcttgtacacgccggccacctgctgcatcgcgccggcgccggcctcgccggcggcgccgtccgcgccgctccagatgctgatcttgggctgcatgccgctcaccgcgctggcgttgacgcgcgccatctcctggtacatgccgccgtcgatcatgaggtagtcccggagcgcgccgtagtcgccgccgagcgcctggagcatggacgtgacgtactccaccttggccttgcccaccatggccagcgcctccgcctccttctgcttcgcgtacagcctcgcgtcctccgccagcttctgctcgaagaacatggcgtccgcctgcgccttgcgcgcctccgccgacttcacctgctcgtacagcgtcgcgtccgccgccttctgcctgttgtacagcgccgcgttcgactcttgcacctacacccccaagttaaatttggatgaaactcgttaaaattaaggccctgtttagatccacccaaaaattttacaccctactatcacatcgaacgtgtatgaagtattaaatataggtaaaaaataactaacagattgcgattaatttgtgaaacgaatcttttgatcctaattacttcatgatttgataatatagtgctacagtaaacatttgctaatgacagattaatttggtttaataaattcatctcgcggtttactgacgaattctgtaattagtatttttattagtgcccgaacatcctatacaacaccctatataatgtctgatgtgacacgccaaaacgaacttagattaaaaagtgtatgaatatatacctgtgtctcgtactggacggtggccttgctgagctgctcggccttgagcttctcggtgaggcgcagcgcgttcttgcgctccacctccatctggagctcggcctcgcgaatggcgacggccttgacggcctccacctgggcaaccttggactgcttctcccacccggccttcttcatcgcaaggccggcctgcgccgccgcgatctccgcctccctctcattctcatacacctgcacctccgccttcaccttggcctcctccctgaggccgatgccctgctgccggacagacaccaccttcgtctcggcgtccaccttcgccgcgttctgccgcgtgagcccctccctctccttggcgccaacctcccccttcatccgctcctccgccacgtccaccttcgccttgttcgccgcctcctgctgcgtcttcttccccaggtaggagaagtactcgtggccgggctcgtcgacgagctgcttcacgttggcattgtagatgtagaggccaaacttgttgagatcgagctgcacctggtcgaacacctcttgcttgaacttcttggtgccctggaagatctcctccatggtcatggaggcggccagcacgcgggtctcaccctcgatgacgcccttgacaagctgtttgacatggttcgacgcatggtcgtgcggggcgatgagcttggcgtacagtaggagctgttcatcattcattcaagcaaaacaaaaaacaatcagattatttatttttagtacaaatttcacatcaagattgatcagcaataacaaaagggcatcaaaataatcatgtttcataacatataccttttcctcgctctcaggcatgagaacgcgccgttgattcgaggcgccatcgacctcaggcgccggcgccggcgtgatcttggggccgatggtgaagacggcggggagattgaaggccagcttctcggagctcatggcctccacgttgaactcgtagttcaccggcgagatgtcgaacctgctgcacttctggccggcgaacacccacgccttcttcgccagcttcacgtcgtcgattccccagccggtgatggccaggtactccgacgggccggccaccacgaaacgcgccatctcgacgacgatctgatcttcttccctccctcgctagtcgctactgctgatctcgatcggcgattgagttcgaccagcaaaacccagaaaccctgatgagatctacgtctatctgatgacgagacgaaggctatggtaggtagtctggtagccgcgatcctccgttatataggtgagacggtagtatgatgggtatcaatctgtttgatttgtttcttaaccaactctgcatatgaattttgtgggtatctatttcggttaattggcttgttaattaagtttgggccgaattggagttgggttaactaattgtaatctgattaattaatccactgctatcgtacagaggcccaacagcatatagttaaatggaataagttcacttggtgacccttaaaagtgatcgaaatctaatccgtgaccctaaaccagaaaaccggatatattgaccccaaactattgaaaccagtgcaatttgactccctcgacggttttggaaggcggtttcactaacgtggcggtattgacctagtctatgtgccgacgtggcgcttaggtggcatttcaattaaaaagttatacgtgggacccgtttgtcattcacacacacaattgtggggcccactaacatgtgggccccacatgacatcttctcccattcttcttcctcccctcccttctctctttctttctccctctcccctacggccatccgtggggagcaagcggcggcggcggcggcggcggccgtgggtgttgacgtaaaaatcgaacacggcggcctgggagatctgcttagctcctgtgcaggtccaattatgatgagatgtgggcgtgccagtcagtagatcctgcaactaacaagatatgtaaacagtagatcaaacagctgatcgactgacaagccgatggagtatttccaaccgatagccaataatagttgatactgataccagccgatagcaatagggtttaagcaatcggctatatgtccaatgtagatgatgatgtaaaggcaatcggctgatgatgatgtaataaaatcacaatataatccagtatagaccaatcgtctagcaatgatatgatagaataagcactgatccgaaggttaaagcatacatcggttaggggtccgatgccataaaatccacagattagattaaacagtgaaacctttattgccatcggctaaatccaacttttatatttatatatatatatatatatatatgtatatgtatatatatatatgtatgtatgtatgtatatgtaatccgtataagccgatgcaacgcccagataacttatcggctagcactccaataaaacattagcatgaacctatcggcttcacaagacttatattatcagcaacaatctagtaggtcgaacctaaccgatgcagcacgagattgtatatgataatctaatactcgatgagccgatagatctgtctaatatgatggatataacaaatctatttagaacagcattatgattgtagagatatatcggctaagacaggagatcagacctaaccaagacagtcccagctaaaccgatacgtctctaaacacaatgcaattagaaatagaattgagatatcaggtaggcaaatatatcaaccaaaccagagcgatccaagagatcgaagtgatgcagccttgaacgacgccgatgtaaatgacagattcaccagggcccgacggaacgtaggacttaccccttcgccggagatcgaactgaaccgatgcagccccgcgttaggtgcccaaattccgccggaggataagtaaaaacctcggggaagagggtggcgatgcgccgagagtagttgtattgatcgtgattgatagattacatagactccgggtgtacatatttatacccatgggttgatacaagtccttgtaggacaagaaagaaactatcctaaagataaaaggaagagataaagtccttatcggacactaaacacactttcctaaagataaaaggaaactaacaaactatgcctaattaatagataaactgccatgccgcatcctccttgaactcgaactcttctagataagcttgctttgattgatccgactccaccaagaacatgacagcatagagacttggcgactcccatcggctgattcccccaatcggctgattccagccgatattaactctaagccgatgatgacttcgggctttaccaaatttcactgttaacagtgggctggagctgaagcggcgggctggagtccatgtcgcgctgctcgccgttcttctcgtaccaccaccacccgcaccactcggcggctggcatcgagacgtcggcgacggcggtggtgggcgacggtgggagggcgggcgagcgagggtggcagcggctcacggcagtgggaaagtcgtggtcgcggacgacgacgaaactgcgcagccccacggcgaggcggaaccactcgaggagagggaggagggagagcacgccgccgaggaggtcgcctcacgccgtcacccctcctacgcggccgtccaccgagcggagaagcg

SEQ ID NO: 27491 - DNA, 1856 bp, Oryza sativa
ttgcctcaaaggatttgtcaacatgacttgccacaaatttggagtcagtccggatgagtaagcgccgaacccccaatgctttcgccttttttaggccccgcagtatagcttcgtactctgccgcgttgttggttgtgttgaactgcagccttgcggcgtatcgaatcggtacgccccctggcgaagtgagcactgccgcagcgcccgcccccttgtgcgaccacgagccgtcggagtacatcacccaaggttgttcgacaggctcaggttcaagggcgaatgccgatgtccattcggctacgaaatcagctagtacttgggacttgatggcagtgcgggcgacaaaatgcaagtcgaagggagataattccgccacccacttgctaagctagccagtaatttccttgccccggagcacttcgcccaaagggtactgcgatggaccgtgactttgtgggcctgaaagtagtgtttaagcttgcgcgaagccatcactagggcgtaagcaagcttctccatttcaatgtatcttatcttcgccccctgcaatgcttcggagatgaaatacactggtttctggcctgactctgtttcttgacacgagtgctgcactgaccgccaccggcgaagctgctagatacagtagcgattcgcttcctggtgctgggctgatcaaagcaggtgtgctctgcagatattgcttcagctcgtcgaacactgcttggcattcgggtgtccaggtgaacttttccgctccccggagggtcttgaagaaaggcaagcctctttcgaccgcttttgagaggaattgactgagtgccgcaatttggcctgcgagctttttgtacttcgcgtacgctcgacgggggcttcatttgctaaatggcatcgattttctcggggttcgcctcgatacccctttcagaaacgagggaacccaacaacttgcccgcgcgaacaccaaagacacacttgtcaagatttagtttcatacccgcagtgcgtaagttgtcgaaggtctcctgcaagtcggacgcatggtcgaaagccttgcggctttttacgacgatatcgtcgacataagcctccacatttcgccccaactgcttgtaaaggatcttgtacaccagcctggcgaaggtaaccccggcgttcctcaggccaaagggcatcctgaggtggcaataggtgccgaatagtgtgttgaaggctgtcttggggatgtcggccggattcatgtggatctggtggtagccggagtacgcatccaaaaagctcatgagtttgcagcaactgtcgaatccacgagttggtcgatccgtggcaaggggaaatcgtcgttcgggtacgctttgttgaggcctgtgaaatcgacacacatgcgccatttgccgttcgatttctgcaccagtaccgaattcgccagccactcggggttgttgatctcctggatcaccccagcctagagcagcttttggacttcggcttttgctgcttcttggagatcagcggacatcttgcgcagcttctgtttccttggcttggcatccggtttgactgctaggtgatgcataatgaggtttgtcgaaacacctcccacctcgtcggggccccaggtgaggatatcaatgtttttcttaagcacctccatgatgttctcaacttctctttcacctatgtcgcccccagcgatacaagccttgcgggatcggcgtcgtcgacctgcgggcttcggcgcgtgcttcgcccgatcatgcggttcggcctcaacattgtgcactgctctgttgatcacggccaaatcgccctttgatgtagttgaaggttgaagccccttgaccacgattgaccacgat

SEQ ID NO: 27492 - DNA, 1276 bp, Oryza sativa
ataaacggcgcagacgactccactccacaggcagcttgaccaaggctacacctaatcttccacaccatcagcatcattgtagaactcttccactgatgaatgattgtaaggtgagtatatgacatactcagcaagccacgcacaaatatccaagtgcacaaggataccaaaggatggcatagtagggtttcttttgcaaaagcagcatttagcacatattttagaatttaataaaacagttaagtattaaacaatattaatccaacgctacacaacataccctgttgtataggcccaaccattctgaacaaccatcccggctgcacagttctatctccaaaccaggaatataccattccaaaccaggagctgatcaaattattaccagttatagcatcatttactatggggagaagggtgagactaatcacgaaagacattgttagacccacccataaccgtgggcacggctattcgaatagttttactctgatcagaggtgtaccactgtacccacaagacacaaccccacatcatgtcaccatgtgcctcaataccaccacggtacctgggaaaggagttgtgacaataccgcttgcataacacactccaccgcagcgcaccttcctggatcataatcacccccttaaaaacaaggcatggactcccagcgacccccgtgggcttatcttcccccaattctcagtctggtgccccgcaatgaaccatgctatacaaaagataaagccgttgcccacgctggcttgagggtggcacggctaatgtttcacaaccgaaactcgtgaaccgatccttaattgtcatgagcacgactctcaaaaccatatgctcacaacccaccattaccaggttttagttggcacattaattaattaaccaatcacgattgaccatcgtgagctatcattaagccatcattaagtaatagtgagtcataagttatcccaaaagtgagctaatgtttctaagcatggctaagcaatcacatctaatatctagttgaaccaatatatatagcccaactagtcaagttaaaataacccaaggtatcaaggaataaaggaatcaagaacaaaaagggctataacaaacaataggttaattccacccaatgacattcgaaaataaatgcattagttgaatagaaacaattgcttgaaacgggatcaacatgctcaaagggttgtttgggatctgggagactggcctttctggccttggaactcttcaaattcttatactgggaaaacggact

SEQ ID NO: 27493 - DNA, 711 bp, Oryza sativa
ccataatgtgttccatgtgtcgcaattgaaaaagtgtttaagggtacctaccgaagaagctaatcttgaacagatagaagtccaagagcatctgacctatgttgagaaaccaatccgtattttggaaatagatgagagaagaaccaggaatcgagttatccatttttgcaaagtccagtggagtaatcactcggaagaagaatcaacttgggaacgagaagatgaattgaagtcagctcatccgcatctattcgccagttcttccgaatctcgaggacgagattctgtttaaggggggtaggtttgtcacaccctgaaaattcaaaatatataaattggcgtttaaatggaatttttagaatttattttaaaagcctagaagagaagatctatttataataaataaatcccaatataaaatggggccagataaaatttcattaaatactttgcttaattctataattcgtagatttttctgggatttatttgagctaaggaagtatttttaataaatggaattgcatttaagaaataatttaaattgaaaaaggttttaaaagtcttcttttggctttgggccgaaagtcggcccaaaaccgctctctctctcctcggcccagacggcccagtccgagccgccgctcttctctctctcccgctgacaggtgggccccacctgtcagggtcgtcgtcttcgtcgcgccgccg

SEQ ID NO: 27494 - DNA, 11690 bp, Oryza sativa
acgacgcggagcagcaggacgccgcctgcagctcgtagcgcatccccgacgacggcgcgccttcctgtgacgacaccgccgccgtgtcaggccacaggatgtccgcttcttggaactcttccatggcggcctggccggccagcgctcgttcccggttaacctggagcccttttcagctgtgaccgcggcgagccggcgggcattcttatactattcgtcttcgacgctcttgctagcggcattgcttgggacccgaagtgacgtagggggcactcttccccccggtgctgattttggaatcttggcgaggtagcaacccatgtggggttacttgctggagcaccttaatgtgagagcttgagcttgcctaagttacagctaattcattacctaaaataaaagttacagctaattaagaggccggcaccggtctgattatctgtggctgtaaaatcaagtcctaaatcgtcttagatatgatgaacatttcttggtcatgctcccacctatctagaacgtgagccgttcgatgatacaaccatctgtttagtactgccgtatgtctggataggttgttgggtgaaaatttcggttcccaagaactgcttttagagcggcggggggaagtcagtgtggcataggtgagcccaaacaaactcaaatattcctagtatctgttgcaaaatttctaccacagaatcctttcggaaattaaaattttaatggtgtagtgtattcgatgatgagtccgggctgctgcccgttgtagctgggcggtggctccgtgctgggtgcaaccgaagtttgcagctgagtgacaaggtagtgtctcctggccgaaggttgagcccacaataattgggcctgtattccggcactcgtggaaatccgtgggcttgtggcctacgagttgtaacctcttcttgtccctacatacatatatgggccatattttgctggcctaattgccggcccgcacgtcatggttctcccctgaattatgtcatgattcctgcttgcggcatgattcccccagcggaacagcatgaagcaaaacggctcaaaacctgccgactcaaaattcacggcgctcacgtcacgagttccgacggtcgacggatagcacagtcatcacagagttcgtcaacagtctcaaacaaaatgctcgttaacaacagcggattgggccaaaatcgccggtcaccaaccgagccaaccaagcacatgcaacgctgtatccccagcactccagcagcgtttctcatcgatcggttagcgcgctacactaaattaaaccttccacgcgtgcagcatcgcgctcgttttaccctaagcgtgaacgcctcaagggaagggataatcgagcccctggctgcggttggacacgccgaattcaatggacttaaaccgaggtagaagagcagaactgtagaagcgtgactgcgtgagcatgtgaagtggattgtgagttgtgactgctcattagccgtatggctttctgcgtgccgggccttgctccggccgatcggtctaaaaaaaggtagtataaaaaggggcagatgatccctaccaaaacggtgcaataaatctagattggggcagcctaaccagtcaaaatgtagcagtctcaacgtactctgatgaaagggtgtgggtctagctggtctagtggtgttactcaaatactccaatcggtcgggctgcatgcgagatctgtgaacagatttctcaaatgtctgcatgtggcgtgtccgggagattctccttcgcatcgtacaatctcatctgtagcgtttttaacacttctttatttttacgctgatgaacatgataaatacttcatccgttctaaaataagtacagtattccactgtttatgtttaacgtttaactttttattttatttaatttttttatgattagtttttttattgttattagatgataaaacatgaatagtattttatgcatgaattttttttatttttttataaaacttttaaatatgacgtgtctacaacgagaccgttctctgtatagtcataaccagctacctcaatctcatatctaattgctactagtatactcaaaagtgcatgtattttttttcttcttatggaattttctcttagattagtcattcgatttacgatccgattacaccattatgttcataacaattaaatctttataacaagatctcacatgactatatttttatgaaaaaatacaaattacttttataatatatgtaaattacttttagattacattaaattacttcttagtcataaaagtaatttacctatattatagaagtaacttaaaaaaaataaagtaacttgttacgacattaaaagaaatctatacatccataatgttattcataatattgtgagttgtttattttataatcatttttagtcagtgacgtaatttgtgctgattaaatttaatttctatatagacccatgtttttacctccataacggatttatttttgatgtcgtgataaggttactttctttttgttttaagttacttttataatttatgtaaattacttttagactttactaaatttactataatatgtctaagaagtaatttaatgaaatctaaaagtaatttagatatattataaaagtaatttatattttttcatcaaaatataatcatgtgagatcttgctataaagatttaattattacgaacacaattacgtaatcggatcatagatcggataagttatttaagagaaaatttaatttgaagtataagtggttcctatttgcttgaaacataggggataaactactctctctctagcgtagcagagtgcgtcacatgccttctgattcggtttgttctggccttcttggcaatatcggcatgtggaacagatcagacgactacaccagcgtgtgggatcggacggccctagatgcgtcgcgtgataagaccagatcgagaggcttctcgagatagattttacgttttaaataagatgaacggtaaaacgttaggcatgtatacccacactcaacattcaacactggtgatcagtcaatactaacaatcaaccgtgactagtgactccaacgagcacgtgcaatccatgcatccctccccactgtgcagtacaggcagccgctgtcctgttcagtcgatcactgcactcccggtctgactgctgcacgagcaacccgactcgatggatcacgatctagtcgccctataaataccaagctccgatgaccccgggcgtgtcgtgtcggccggtcggcgtctcgtttcgccggcgcccgcgcatcttacactgtccaagccagcgcctgcgtgcaggtcgatcgccttctaaaaccggccagcgcgcgcgtctagtgcagcggctgggaatggagcgggtgtcgtgcgtgccgctgcttcggcggctgcttctcttggccgcggccgggctcgcgggcgccgagccgcaggtgccgtgctacttcgtgttcggggactcgctcgtggacaacgggaacaacaacaacatcgcgtcgatggcgcgggccaactacccgccctacggcgtcgacttccccggcggcgcgaccggccggttcagcaacggcctcaccacggccgatgccatctgtaagccgatgtgttactgccgttgattacttggtcagttgatctaatatatatagcatcacatttgtcgatcgatacgtaccatgcaccattttgtagctcggcttctgggcttcgacgactacatccccccgtacgccggcgcaacaagtgagcagctcctcaccggcgtcaacttcgcctctgctgcggccggaatccgggacgacactggacagcaactggtacgcacgtacgcacagctatacacacgcgacacgcactgacgcacacataaaccaacatgtactattcgaaccatgcatgtgtttcgagcgttgcacgctggaaatagcccacacgtatgtacgtatgttcgacacagggtgaacggatcagcttcagcgcgcagctgcagaactaccaggcggccgtgcggcagctggttagcatcctgggcggcgaggacgccgcggcgaaccgcctgagccagtgcatcttcaccgtcggaatgggcagcaacgactacctcaacaactacttcatgccggcgttctaccccaccagccggcagtacacaccggagcagtacgccgacgtgctcatcaaccagtacgcgcagcagctcagggtcaggatcgattacactcgagcctgcaactagttactgtgttgacgatatatgcgacatgacactggaactcaaatcttgtctgcgtcactgtgttggatcagacgctgtacaactacggggccaggaaggtggcggtattcggggtagggcaggtggggtgcagcccgaacgagctggcgcagaacagccgaaacggcgtcacctgcatcgagcggatcaacagcgcagtccggatgttcaaccggagggtggtcgtcctcgtcaaccagttcaaccgcttgttgcccggcgcgctgttcacctacatcaactgctacggcatcttcgagagcatcatgcgcacgccggtggagcacggtacgtactccaaggcaagccccaaaacgagatgtgcctagaactgctacgttatcttgacgggtgggccggtgtgctggctcacgtaccgatggtttcagggctggcggtgacgaacagggggtgctgcggggtggggaggaacaacgggcaggtgacgtgcctcccgtaccaggcgccgtgcgccaaccgggacgagtacctcttctgggacgcgttccacccgacggaggctgccaatatcttcgtcggccggagggcctacagcgcggcgatgcggtccgacgtttacccggtggacctgagcacgctcgctcagctctagctaaggtgcctgcgggctacgccgtgccgcatcaagaattgtccaagatcaggatcaagacttctctctcgtgattgtgcgggaattaatacgcgggaggacgccggaggtctcatatgttttgcttctatggtgtagaacttacagaatatgtgtgggcatcttatacttgtatggagtatatcagtatatgctagttgcagacgttttacagtgcaactgtaactgttgctacaatgttactgaaagagaaacagaagaaaacaaaaacaacagtctgtatattccagtttgtattgctttcaatgctgtctgatgtacaaccgcattgtgatcgacagtgaagcaacaagttgcaaaactatttccagtgaaacacaaatctatggtatataatgagttgattttctatcaatcatgcatacaatcctccacacgaaatcaacaacaggcccaactgactgttaaaaataggatctcgatgaacgtgatgaacgagtggtgctgccctcatttcgatctttcttccacatgccctcaaagctcaggaagcatttgagaggtttcacctgttcaagacaagggcacagccaaagtaaatcaatctgttacttgaacaatttctctattactatgacagaatgttcagaagaccattgcaatacagcaggaaagacattagccgctaccttccaacggtttctctgagatatttcattctggatataagacaattgttcaatgatcgttctaaagtcaggcctgctagcaggattttcactccagcattgttcaatcagcctatcatagtgtggagcagaaaagtggtcagttcagggtgaaatagtggcacataaaagttcaaagttccagataggcaaatggaacacagattgcggaagcttgtacgcaagaagattgcaatggaaaatatgtcataatagtgctccaaacaatttagtagttaccacaggcaaaacaaaagaaggaatgcttactctctcaatccgtaagcataatgctttggaggagctctgaaaggtggcctttctttagaattatgtgccttctcaatttcattatttttcttgtcataaaaagggagacatccttcaatcatctgaaaatgtttggaatatcagtacaaaaactggtcttctagggggctctgggagtaggttcagcagttttactttacagttcatagtggcacaggaatacagaatgttgcatagcaacacttttacctcttgaagtatcaaagcaaatgagaagacatccactttagtatcatattcttcatttcgcaggacttctggagctacatacctacctgcaacatatttgtcatgccaattatcagtgcagaaagaaggtaaacaaatgtaagtgatgatattttggaacagtaagatggatactaatatatagctcaaattcagtatgaattttcttacatgcattgcctggagaagttacagctttctcttctctaacttttcttctccattttagcatcttacacagatcgaaatctgccaccttcagatgtccagtgtcatccctcaatatgtttctgttgtcttacacaatggatagaagaagcctttacaaatcatgtattcaaagcatctggtctagaaataaaataaaagtagtactcacgaaggctcaaggtcacggtggatgatagcttgaggtttatgctcatgtaaataattcatccctctattagatttcagagagaactgcaaatcagtcttcattatagcaacaaaaaagtagaaccaagagattcaggtcatgataggcaaaccttgcaatatcaagagctaatttcactgcatatgacggttccagagcccctttcctactcaagtgcttgcgcaaatcaccctgagaacaaaaattccaaagttctcatcaattcactaaaaaaaggtgttttcatactcaagtgcatgcatagtcatgaaccatttgacattaacagaatactaataggaagttaacaaagctagtgatctgtctttgtagtggggctcaccttctaaaaaagctagaaacagaaagtagttagggaaaagtccatctagtctatgaacatattttggtggaccaaaacagcaaagttaagctcggtacacatatatccagcttgcactgatctattgtgcttgtgaccaaatattagcagctagaaggaaagagtgaaggctaaattggcattaccagttggccaaatatttccaacaaaagaaaagcaacagctaagacaaggaaaaacagatctggcattgccacttgagaatggcaacaacattttatcactcagaactatgaatgaccaggtaactagaaaagttcatctaaagcagcagctcctattgcagtttatcaaataggtctcagatctaaagatgatcagatatgtgaataatgcaaatttaaaaaagcgctgcctataggacaaaccttgggcataaattccattacaatcatcattgggctgctttgtgttacagcacctaaaaattgcacgacattcggatgccgtattagttgtagcacatcaagctcatctctgaatgcttgtctgcaatgcaaaccaatctaatctgtcagggaactacatttttcagacggagtctacaattaagtgaaaaaagacgagtaaaacagtaactgaatactactcaatggaaccaacccacactttgttctcgtccataattagatcgtcatcaagcttcttaacagcaaccagaatgcccctccatgttgctttcctaaatgtaccctgagaaacagatgaaaatgatataaaacataattgacgaaaattgatggagcaacctaacatatttaaaattatgtacagaaagtaggggtcagcaagtcaacaaattagaaacattgtgactggcagattgtgtctctaactgaaaatttcaaataagaaagaaaggctaacatattcatatatacacacctttgatataccatttccattagtgaaatctagctcgttcggggaaatctcgtactcaggaacctcacggacatttttaacatgcataggagcaatcttcaaaaaaaaaaaaaaaggaaataaattcagaaaacttgaacatagcagtacatcaggaagacaaaatgcccgtacataatagttcggaagtaccttaagcttggagccatgcttttccaagatcttgatcacatcatggttctggtaatgcaatgcgtctgccaaaggctgccagatggtagacaaatgatacaacactcgcatattaaaatagcaacctagaaataaacatatatattagaagtattatctcgaatccatctccctcggtgactaagaccatgttcgcgtcaatcaatcattgtacttactgactaaaacttgcatctaataccattccatgggagttcccaattcaactcagattatccccgagtaatcatgaggtttttcagctagagcaataaaatcaccaatagcagcaaaacaaaacaaagttcagggaggctcaccgtgctgccccactggtcctcggcgacggcatccgccccacgctggaggagcagctcgacgacctcggcttgcccctcgcaggcggcgatgtgcatcgccgtgcggccgtcggagtcgcggaagttggggtcggcgccggcgtcgaggagctcctggatcccctcgacgtcgccctcgtgggccatgtacatcagctggaagcccatgaccccgaccgcctcgctcgacccctcctccgagctctcccccgcaccgccgcggtcgggcgccatcgacgactgcttccccagcttaaaccgcggggtcgccgcggccgtcggcgtgcttggcttcggctccatgtggcggcgcgggcgcgggcacgggaggcggctagggttccgatggggaggacgagacgagacgagagatcggatcaatcgaagactttgacggcggaattgagtagagcggcgagaagggggaggggagaagtactagcaggcagccgcgcgaggggaggaggaaccgagttgggaaaaaaacgggtgggtgggtggctgagctggcaacacctccaccaacagaccccacgtatgaaaccgaaaaggaaagaacggccgcaggatccccggatgtgcgggtgacagctgggccccgctgcttaatgcggtagttttgcggttagtgctgtttgctggttaaagcattctcttcgaaagacaggagagaaacagttttgtgttccaattatggtgtttggtcatttggagtacagggactttacgggattattattgtacgaattagcttaaatccttaaaaaaaagttaaaagccttacacgctttggatgtagactaagattattaaggttggacatgtaaaaccataattctattagtgcactttttccgtactcgtaaaggaagttgtttaggataatgtttaagttaaaccttaggaatacaaatcatgaataactctcaagttgttgaatttgaaaatgtaaaaaatatatgaatagatttgtcttgaaaaatactttcataaaaatatacatatatcacttttcaataaatatttttatagaaacaacaagttaaacttgtgttttggagaccgtgtcgctgtctaaaatgacctcctctatgagtacgaaggaagtataactaattaagttttaattatttaaaataaaaaatgtactattttaaaacaatttttatataaaaagttttcgtattaaatacaatatctaacagttcaaaaaaaatatgctaataacaatcgaggtaaaatgtattaatcaaaaaagaaccaggcatatgaccacccaaacccaaatggcgaacacccaggaatgctaacactgatggaattgatcaactaataaatgttatacttccttcgtttcaggttttgattttagtcaaagtcaaattactctaagtttaactaattttgtagaaaaaaatagtaatatttttaatccaatactagtatattatgaaaatttatttaattatatatttaatgaaaaaatgatagtgttataaatattactttttttatagagttagttaaatttatagtttgattttgaccaaatatcttatataactaaaacagaggaagtaaatgtttagatcgagacatgtcggctgcttaatactaagaaaaaggcatgttgttcgcaggagacatcagatgtccggtccaaatctcggggtggttagcgagggaaacactgctagccagtagtagcaatatcatcatgtctttatgacgtatatactaattactaataagataagagctttaggtagtatgaaacgagcattatatatgttgtaagatagttgatggctggagatgcacgttgcggataaggactcgcatgatgtaatggggccttggtgttgtcatcgtgacgccggaacagaccaattggggataaaaagaatcgtaaagcgtgtaggtatggacgaacactatgctgtctagaagcaaagacgccttgatctcctaaagaaattgttgtcgtaaaaatctgaaagtgacattttgcttcttgttcattcggcgggagatatataaataaaagaagacgtagtacaggtctctggtccttgatggttgctaggagacgagctgacgaggaagtattatccactaagatcagggagatatataaataacgaagtattatccactaaaaacattgaacttctctagctgcgtacaatccagcctaagatctgacgagtgaggattaagcgtataatatgagtggtacttatctcaatgttcttttacaagctgggactaactcagcaaaggaaactaaatttttctttagtatttgacgtttgccactttttcaggaggagatgcccctgatatttgtctactttattcgaaagtaggatcgcatattcagataagcatcctctccgatgctgaaaggccgtcgatgaccgagtcatttcgttttctcttcgttttcctcgctgttttattgccttctttccgattatacaaggcaccagcgcattttcaacgtagctgaaagcgcgtacccgaccggccgagccgaccagctgcttgtgcagttcagctgcgtgactgtttccgttgcccagacgggcataagacgacggccaaaatggatttcgtccgcgtctcctcctcacacacgtaaatgatcgatgccgacgcgttttagtacggggaaagaaagcagtcagcttgggccactgtatgtcttcgatttgagttggctgttgttctgactgttcattgggccaacccggggccaccagctacagataaacaaaaatgaaaaaacaaactcagatcactttattctattcgccccgttttctttgtccttattctcactctagaatatttgattgtattagatctatttattttatgtaggagcggattctgatccctcgagaggacacctccttattttgtacatcaaatttattaaaaaagtgaaaaataattggtatagtagatcaacatgtaatatgtttttccataaacatacaagttcaaatttgatttataaaattaaaaaaaaaacgaatttgactacggattacacgttctatccaaagttaaaatttgttattttttctatttatataagttaaatttgaaagcgatatatcacatattgatctactccctccgttttttaatagatgacgctgttga

SEQ ID NO: 27495 - DNA, 3882 bp, Oryza sativa
acagcatcatctattaaaaaatagaggtagtatcttactatttttttaaaaaaaatgatgatttttttagtgacaagaaaaacaaaaggacattccctggagggatgaatagagtttttattgtatctcttcttactatatagttggtacccactaagtcataattgctataaagcttgcacacagcttgccacatcatcgacgcatattagctgtcagatatccagtttgctgttggcaaaaaaaaaaagggaacaaacctctcccttgacgtctctgcccagtgggctgttggtccaagcaacagaagaaaattttttcgttcccaatggacgaaagtggcccacttgataaacacgtactccacattattttgtcggaaagaaaaacacgcaaccaatgagtaaaaaaaggaaacatgcgaagattgatcaacaatgtttctcagtaagaattctcaaatctcgctgcaacgcgcggggcatccactagtatttgtaatttgcactccacgtccaggtgtgtgcacgcctgtgcatcccctttagtaaaaaaagaaaaaagtttatcacattgcagaactacactatgcatgcggcatgccaacgaagaataatgaattagaagacaacatcaataacaatacttacagtttcaggagatgagcgtcctcgctgatgtttcctaccaaaaggaaattcatagaagaataaagaggtcgggtgtcaacctagccggttgcatcctcacaacacgagatgtgtaaagcccgattattgatgttccagcataaaacttgtaccgcacaacgctacaggtgctatttccgagaaaaataagtcgaagaatccatagcatgcatgctattagcagaatggtgaatatattattccttcgaaacacagcatgcatataaataacatgccagtacgccaccatcatcctttgttgtcatcttcactagtgaaaaatttagaaatgatatggtacgaagttaaacaagtagtctttgtagtacttaaggcagtttatgaaacaaactattgcaaactaatactcttttatttagttcatgatataacaaagcatgtaaagtgtgcagtgaacaaatttcctgttggatatgtataactggcaacaattgatattttctagtccctatgaattcatacactaatacaatagatatttgcgtatattatttttcatctattgacatcgtcaagaaacatgtgtctcgtcaaactagaatcagaagatgaatgatgtccattcaataataaggatgacaaaaaaagaggagggaaagtgaatgtttaaattgttctcaggttttagctcttaccttttggagaacattgttatcttcactaggagatgcttcccctttcaactttggtatcagccaaggagtcgatgttctttttgagtatcgtttaaccgtatcagatattgggcacaatcacacaattgcaaccacactgaagaggtcccaaaagatggaatcgtaaaagaatgaatggcaggacaactataaaatcttatcttcgattccatcggcttatgaatctgatgagatcaaaagttgacatacagtggttaaacatattggcaacattctcatgtaaacataagttttgtttctaaaggttacatttagtgcttgaaacatactccctccatccctgtccagatacatagctagaagttggttttttataggacagggggtgtgctgctgatctattggttactatctaccctcaattgtaaaatcatgcgagcgcttaactgacatatgtattcaactctacgccatgcactgtaacaaaatatggacactcatcatctctgatttgttggatgttgccacttcctactgtaaggtatatatgcacatatcctccatgtgaagaaagagctattagattctactttctctaacatcaggtagaacaaggaatccttatcgtaaaaagaatgaaagtaaaaaaaaagaacgaaagtaacagtcaaatttggattgcatggctagaatttcatgtgctaggaagaatatgtatgattgtaccagaaacttgtgtacatggcctaaaagataagctgccacatactacctccgtcccgaaataagttaatctagtacgggatgtgcatgtccagatttgtagtactagaaaatgccatatcccatactagattaacttattttgggacggatgtagtatgcttatgactcgtaagctgtttttggcatggccaaattaagattaaataaacatcaacttgggaacaaccactactggaagtttgaaataaatccatgacctcgccctgtggatatgtatcgaagaattgtggaactaatattaatatacaatcagttttctttttcttttaaagaaggttctctacaggatccaactagctacccaccaaaatatacacactagtattcaagattagtcatcaagcctcaagtaaaaaaaaaaggtaccaagcttagttgaagaaaaaagtcccctcgtactgagaatactttagtaccaactatattagctttagaaactacttctgaaacgttcttaataacatgtcccgtttctctttctcaaaaactagatttttgggcaaccttagttgaagtttttctgaatttgtaggttcaccaatgaaaacatagatgaaatttaatcttagacaagcattttttattagaataaagggttaattggtccatactattgcaaatatgcctgattggaaatctactattactattcatgataccgactgagtgccgttccgtctagttttttatcggcacccatccaagtcacccttctccatagatacttatcatttaagcgtctaaaatctgaatactataacatgcacttcagtttcatatatagcatatgaaaaaaagaataacaaatgtcatgcttaacacaatgcgatgataaaagtatgtcatgtaaacataaatctaaataaaaggtacaaactacataaccacaacctacattattctcaaatacagaaagattatacatccaaagataggagccaagtaattagaaaattgcatttgatttctaggtttcctccataaaaccaaaacaatactagcagtaggaagcctttgtggggaaggaattttaagaaaacaaaagctctcgaaaaaaaaagctagcacaactcaaacaagatcccctacatgggagtatggcatgatattagcatccaactttggaaaaagtgattatgacaaccatcgttccctctttataagaagttgaatgcctagactcaatttttccaagtccacattgaacaaagtaataacatgttccagttccacaagagatgtctggtgtgccaactgtggagcccttggttttggctcatgtcatacatgacgtgttagatccatttagaccaactatgccccttagaataacatacaacgataggttacttctggcaggtgctgagctgaaaccatctgcaactgtgcataaaccaagagtagatattggtggcaccgacctgagggtgttctacacattggtaaagcaaagacctatatgcttccatgttggaacatgttctaaatgttgataatgcaactccattacacaagaaaaaataatatactaaacttgtttcttctacttttacatatgcaaaaggtactggtggatccagatgctccaagcccaagcaacccatcactaggggagtatttgcactagtaagccatttataaatttgtcttttccagtctcagtgggatacatagacaccccgaggtcatggttgtggacatcttctgggtgggacagagttcctgtgatgcaacgtcccacctgacgtggt

SEQ ID NO: 27496 - DNA, 5009 bp, Oryza sativa
atgtcagtgaccacggccctctgaatttacgtaagaggatctcaatcccttcagtgacctagtcccccttcctctatccccccctctatctactgattgatgtccttgtttaacatatcttatgttgtgtgtaggatggtgatagatatcccaggaacaactggagtcaactgtatgcatagcatctgttagcaaatttaatttcatcgtaatcttttagattaaaaacaacaattcctaattttcttagatgtgttcattgccccataatcaacaaaagtacatattaattgttacaataaatagttcgtatcttactgaattgctatatgatagccgactttatagcaattcggtaagaaacaaaattcattgaagaagcactctatagccaatggctagtaaccatgagatatggagttcatgaatattaaaaagaaatgctaaaatgaactatcagggagaaggttagaaacaaatttaaactaaatccatgcctacaaagctacaacatgtcaacaatgctagctacttgcataggaaagcttacctaacatgtgtaacatatttgctaaatccctgcctagctaccggagctttgcagtttagcaaatatgttacattaagtcattaactttgccgcttatgtcaatagttatccccaaaaacaacataaaagatgcagccattaatgagcctaaacgtaaggaaacaagtgaaaagctaccatatggcaggaagagtactaaataattatcggaacaagttgattcttgaacccaagaacaagaagaagactatgttcaacgtgtaagtgctttattcaccacacttttttttagcttaatattgattcctagatttttggggtctaaagatgactatctacaaaaattcagaattgtgtgttgataaaatggcatacacaactccctgaaaagtcacatactaaatgagattaatatttcatattcacttcatctatcaagtttatatatattgttgaggggtagtggcatcaacacagtgttacagctaggagctacatattccctagcttaagactaaaagtataagttaaatatagctaaatcaaacacctaacatattttgtgctaggctaagcccaacttccatatagaagttcaagtttcatagggaggagacgacatgttatggaacatttaaaatagtaaaggtttaaaagctaaggttcacccaaatagacttcaaaatgatttgacaaacgaaattgggggatcctgaagaaaagacgaatctgcatactatagtagtgcatagcagttatgtcaattggaaaaaaaaaatacaaattgatttcgaatatagatgaaatatcataaaactcttgcaggtcaagacctcatgctttatgaaagaccggaactgagatatggtatccaccggatggtatttgtgttattccgacaacttggcaggggaaccgtttttgcaccagagatgcgacacaacttccattgtagaagctttgcgcaacaataccatctggacattgtggccgctacatatttcaactgccaaagggaagccggctctggtggaagaaggttcaggtccgagagttcttaatggacaattggagactatcgattgttgtatggcctttacgaagtggaatttcgaaataacatgcactatagtattgagtgcaccgtaaaaatctatttatgcaacacgataaatagctctaactaccacgacatgtacccaagaatacttatatataatgtcaaaaagaaatgtgcctttgatgatgagacggaaatttttcgattacatagaagacgcaaatgcgcgcatgagcaaacaactacacatatacatcacactcacatgcccatgtatgcgtttctaacaaacgctcaaagagatgaaggctagcggtaaatctccgatctcactaaatttctattgaaaatacacccacatgtgtgcaatatttgtaagcaacacggtttaaaccctggtgggtggaatcatgcacccatgactccaccaccacatcacatgtgcttatccagacgaaaattttcattacaaagcaattatcatagcacaagtgctataggcctcacaaagcaaatattaatggagtattggtttatttactttgatagaaaaaccactagatgcaacacaaacattctgtgcaaaaatcattgttcacaataagacaaataattttctcctctagagtgtgaacaaaaccgttgtaattgttaatacattattcacttcatccatgcatcaagaagcttgtcaaactcttggtcaatttgggtgggagcaaatcatgaatttctgtactatatgcatgaacatcaagtaataattttctagtcaaataaagacaagttatttcattcccttgggaatatggctaaccaatcagtaatttagcatacacttatttaagacattaatctaattcctaaggcttcattcgagaaagtagattggcttagctttgtcaccgcacaaggaacaagaatagcctctagcgtatgattagttaagtattaactattacaaacttgaaaatatggtttatttgattttaaaagaaacttctatatagaaagtttttgcccgaaaacacaccatctagcagttcgggaagcgtgcgcatggtaaatgaagaagttgtaaaagcgaaacgaggaaaagaacacaccctaagaatttatgtagaagcattggagaatggcccaggtgtttgagatagattaaatgagttttaattattacaaatttgaaaaatagatatattcaatattttaaagcaacttctatatagaaagttttcgcatgaaatttaccatttagcagtttgaaaagcgtgaatggaaactgaggtaaaatatgcatcttaatcagaaaagaatggggccgtcacaaggggattataacctccaaccctaggctccgttcttttccgctatgggcatgatccccgatctcttaaacgatgttgtttttgggaaataaaagtaagtttcttagaataaagttttaaaacaattagtagtattactgaaaaatgacatttatgccattcactaagtcacgtttggtaattaaacatacataatacaggctcagtaaatgagagttgagtggaaagggggtggctcaatttcatatcttaaagaagatgatgaaatcaacagaaaacgaggagcatatgttggagtgtgaacccggataacggggatctagcaggaccctcttttggagctagtcacgtgtgactaaggggctcgagcccctctagagcactagaatggattaacacaaagttgtatacaagtccggttcacccagaggtgtaatatcctactcccattgttgtgatctctctctttgtccttgaaggatcttacaagtttatcgactactcagagtagttctgcttcctttctcttcttggtttgattaaatgtgttgaagtctctcctaagccacctagcttcaaaccccatatccttccacggtcctaattctccccttataccttctctagggaataccacctgaccgcagttcgaaggaagattttgttcatatcaacattaggtacaatacgtcttgtctgctgcttctcttctcgcctgctccatcagccttggggtaggccctagaggggcacaccgtgagtggggcacggtgagagcttgccacattaacccgcccaatctatcggggacttggggccacttcaagcagggcccgttttgtgtggggtgcaacaacagctgccacacaccccgcttaatccatacaggctcgcctcgttgggtgtggggcccacttgccattgcttgttgagaggcggtaaaggtgtagttctcggtgagagcgcagtagtcaaccacgctcctccggtttcccatgtccatacaaggaccgacacggccatgctttttgcctcggggtttataaccgtccgatcatgcataaatgaggaggagttaagaacttgaagctagcccaagcacattgtttaacctctgtttgggaactggccttggggtgccttgagggttccgtccttcataatctaggatgggccacgtgccaccccccaaatcgattcctggtatgggtaacaagccgaatgagaggacacgtgcaacttcatggtgcacgtcgtctccttggggaccttggttcctcggtcaccaacaaccttactgtaaggaatacggttcctgtgagataaaatttgaagctaatagtatattcttttagtggaggagtaccagcgaggaggacaaaaaggacatgtaactatttgtcatgtttaagatgtggtgtttaacaatttactactcataatctatgacatgtgggtcctcatgtgcatatgatatgtgggtcacacctaaaagtaacaaatagttaaacatctcaaaaaaaaatccattgtaatttcggttaattcgatttgccattgcaaatatgcctttttagataactaccattacaattcgtttattcatagtcgtgccagtgaaattttacaaaattggaactgtgctactaccgtcacattttccatccatctcctcatttgaacgtgagacccactcgtcagattcatcttcttcatttcacactcccttatcttcttccttccccatctcagtgtcatggcgaggagcgtggggagagcaccttgatgatgcgggcgactaagctcttgttccaataaaggctggaggaggtggtggcggtggaggcgaaaggggaaggggaagggatgggaggaaacttggcccgttggcacaagcctgttggtcattgtctcatcctaggaggtcgagcgacgacgatggtaaagtaagtcgaggaggctaaggaggtcaagcagctggggagagctctcctaggtctccgtgaagctctcacctttgtcttccccctcccccctttgctcctcttcatgccatcgccgttgaagctaa

SEQ ID NO: 27497 - DNA, 742 bp, Oryza sativa
agctccttctactactccaccactgaccactccactccacagctccactccaccttctagaacaatctcagaggctctcccactccgcatagtcttcccatagcaaccccaagaccatcgcacaagcgcaaccgagccgtgccggaaacaatggcggtgggcaacggcctgatcctgtaccacatcctcgggctggcctcctgcatcgcgctggtctacttctccctcggcgaggtggacctccgcgacgccctgccatccctcccgttctcgggcggcgcctcgcgcgcggcggcggcgtccctgcccttcgtggagcggcgcggcaagcgcctcttcctggacggccggcccttctacatcaacgggtggaactcgtactggctcatggacctcgccgtggagccgaacacccgcccccgcgtgtccagcatgttccgcaccgccgtctccatgggcctcaccgtgtgccgcacctgggccttcaacgacggctcctacaacgccctccagctctcccccggccacttcgacgagcgcgtcttcaaggtaaccaaaaccaaacccatccattcccaaattccccagcagtaagaacgcgagatgcccactggtgcggatgctgatgcgcgcgcgcgtgcaggcgctggaccgggtggtggcggaggcgtcggagcacggcgtgcggctgatcctgagcctggcgaacaacctggacgcgtacggcgggaagcggcagtac

SEQ ID NO: 27498 - DNA, 936 bp, Oryza sativa
cgccagtctggacgagaagctcaagttcatgacgcggtggatcaccgcccacgtggaggacggcgacggggagctggagaagcccgtgctggtgacggagttcgggctgtcgcaccaggtggagggcttcgaagacgcgcaccgggacgtcctgtacagggcggtgtacgacatcgtccacggctcggccaggcggggcggcgccgccggcggcgcactcgtgtggcagctcgccgccgagggcatggaggagtaccacgacggcttctccatcgtacccagcgagaggccgtccatgatgcggctgatcaaggagcagtcgtgccggctcgccgcggtgaggtacggcgaggagggggccaggaaggtcctcaagacggtgtgcgcctgatcgttctgatcgtttcttttttttaaaaaaaaaaatcacgtcctagcttcttgtcctcttgaagaaaagaagaagaaaaatccagcgacgaaatgcgcaggagaaaatcagtgcgaaatcgcacgaaatagagtgtaatcaatgtgcgtgcacatctgcgtggcaaggttttgcgcagatcggcgccgacgtttgcagatccgccgacacggcccagtgggttttttttttttttttttttttttttttttttttttttttgccttctgtcttttgtgtgtgttgtacgtgcccttgacctttgatatgttaaatcattgtcgagtggcaggggaatccagttatatatagtcatcggacagtgtatttctgcgcgggaggtttttatatagctgcctgtaagcataataaaaagaggcaaatacaacacttaaatgtgatcaggtaaagcattactaaatcgattgatattgagatgattttaattgcgtcgccctggtccaaactttcaaagacggatgtcagattttgcaatatgactaggc

SEQ ID NO: 27499 - DNA, 26486 bp, Oryza sativa
ttgggtttgtaatagtattatcgctgaatttgtaaccttacatatgtatttatgtgacaaatttaatgctaaactagaaaaaatgcccgtgcgttgcaacgggtgaatgctattttaatcttattattgttatacggtttagttaggataaaatttattttagaaattcacttgatattttttttagaaaatcatgatatgcaattaggagtctgattttcatctcaagttagcacgtgagtttttttaaaaatatttcttataagactcttttgtattttccaaaacaaacgaacttaaaatccgactcaaacacggatctgtatttccaaaagcaaataaatttaaaactgactcaaatacagatgatgtactaaaatgccggaaaaaaacatctccaatttttttaatattagagataggtagtttccagtcattagcctttcggcttataagctgctaaaaaaatttaaatattaaagtcttaattttagagttaattcgacggttttttaactgtagtttatattccagcattgtcttaaaccgtaaataatacaaatataaaagttttatttatgaattattattttttcttatatgacattttatgagttatcagtcgcagaccaaatgatttgtttcatggttttgtgatattatggatctaaatatattgttttatgataattttattaaaatatagttacgtagtttctaaaatttactcaattttttttcgatccatgcaaagatcttcggcatttttataagaaacggccgtgtttggtggtgggtgttgggaacccatcacccacgcacggaaaatagagcggtccattagtgcgtgattaattaagtattaactatttttttaaaaaaatagattaatatgattttttagcaactttcgtatataaactttttataaaataacacaaaagacagaggggagctgggaactcctgtatcgaacacatacacagccctagtagatgtgagggctgaggctctactccttgggaaaagtaacagggagtgtcgggcggaaatttgagtgaaaaaaaaaatacatgagtgacatgtagcaaaaaccaaaatgataaatcgaaggcccatgtgggtcttgatctatgaaggccggaaatgacagcccaacccactggagcaacataatgtgtcgtccccttgggccaattccataccctcatgtaagcccattcactatccttccaggctttccagcccaccgctccaccgatctcgtcctcccttttgcggcttgcgaatgtcaacacactgttttcccagtgccccggcggccagatctcctcatgccactcgtgctcttgcgcgacgcctccccgtcccgactccagaggaccaggttctcctggaagcagatgcgcggcgcggttcacccgccgagccggacgtcgtcgtcgcctccgaggagatcagctctgatcacctccgtcccggcggttcttgctctggccttcctcctgatccttgccgccggcgtattcctctactccggcaccaccaccacgccgtcccgggccgtcacctccgctggccgcgtaaacgaagcacgtggcgggggccatgctctgctgtccccgacggtggggtccataggtggtgcgcgcgccatctgggagctccccgcggcgccggccagggcggtcctcttcgtcgcccacgggtgccactgccgcccggagaacttctggccgccgtccccgcgctgccccgggtgcgtcggcctgccggaggacgtcgccatcacggaacgcgcgctacggaggcggttcgcggtgctggccctggcgagcgcgagggagtgctggtcgatggggaaggaggtgagcgccgcgaaacgtgggatccggtcctgggccaccgagaacggcctcgcggaccttccggtggccgccctcggcgcgtcctccggcgggtacttcgtctccaggctcgcggccgagatgaagctcgccgccgtcgtgcttatgatcgccgagggctccttcgggccgggcggcgcgccggccggataccctcccgccatgttcctccacatgccaaaggaccagcggagggcggcattggtggagaggaattccaagatgctgcggagcaatggcgttgaggtgaatgagctccggagcctggagctccctctaaccccgacgatgctgtccgacaggatcccggggctgaaccggggattgtccgagaggatctggagggtgttcacggaggatggattcgtcgatgagagagggttcatgaggaaggatggccgcgcaacgccatggaaggatgcagtggtgaagaggggattctgggaggaggtggctgggtgggctgatcacatccaggaagagcttaatcttgcatatggataccatgagatgacgagcttgcacactgatgaaatgttcgattggattgaggagcacctgagctgaggtttatggttgattactcctaaccctttcgtgattctctaactaaatatgaaaactgtactaattggaggatccgagaagatgctgcaatcttcagcttgaggaatttctgtaaaatgaattaggagagaaaaggtgggacgatattgtttgtgaaaaatagacttgatgttaactgctgtatatttctttcggttggctcttctgcaaatggactataagaagcataaacacagacacggaggtactgtagtttagtaaggttttgctctgatctgtaatggagtagtatagtatcagttctatgtgtatctagataaatcttttgatgaatattgttgcattcttgtctctgaacagtcgcactttggtgctgaagccacggtttaattgctagatagcagatgaaatagaaagagaattgttattttcaacattgcattgtccccttgttctgttgttcgtataattgcagataaaacaggcgttcattttgcctgtatagaacttttcattcccttgtccgtaatgtaaacatttggcgcctcccaccgtgcaaacatcaaatgtctaatgcattatcttttggttagcttcatccccttcatgtatcagacatgaaattttcgtttgtctggtcagctgttcacctagccaaaaaattctggattggccttccagatttgcagttagagactcaagagtgcaacatgttgttcactaatgttttgttatccagtattgacaatggttggggtaggcatatgaaattctgaatgtgaccaatctggtgagcatcagtcatcagatggcaaactgtatacggctagacaatgccaggcatatctggcgcatctcaaattgtccatatgagttcgatttctggacttgtgattctatttctgcaatctgcactcgtgtttcaggctttcagctcgacgacttcactctatcctcaaggccttcgactgaaaatgaacctgctagctcttgatgcgtatttgtcccttcagtgaatcagtgccgctggcacaattgcacgccgctggcacaattgcacgcttgcacctctcagttcgtttcctgcttagttcttcagttcttcaccctccagccaaattaacgacaaactttaacaagcgagcatgttaatgtctaccttgtccaaattttcatctatacaaactgataacgaagaaaaatatacaactcaataaatatcgtctggttttctactttgtacgattcaccacgttgcccaacctgatgtgtgcacgtcagaattggtagcagccaatacagataggggagagaggaattcccttcctcggattcttggcgcgcatgacgtcgtagacccggagaagattgagctctgcagcaacaacccaaacacacaaagcggtgcgcttccacttccacagcgggctcatgcggagtcatagcagagccattctcgggagcctccacctgtgccctcccgcggtcagcaaccgtatcgctacctccccgcgctatatatgctacctccccgccatacgcatactcccatctcggtgcaccttaattgctctctcttccgtagcgtatctgatcgatcgatcgaccaaggtggtgaccatggaggcttccaggaggtggccatatgcagcttggtttatggccgttctgggtttggtcgccgtgttttcatcgtcggaggcgtacgtcttctacgccggcggccgcgacggctgggtcgtcgaccccgccgagagcttcaactactgggccgagcgcaaccggttccaggtgaacgacaccattggtacgtgtatcatctcgatcatcccctcatcgatgtataactacgtgtttttttttttggtttaatcgttcaagtgtacgtgcggcgcgtttcttggctcgcagtgttcttgcacgacgacgaggttggcggctccgtgctgcaggtgacggagggggatttcgacacgtgcagcacgggcaacccggtccagcggctcgaggacgtcgccgccggccgctcggtgttccggttcgacaggtccggccctttcttcttcatcagcggtgacgaggaccggtgccagaaggggcagaagctgtacatcatcgtgatggcggtgcgcccgacgaagccgtccgaggcgccggagccggccggggcggccgggcctgtctcttccaagtcgtggtcctggcaggcgttcccgccagccggtgctaccaccccgccgccgctgccgccgtcctggggctcggcgcctgagcacgcgcaggctccgggcaagagctcgctgggtggttctggcggcggggaaatgtcgcgcagcagctcgcttggcgcgccaccgccgacgtccggcgcggcagggttggccggcgtggttgccagtgttgtggttggggttttaggggctttgttgatgttctgaaatgttgtacactgccacactaggactgggcaggacgccaggacgttctacctccatggcgatcatacaggtcacagtggtcagcgagttagtcatagttagtttggtagttaaattagtataagacttaaaactgatgcacaaaataaagagaacgctgttacacgtacatgtatggataatgaaggcacatgctcgactataagtaccattggccttcatggttcaacgagatgcataattttgtacaatattttcttcggatattgccctgtttggatccaggtaacatcagatatttagacactaattagaagtattaaacgtagactaataacaaaaccaattcaataagcctggactaattcgcgagacgaatctattgaacctaattagaccatgattagcgtatgtgatgctacagtaaacatgtattaattataggttaattaagcttaaaaaaattgtctcatgaattaactcttatttatataattagttttattattagtctatgtttaatacttttaattagtgtataaacatcctatcattcatcccaaagtgctcagtacatctggagtgacttcaattgggccattctaatagtggcccaagctgggcctatagaagttctgggccggactgctcggtgtggcgtcgcgtcctggcagtcgagacgggagcgcgtctggaatctgcggaatcgccgggagggcgcgcggtgccgctgccgccgaagccgcggtgaggtcagtgccccgctctccccctcctcctatagtcctattccagcgtcccgtgctccgtgcccccgtcgccgtcatctccacacggctccggctcggggcgcgcggttgcgcccgacgaggcgtcgaccgttgctgccgtccgccatgcggcccccgatcgaggagggggtaacaggtaactatttcccctggctcgttgcccattgatttcgtcgacggccgctgtctcgttgcccactgatctcctccggcgtgccgccgttctcctgccgcacgcgccgccactcgcaagtgctccacctgccggccaagccaagctgtagctccgctctttgcccagctttgttttccttccatctcccactcgcggagaccctattggggatcttcatatcagcgatacaaaataactcatcgtctattcgtctctaccaatcctgccgctcgtgctctattgttttccatgatttaaaaggcctgttttgcaatggtggactggtggtactagcctgctagtttctagttccgaagatctagggtttcatgtgcacaatgctgcattgtagttgctccctcctcctttttttttccctgtggtgcgaatttacagcatggagtacaatgttggcgtgatgaatcaaactcggaccagtcagatgaatccattttggatcagtcagatgaatcagacttcacctctgactctgatgatttttgtgcacttatggtcaggataaaatatcaagacattcattatcacaaatcagaacgatcgatcatactgatgatcatactgatggaagtgcttttgatagtgagcctaacacagaaaatttgaatcttgtatttatggcgatagagctagagcaagacatggtgctagcaatggcaaatgacaagttgagcgtttggattacaaaaaactgtatgatgtatgtatccttatcctgattcttctatatagtgaattggttttcttttatcaatggttggttagttggttagtttatgtaggaaataaatgtaatcgataaggaaagacatatcaagtaacaattagagggacaaatatatggctcataatactacatgtacaactcacatagcttagttaaataaacttagctgataagccatgcagcatcttgtagtatggttgctgccttgttgtgcacaatgcattgcaaccaagtggttagtatttcagattttcagttatgttaacctgctgataatatacttcgctgtattaatggtgttaaacaagagattatgtgcacgtgtggatgtgtatttacccatgcatatcattggaattatataaaacactcactttgctctctttttaaaatagcatatcccttgctattgattaagcacccaacatgtcgtgcctttgatgcactctcctagtttcctttggattcactgcagtgagcagccgagctccaccttagtcgcatgttcatactgttagagcttcactgcaggccagttggaaccagtaccagcattctcggtggcccgtcataccctaactgagaataaggacaggcctaaatttcacaataagcattgatgaaccaaatcctaatttatttcttctcattttgtttttctctcctgtgtttcttttctagttgtagccagagcataagacaacacttccaatgaaagagtatttcttgattccaggctggtgatgctgttttgtactaatgtttgccaatctttatggaggctttaaacctgtagctctttaacgagatttgcaattagtaatgttcaaactgatgcattcttgaataagaaaatcgttggaatccattgcatatatgattggatattactaacttccattccatttatttcatattttcatgtgggaatctacaggaggcttatggaaaagcatcatctgattcaagtgatgatgaagagtggtagtacacatcaaaagggaaatttagaagacaatgtgctgaatcacctcagcatggaaaatgattctctagaagagcaccagttaggcaccagaataatgaacataccccactgaatgtaaggctttgtgattcagtaagtgagcaacaaactgaagtgctttgctccaatagcaatggtagcatagccagaaataaacactttggtcctgcaattaatcaagtataaaaaattaagtgtctacttatgttagtcaatctgaacttccccacaaccaccacattttaacaattaaaccaactatcctctccagctaacaaataagctcttctttgggaaatgcacgatccaactttatgattctaacttttgatatctctttggatattaggttggacatgcataatctaaagtgtagatttgtctcgaaagtacttttggatatttttatcatgctttataaacacattgtacaaagaaactagctgaattccttgtgcgttacgtgggactaaattaaagttccatctttacttcgaattattggtatgcagataattgacttcataatttgcatgggaatcaaatcgcttatttattttattttttgttctgaattttcagttatcttgtattatatttagtgtgaactcttctaatatattttagtccgaatttaagatatttatgagttgtattttacatgaattagttgttttaatctagagtattataatctggacccataccattctcaacattaaagattttgtttttctttttctccaatgaccttgtaatatctaggccttgattctcaaattgttttaataaaatatataatagattgaaagtcaaagttgagttttggacagtgttaatgcccaaaccatcccttattcgtcactggagagtatattgcttacattactaaattatttcatggacaaccaatttttcttgtaggactgaaggtatatttcaaggaagatccgtaccctagttgtgcaacaaataaaaatcttgcacaaagagctaggcctcacattcaatcaggttctaaactgtgatctttgttcttcctcccatgagcacttttgcggggctgtcactgtatttctcctcctgaatagagtttctgttgacaggttagtaaatggttttctagtactttgtcattaatcaagagtagcagccaccaaaaaaagagaacaacattgaaaaccatacagctgagaataataataccaatactgttgatagcatagaggatcgaatgaaatggtgatggaaaaagtaagtgtagatagaaatgaaatgatctctgaggaaaggatggaacacaaacacacaataatctcattgaaggtattccagtaagacaagataccaactgtgggcagaatgtggttgtgaattctaatgtggtcaaccaagattgctctattgtctccaaagaaatcgacttgctaaaatgcggtactagagaaaaccagggcaagtaatgctggaacaccagaagttgagtccacagagagaatgatccctagactagaacatgcagatgaggctacgcgaaaggcagtacagtgggagctgagaaagatgaagacgacgggtgaaactccctagtgttcggattatttgaggactctcttattcaggtcaagttttggatgctgcctgtatcgcttaatgtcatagtaacatgctcatacgtcataatgggttaggcccatataattaggaatggactagatgggtattgagtaacattggatctggtggttacgtaaatagagtggatgcgctgcacgcggttggggatgggtgaaaggagacatgtgaggtggcgtccagtctggaaggacgagggtgggccaattagttgcgtcgaagcaaagattttttttttgttcgtatttatagtcacagaagcctggttactgttgctgttatgtttgttccatttggagccttggctgttcatccagagtttctgattggataactcttggaaattcatgctgccatactccggttacaggaatggttaatcgactgtaaaagtgttgacatagtctgtagcagacagtagatgtgttgtttgccgtgccctgtaacataggagtattgaattaagagtgccaagtgaactgatgagaagtatttgtgactgaaatctatacctctgttttttcacctccaactgtagtaagccatttcatttcgcccatcgccagaatgtttggatgatgttatctagcaactgcagtttgcaactgacgaatctgcttaatgctgcatcgttaactggtgagtgctgtgtgtgaactttaaccctaaagtaagctttctaaagaaatccctaagctatgttagttatgaactacttgtggtgttgtttttagtatcttatttatagatgaactgctaaatatagttccaaagagagatcaaaacaaaaggctgtccttgtaaaaaaataaaaaggcttttatagatggctgggccggaaatctcaatggtaggccagtttctctcttcccatgtgtgtgtacagaactatagataggaccatctggaaacggctcccagccagccgcggagccgcttctactcccacgcctctccgcgtttcaaattcaaaatccaaaggggacagcgccactcgcaccacccatcccccatggcggccaacgcgttctcgtcgccggcgacggggaggacaccgaaccctaaggtggcgccgtccccttccaccagacgggccgcagactccgccgcggcggcggccgccgccgccgccgcggcgtcggactcaaaggcgcggttcgaggcgtacaaccggctgcaagcggcggcggtggcgttcggcgagaagctcccgatcccggagattgtggccatcggcggccagtcggacgggaagagctccctcctggaggccctcctcggcttccgcttcaacgtccgggaggtcgagatgggaacccgccgccccctcgtcctccagatggtccacgaccccaccgccctcgatccacggtgccgcttccaggtgcgcgtcccgcttcttcccctagggttcgcaaccctcctcgcctctctctctctctctctctctctctctctctctcggatcaagcctagccgagccaacggctcatcagccctgtgtttgtgcggcgcgtttcaggaggaggactcggaggagtacgggagtcccatggttctagccacggccatcgccgacctcatcaagcagcggactgaagcgcacctcaggaagatccaggccgcagtctcgcccaagcccatcgtcatgagggccgagtacgcctactgccccaacctcaccatcattgacactccaggtttcgtgcttaaggtaagtacaggtgaaattaggacttctcacaccttagtgaatatggttgcttgttaaattgagacttggcgtacctctatggagaagattgcttgttagattgtgacttctcatacctgaatgaagaagattgcgttggttgctctgtcagttatgttcttagttgatagaattgttgtgttatttttgtaggctaagaaaggtgagccagagagtactccagaagagatcctgtcaatggtgaagtcgctggcgagcccacctcatcgcctccttctgttcctccagcaaagcagcgttgagtggtgctcatcactctggttggatgccatcagagatattgatcccactttcaggcgcacgatgatcgtcatctccaagtttgataaccgcctcaaggtattccttcagaacaatcaacatgtgtacatagggtttgattacgtcttctctgtgagctatgatttgtactggtgttgtggcttatgaaaatgcctctgtcttgaccaattgaaggaatttaccgaaagttgggaagtcgatagctacttaagcgcaagtggctaccttggggataatatacacccgttcttcgtggctcttccaaaggatcgtggaacaatctccaatgaagagttccggaggcaaatttgccaggttgatatcgatgtgttgcgtcacttgagagacaatgttaagggtggcttcaatgaagagaaatatggaccatacattgggttcagttgtctcaagaagtacctggaatctgaacttcagaagaggtacaaagaagcagctccagccaccctggcattgttagagcagagatgtagtgaagtctcaatggacctatccagattggactccaaactgcaagctacatctgatgtctctcagctgagaagatcagcgatgcttcatgctgctaatatctgcacgcatttggtatgcaaagaagacacatcctatacttaccgtttccattctaaaggttgttgctaatttttgtgctggaactaattgaaattttactttcttaccatagcgctcactacttgatggagcagctgatccagcaccagagctatgggggaaaactactgaagaggaacagatgcatagtggtataggcagctggcctggcattaacatgcctgtaaaaccacccaactccagtcttaaattatatggtggtgcagcttttgagagagtaatgcatgaattccgctgtgcaacatactcaatggagtgtccacaggtttcaagagagaaggtatgttttagattcaagcacatgtctacaaaattttatgtgaaagtttgcttaatttgtggtactgatatcatcaggttgcaaacatactacttgcacatgctggacgaggtgggagtagtgggttgactgaggcagcagctgagatagcacgtgcagctgcacgatcatggcttgctccccttatcgatacagcatgtgatcggcttgcatttgttctccaaagtctatttgaccttgcaatggagcgatgccgctatcaagactcaaaatgtacgatctggatgcctgtggggttcatctcacttcctacaattacatggttactattaatcttgaaactgattttgaccatcttttatgattaatagaaataatttgttcagtgtgatacgagcagacaaaagacttgactattagtagtttctgttggccaacacacactactggcaaaatatatattccaattcttttcacaccaatggtctgcaattaatttaactgcattcctcaactctgtgatgtgttttttgctattacttgtgatcacgttgtccatgcaaaatttatatggtcaatcattttcatgggtgtttactggggggttagtattttgttgatattaatatggatcacttgtgtatatgtttatctattcaagcttttgatatttagctaatatatcatcttttcatttttatgttgtaagaactctaagagtatctcattaatttcatcgtttgcatggagttatagctgagccttagcatattttagaagtcaattggagtccaccaatttgttcaatggttctcatacttattatattttcctggcagatcatcaaaatgttgaagatatggatggatatgttggcttccttgctgctcttcgctgttcatattataagtttgtcaaggaattgtccaagcaatgcaagcagatagtgagacatcatcttgattctgttacaagtccctactctcatatttgttacgagaatgacttccttagtggtgtcgggtctgtggcaaactccatgcataggtttaaccacttcccgggagtcacatcttttgacctatcagacagcggttctgcccttgaagaagctcaggagaatgtgccaccaaaggatcgtcaacatatgacaccacctgctaaaggaaatgagtcaaaggaagttcttagagaaagccagctgacggttcctgagacaccttctccagatctgccagttgatatgaatggtggcaagaagaaagacaacggaaacttgaatgatggtggtgcaagaaaaagacatgcaaggatggcagcatatgcaaacaggaatcatcataacaatgtgattggtggtgatgacctgggctcaaaatctggatcatcatactccagcatatgctcaatatctgctcagtatttcgccaaaatgcgggaagtcctgattgaaaggaatgtaccctctgcactgaactctggattcttgaccccatggtatgcctgatctttcaattatgttatacacacattttgttgtctttcttctgttcagtttggtagttattcgaagtactacaattgatctattcgaccaccttatcacatccttaacccactgactgatgagtgtttgctgtcattgatgtttttatcttgctgagaacatatgaccacattaaggactttcctttgtgaggtgtgcttcaaacactttcataacccagaaattccatgttcaccatggttcctgtgacacagtatataggcagtgaatgagtaaaatatttggattttcaagaataaccatctgaatcactatgttgttaaaatgtactccctccgttcagattttaagactttctagcattgctcatattcatttagaagttaatgaatctagacacatatatatgcctagattcattaacatatatatgaatgtaggcaatgctagaaagtcttacattgtgaaacggaggaagtagaatactatatgtcataagtacagtagatagtcaatattagttatggaccgtatatatttctggcatagctgctagcctgctactgcacgtagaattgatagcgtggttagtagatgctagccttttaaatttgtgtgcttgtccagtacacgtgagttttgtccttccctgatatgtgtactccaacttatgcaatgcagtcgtgagcggttgtttttggcacttggcttcgagctgtttgctgttaatgacgatagattcatggacatgttcgtggcacctggtgctgttgatgctatccagaacgagcgccagtctctgctgaaacgtcaaaagattttgttgtcctgtttgaatgaattcaagaacatatcgcggaccctgtaacaaagatttttctggtgcctagtctacaggcatgtatgatgtatccaggagcttcagtatatccgtaaagatgatacatcggagttcctggtgagtttctactgctgtttggcattttttagctcaatgcttctgttcttaatgcaagtagtctttctgttgtcaaattccttattgacatgtcgtaccacttttcatctgttcaacattgataacctccttgttaaaaaaattggctatgattgagaattagattaaaaagagaacgtgtagatgatttgatgatctcaaatcgtaccagtgtgtgcacaactcctaaagaacacttatacaaatcatcttaagatacaacaccatcagtattgccctttttgctctgttgttttgtcattgtatatgcaacgggtggtctggttgggctgtttcttagtattaatttggagttgaggtgtgtatgggtgcaccatcgaaccgattcaacagattcggtcacgactcacgaggtgaagtgtgcaggtgtgtacttaataaattatacgccgttgttagttggagttgatgactccctgtatccgtccatttcaacgtatttcaactgtcctcctgtcatctgcatgaaaaatcgccgaggtcaggcaacatcttctgctttcgttcccatttctctttcatgctctcccactttctcccctttacccacaactgtattttcttgtaacttaagccattgtcctctgtcatacttcaagtagctcgttttgggagtaactggtgtaaaggtctagttctatttggtaagaaggacctgcctacttggctcacttgccgcggcaagagtgtttggcaggggctgtggaccacggtgagccagaccagatctgcttatcatgttcgtgctctacactagcgttgcatagcttgttgtaaatctcaagcgctcaactaccccgttgataacttgatatacctttgcttgtcgctttacggatgtggccctcgcctgccattttaatttcccttcaaatcaaatcttgcacaagtttagcagctatgcaaaaggtagatgttagtccactggaagctcgtgtacctgtccgaaaggaatgtctttctgggaatcgatgccattctggagtaagtggccaacaattccctcttccctcctcccctggtctattcgtctggtcaatggttggtggtgtcgcctgtttcaccattttcgcaaatcatggaggaagaaagccagttggctagagatgtgcccgtctactgtacgcctcagctgcccaccatgctattcgattctgtcacggtggtgccgttaggtctcagccagagtacggaatcccggcattcccggaattacccctcccccacccacccacacacacaaaaaaaaatcaataaaataaaaaataaattctcgactattacccgggcaaaaagttcgatctaaatattatttcatatacttcggacagacaacgaccacaaccttagctcatgtcatgtgactatgttattaggggtttatttggaacgtatgatttaaaataacgcaggaacaagtaaaacacatgagacattgtacttcctccgtttcataatgtaaagactttctagcattgtatatattcatatagatgttaatgaatctaaatatatatgtgtatagattcattaacatctatatgaatgtgggcaatggtagaaagtcttacaatatgaaacggagggagtatttggattgttcataggaatataagcatagtagtttgatagaattgagagagaggagagataaaagagagaaaatgcattggacttctcagaggaaaataaaaataaggtttcagctcatagtaaattttcctatggaattggtgcattggatagcaatccatagtaagctcaaatttgttgttccaaagaacatatctctactattataaaaattaaagatgtttctaccagaattttggtatgtcatctgtgtttgaatcagttttaaatttatgattctgtcaaattctttcccttttttttcttactccagagtctctctcttatccgagacgcacgcaaattaattggacccgcaccttttcatgcgcaccttgccacatacagcaatcgggcccacgcctgaattcgttttccacacgagcctttgcctgccgccgcgattggacccacgacgctctcgtgcgcacgattttctacatgcccgattgggcctatgatgctcacgcgcgggtgatttgccctcgccgcatgtctgattgggattgcgtcacctcgcacgtgattcaaaaattgaagttgtttttgtcaaaactacggtacgttgtccctcgtccgtattcgattctcgtcacgtataacattcattgtgaagtcacgaactgcgaaagtgagtccgtgtgatgttgataccaagcgaatgaaacttgctaagtccgtgtagatatcacatacgtcgttgcctagatcatccgattttattcatattacacggtacaattcctgagacatgttagcatgatttcaagtcggtctctacatatgcttgtacgtattaccaaggataccgttacaataatccataagaattagttttactttcgaaaagagcatgccaaccgaaataaagaatgatcaaagttgttaattccgtccgtcgtcaattcctgcctgacttgagataaaggtggacgacaaatcgagcttgtgtttgaaggcctcattgtttgtcttatgcttattcctataagctaaatttcaaattttagaacttaattttgaatttgactttttggtttttttatcgtactttattttataacatttgcttttgaatcgttaagaaagtgtatatataataaaagatttgcacataaatagtcttctatttagtaataagtgattcggataagcacatgaataaaccaaacaatgggttatgattatttatccaccgacgcatatatacaaattaaattggctctacccgttgcaacgcacatgcatcttttctagtataggaaatattcgcaaggtttaggatcctttgaattttctttgaattttcttctatacaaaggagccctagatgcgcgaagatctgacttaatatccttgtctttgaagctcacatctcattttcggaagcatagactccttgctatctaaagccattctgaacaaaaccttacttcagaaatactcctgctacatccatctatttctcatctttcaacaaagaaaaacgggcacctgctacgttggattctacccgttccatgcctcacgggggacagtgaggtgatggtgtcaggtgagtccaactgtgcgggggaggggagtgagtgagtgacacagagtgagcataactaaaagacagaagaattggtgctggatttttgcagtcaccagatgggcatctcgtcttccacttgggtggtcctgtggatcggcagcgtgcagcatgatggagccaaagaacctgcagtagagccaacagaccaactgctggattctttacccggttgagttcttgccacagttcctgaagaacaatgacctgtattattactatactgcagattctgcacagatatggtggctgctgagacttaaaagagggaatgaatccaccacactaggtagatatctcctccccatctctaaaatggaaagtgtgtaggagctaaaagtgatagcaactgtggtccactgtgatgggcctttcatggccagtgttggatgtggaatcggtcgtctacacacttaatagttggtcaaagaaagcttaatagttccaaacacagagaggccggagctatcgaccggaaacaccatcccacaaagcccatccacttgccaagttgccatggagtagtactactgaacctgttagagttcaggacaggagaggtgagatcaaaatgaaaacaaggactcaacaaccagaaactcatgcaatcatgctccagtggtctcagaaacaatcggatagagactgaaatacattacttcaatagagagttggtctgaattaactagctgtagtcctcacttatccacatagatccttcagctattgcattgggcaagccacaaggccggccatggcacttgcgcggttgcgccttcgcactcctcgtctcctccaaccgagattccaagttagtactctctactccctccataaaaaaaaaacgcagcctaattagatatggtttttttttaacgaagagagtagggagtatgttctaaaatatttaggaaaatatagcaaacctactctatctatagtattaggcttttgttggttcctgtataggaactgagcttcttagtggcacataaatcagagtaagcaattaatacatgattaattaattattaattattataaactttaaaaataggttcatttagatttttaagaaacttttatataacttttttattaaaaaaatgcatcatctaccagtttagaaaacgtgctaacggaaaatgagaatattgaagtttagagttggagtttaaagcggagcctaaatttgttcaagtttataaaaatatcaataacttttttaaaaaaacaaaatattgtcaaaatatattgaatattagttttagcgaaactaatttagtattatagattttgtttaaaaaaacttgattagatttaaagaaatttgattagagaaaaatcaaaacgatttacagtacgattggtggaagtacatattttaggaatagtaaattgacaaagaacaaagaaactggaggtcgagtgatcaaaatgcatgattgcaaagggggttgtgcttttgtaggctacacgggggtttgacgctggagtgcactacgagaccaaaagctgtggcaaacaatagtgcggcctacgtacatacgtgatgcttggaacggatggatgcgttgagtgtttgaccagggtttcagctggcacgtctcgcttcgctggcggcaatgattggctcgagctctcggagttgtgtggtggcgacgccgcgagcccgcgacgcaccccgcccgcgcgcggtgccgaaccgagcctggctgatatcaccgtcgcctctgccaatcggccactgggatgaccggtcaatttttggccatgtctgatggttgatggacaccgcgtgcttggccgaattgtacgaggggggagagagaggatgcacactggcgatagtggtgaattgaaaatgcccagcgaaagtgatcggaatcgcggagctaagctaggcaccagagggtggtaggagtatctttgtgccaacttgaatcttacgcactcgcgtgttaagaaaagtttggactattcaaacaacatgaatgaataaccagaaaatcagaaatcttgaagctacatggccaacagaaacaccgaatcctgttggaacgggacaagaagatgtcaccgagtggctcaaaacgtaggagtacgcgtgcttgatccattttcaactacggccgaagtggatcgacactatccttaccaatttttcacataaaccttgttccaaaacaaaacataaaccttgaccacggtagtcccactcctggtagcgaaatgtggccagcagcatcatttcccatgaccaagcaggcactgaccgccactcgcctcatgatgaggagccgatgcggctcggaagaaatactacttctagtcaacagcgccggcctcccgtggccgttaaaacggggaaccggattcttccccaagctttttctctccatcgtggagctcaattctcggatgcgatattcctcgcccacgttccccggccgtgacgacacatgtaaaacctcgaacggaaacggatggctcggcgcagagcaagcgcgcctgacttggctgtagtagtactccagtttcactctcaccggtcgaaaagctggtacgtacgcgtggccttccactgctttgccggctgtgctgctacctggagtggtgaagtgacactgagctgactcttcctcggaccatggcaggaggaggagggggtgggcagagagagaaatgtggcgagtgcggagcccgagaaacgtacggtgcgaggctggcaggcgaggaatcgtcgtcaccggggtggtccacatccgtcatttgtccgtcatttgggggggtggcctgggcaagtcaatgcggctggccctttttttatggagagcatctatcttcttccttggacgccttccgaccggtcgagctcgcgaccgaatcaccgaaatgaacgacagcgagtaccagaacgggtaaagcgctcctcgtgtttcacccggaaaaaaacaccccctatagccgggtttaaacacttgcaactgctctccgcgctgctgtgctgcgtactcctagttctgtttgtaagattagcctaggctaattttgagagctaatgtttagtcataaattagtaggctaaacattagtctaagatggtatgtttggatccgtgggttaattcaagactaaaaggtggagagagaatagaaagaggagagagaaggagagagagagagagctgtttttttatggtccccacacaaaattagccccattagcaccccttggaggggctaatgttttgaaggggctaattcacattagctcaaaattagtccacctgtttggatccttgagagctaatttgaggctaaaaggtgagggctaaacattagcccatggaaccaaacagagccctactcatttgcgttttccacattttttttctgttttccttgtcttcgctttatttagtcattgtactgttatccttttcatagctacgcacctttacgacaagaggcgccagtgtgcagtcgtagaaatgtcttactactttttttaatctattctctgattttctaataccaaattattcatttataaccttaaactaccatctaaaataaactgagtttcagttgcttgtgaatggcgaagcataataatgttacttatgcttcggcttcacaaagcagataccggatttctcatattttgcaaaaacagttggaaaatttggggggggggtttgaataaactttatttaaaaatgcactttatatttttttgaatttaactaatttcaaagaacaagttttcatctattttctctcatccactttaacatttaaacctacgaggcatctagaagcttgttcttctatgtttacagcacttgctcttgcggtttatcaactcaatcagacataaaacatctaaattttacgaaagccgagaaattatgatcgtcctaggtaatacgtacaaaagtagtagcaaaaggtgaattatcctatgcatttgagatttcataattttacaggccatactctaatcctcttccacgactaactgtaagttcgattgggcaatactccctccattccaaaatataaggcataaccacccctaacccaaacaccaagaaaataattattatcatcttatagtttggatcatcctaataaatacaatgcatgtatccaatagaattagagaatataagagtggaggatttaaaaaaaataataatttaatggagaaggggtcatagttaattgtctacatgcatacatgtcttatattatggaatatcttaaaaaaagtggttgtgccttgtattatggaatggagggagtagcatctttgattgagtaatagattttaccacattgatagtattgaccaactaagaccagtgtttgcttcatgctatgatttttgaagtatcctactttttcaactaacaaatctatctaactacgaacttgccatttccctacagtacatataactagatagtatctcttcgtatcaattttctattcgtagttagatgtacttaacatggcaaatttctatacgaaatgaaaccgtcgtaaattccgtttcttataaatttgaataccaaatccagttttcttgtggaagtttttttcctaaggcatacataattttagctctttttcttggcaaaggcaatgtattttctcgaaggtttctaaaaaaccaaaacccatgaacaaactgcaaacagtgaccatgaattcctgtttaccagtagacccacttccctactaccagtctaccacactatgacactacccaacacagccgagtaaaagaaaatggaaaaagacaaggaaaataaaatgagaaaaacccaacaagaaaaggaaatcaaagctgggaaagaaatagaccctggagagagaaagcatccatccaaggtctcagtcacacctacaacaatgcatctctaactcccccccttctccctcttttcctctccatctcccttcttaacctccccaccctcttcttcctcacctcaagtcgtctcctcttcttcttctcttcttccttcctctcccaacaccaaaacccaagaaccccacaagtgcgggcgaggaggggagggaggcattaatggagccctctaccaagcagctcctccccatgcctcagcaagaccccaactcgccgtcgtcttccacctcgtcgtcgtcgtcgtcctccacctcgccgtctcacccgcaccaccgtgcaccacttccaccgtcgcctaggcccgtcccccgcaccatcgagaccacccccttccccaccaccttcgtgcaggccgacaccgcctccttcaagcaggtcgtgcagatgctcaccggcgccgagcaaccctccaagaacgccgccacagcagcgacagcggccgcggggaacagcagcgccgccgggattggtggcgggcagggggcaaacgggccgtgccgtcccaagaagccggctttcaagctgtacgagcggcggagcagcctcaagaacctcaagatgatcgcgccgctggcgatgggggcgctgccgtcgccgaccggcaggaaggtcggcacgccggagatcctgtcgccgagcgtgctggacttcccgtcgctcaagctcagcccggtcacgccgctcaccggcgagcccttcaaccgctcgccggcctcgtcctccgaggacgccgagcgcgccgccatatccgagagggggttcttcctccacccctcgccgcgtggcgccgagccgccgcgcctcctcccgctcttcccggtcacctcgccaaggatggccgcgccttccgagtgagtgacccaaaagctcccgcctttgcgcgcgcctcaactatatcaagtaatcgacgacgagtacaactactgctactaccgctctcgctgtaccgtttctcttcgcagttctagttttgtggttgttgttcttgatctgctgctgctgctgctgtaatttttgcccccttctcgaaatgaagaagggagtttcttttttttcttctttggagtagtgaccagtgagcgattgtataatccgagctctagatttcggcttcggtttcttgatcgctcgctggggactccgaaaggatggatcaatcgattaattaagcttaattttgagcttggtgttctaactcccttcctaattctgaccggtttactgtttctcctctgatgtcattcggtttggccttctcatcggcagctattcgggggttgattccttctgatccctggctactgttcttgcgtcagcgctcataaataccagccttgtgattttgtatagtactcctacaagcaaagatctgaattctgaagtcataattgtggtcaaagttcttttgcaagtcgcgccaattcaaatagaagtatttatactgctaccactactatctctctgccaagtagaattcgatcattttaacagggtgaaagcatttacaaaaagctcaaactaccctggcaaaattttggcgtcttttttatcattcctactacacttgaatactccatttcccagtaggcagtagcagtccaaagacctgtaaaaaatcgctgtagagccagaggcaccagcaggaagacttgcgtttgtgggtggccacttgcatgggtggacagtagagaccagttgtcagcggcaagccgaagcagctgcatccatccaggcccggcgccccggcgaatccgcccgccccacgcacccacgcgcgcatctctcccgcttccgacttccagcggccaccgagccgtcacacgcgtgcgcgcgcatgtggcgggggccatcgtcgatcgggggaaatgcattgcatttgcgtgtttgcatggtcggttaacatgtcctcgtctcgttcctcgtcgccgcgcgcgcgcggttaaaactggctgtcaccccccgttgatcgaggtgattgtacatgtgtcccatgatagggtttgccagaaaactggtacagtacttcgtatgattgatcgagttttagttattataaacttaaaaatgtattttaaatagtttttatgtagagagtgtgtttgtgataatcaacatagaatttgtatgttaatcagaaaagaaaagaacgaacataaaacttacacattttggcctgcacgtatgcacacggcatttgttttggccgacggaacacggaaatttgtgatgctatggttcgccagaaattgcatatgcactatgcagtatgcaccccgagcacagtatacgccatatgcattatggaacgggagctatcagagacgcgacacatgccatcctttatttcatcagtaaaaaaaaaaaaaacagaggagggacacagtatttcaaagggggaaaggagaaggggactggaaagtcaaacccgaccgagagcaaccgaattaagttttcgcagttaagctgcatatgccggcctggtgcatgcaccggtagctagattagctcgaccttgtttgacttgtctgcaccggtggatcgtcgcgcagcgtgcagtagctgtacgtagttgggggatccagtgcttgtttaattagtggccgatcggatggatgcgagggccatgcatcttttctcctcacatgttactgttcataaactaatcaggatcattagttactctcatgtgatgatgcatgatgcatgggggcgacaattaaattcagggctcaggactagttaaggtggggcgccatgtggtgtcatcaagtccgtaaagcatactgagagagaggctaataatataaccgatctgttggctataagattatttgtagttgttttattccattatctaaaagaaatccacaaaagttacacatattacacattttagtttttccaaataagttgtttctccttgtagtctttatgcattcaagacttaaatgaagagataaattaaatgttttattagaacctaaggagtcatctaaatgtttattggttgcatgcttgtattcactccttgattttgtaacatttaaggtgatttaatttttttctgatcttggtgtcaaaagtaatatgtgcaacttttatggatagagagagtaatagttagctctttacaattaatatatgacacactcgtctctcttacagagtttcttagttcttgtgtctaaggcggctgtaagtttacagcccgcttcttctctctctcctctcttttctcctccacctcagcatttagccggcttatagcctactattatacttgctctgatctgcttgtttagttcttccggcgggtcagccagttcacactggccatgcgattaatcaaccgcaaattaagctagttgttcacaggaagtaaaggaaagagcggcttaatacactagcaaatgggtttgcctttgaacagagaggggaggcgtgggtcacacgatggatggagaaggggtcgcggagtcttttctttcccttttagacgagaggtggccatagacccccccc

SEQ ID NO: 27500 - DNA, 13619 bp, Oryza sativa
  unsure (1)..(13619): unsure at all n locations
cgaaaattagaccgcgagagaaaaaattgtcctcccggaattaattttgagtggttaagtcaactcaacaggtgcaacgtaacgtacttacgtcttagatggagtttatttctccgggttaagcatgtcataaaggagagcgtgtagcagaaaatgtgaagtagaagaaaatgcatgtgagggtcccctttttatctgttcgaaatagaccgtccccgtgcaaaatatcagatcagacttgcatgggtgcatgcgtgagtaacatgtactccctccattccctaataacacaaccacttttttctcagatgtttcataatataagacatgcatataagtatacaattaactatgacatcttctctattaaatcctccactctcatgttatctagttctattggatgcatgaattatatttactatgatgatcgaaacttcaagatgataataattatttcttggtctttgggttaaggatggttgtgtcttatattttgtaatggaggaagtataatttacatcaacggttaaatatagaagtagtactagcaaacgacatggagtatttaaaaaaaatactccatccgtcccataatataagggattttgagtttttgcttacactgtttgaccactcgtcttatttaaaaaatttatgtaaatataaaaaacgaaaaattatgattaaagtattttggataataaagtaagtcaaaaaaataaataataattctaattttttttaataagatgattggtcaaacagtgcaataaaaactcaaagttcttatattataggacggagagagtatacagagagtgagagagaaaaggtgaaaggggaaagggaagaaaattacaagaacacttcgttggctcgtacttccgtgtgtagaaacacactcctaggcgccgtttcagatgtgagcaaaggccaaactatgcattccgagacaaagcgcttctgcacccaaccctaacgaaagagttgtgaccgcgcgcgacatctcgctgccttccgatcgatcgacagcaagcagccaatgcgaccgaccgaaaacccgggtcgcacggcgctcgctggtgtggattgtggattttgctagcgcgcgcgggatggaggcacacggcacggcctggcacgcttagactaacacgctcgcttggtcagatcgatcgcacgccagcgcgtggattccgggatgcgtggctccaaacgtcctggttaagcccgcgctgcgctggaacggatcggatgatttgtgttgtgccggtgtgtcggcattgtctgcgttatattttctagcaaaaccatatatatccggggaatacatccggaatacagggaatgttatctaaaaaggttgtagggaatataatattctactccctccgtttcaggtcataacatgttgactttggtcaaagtcaaactacttcaaatttaactaagtttatacacaaatataataatatttataataccaaattagtttcattaaatcaataattgaatatattttcataataaatttgtgttgagttgaaaatattattattattattttctataaacttggagcagtttgactttgaccaaagtccaaatgtcttataatctgaaacgaagggagtcttttattaggtttcgactgaacttgtaggtgaaacctacccaatttaaatcttaaggttgacacggatgctaacatttacaccaatagtcgacaatgagacatcaatggtaactttatcaatctcaaaaatacgtgtatttatggctacacctatgcttgtggtgactttaccaatcttaagataagccggcccattctcttgaagtaggatgctcgtgagtatgaacgtctatgtctatacttatttttctttttaaaaaaggtattatatatagatcttcctgatcttaaaatttttagccgcagcaacgagccccagcttgctctcttgttggcatgcatatgctattgattctaatcgtgtccgtgtccgcgtccgcgagtatctatggcggtagtgataggttcgaacttaagtaacgtagggcaaatgggaggctgaaacgtgtgagggagagctctcttgctagctgcaccttgaggtcatcgagtggtgttaagttgactcttattttggcctggaaattttcggttcaaacgcaaacgtcacaaacagaacatcaccaccacaataccacaaaaatgtacacaaacatgtggtgtaacttctcggttagatcagatgacaaagcatgaaaaaaacctacaatgaccacgttatttttagcagtattatttacttttaacattatgccatccaaaggatggcacgtcctttcatggctacgtaaaatagtctcgaatcctccgagcaggtcaagtcttcgttggcgaacaaggaggcaatgcgagtttgctattggcttaggacaggctaaaggcaaccattgggtttgtgtgtgttttaagtatggtgagcgtagaatccaaggaagctttacccatattttagagccggagtcaattttgtcgcaactaatcctgtcgtgcaaatggcacatccggaatgaacatctttctgaaggagctgctatttttcaacgagatggattggtaaagaaacaagaacttgattaaaaaaaaaccacagcctggagctagcaaactgagacttggcattgcatagactagagactaatcaaggttatcttcatgccagaaagcacagcaccacgccggctcagagcaaacttgcggtgaaagggtccaaattaggatgattctgctttggaaagggtagctcacacttacacctgttccacgtactcattcaacccactaacaacatttcaccgcaaaactcactaacagttcgcttttaagtcaccgtaccaaatgttcctctatctcttgaacagtcccagacctctaaacaaccaaaccatcatgataaaccccatttggtcaataacagcaaatgcctagacacgtatcatccaaaagcgaagggattgcaaaatggactaccattcagataggggaactagatgactatcaatagcttcgtagtttcaaccttctttttgatgaattcacgaggttagcaaacgttgttgggcatctctagtccgctataaaacagaaatgtatcaatatttgaaaaagaatctccaagccacgggaacatgtgactgagttagtaagcttttggcatctccttcagaaaacggcaaggtagctgtagctatagttcctggtcaattaattggtgtgcctaaaacaaattcttgtctctttctctctcttctagctctaaaagaactcagtgttaaaaaaaaaaactctaaaagagctcctcgtcacaagctgtcaagttacatttaaggtccaaaaggttagatacagttacaccacactcaaagaacaggcatgtgatgtcctgcttttaatatggtactagcagtatcttaatagatcagacttgatatctcagtgagaaaatacataaatagaagaaatatagtgttcttaaggacatgctgaagactgaagagtcagaacagagacaacacattcaaagactcaaatggcatccttagcccccatatccagcatgattgcatcagatgtaataattcggatcgtaataaaatgaaactatagcccttggattttggtgtgataccatttcaattgtataagtattctgtaagatgctattgttataactttttggcagttaagccttcatgaccattgtcaccatcgatctttttcttactcctattccaaaagtccagtgatgtccaaatcatatgcaactacaatctataagagaacaagactcctgcaccaatttgcaacttgaaaaactgaatcttgtgaattgtgatagttttgtgatacaaagaatagccgttgtcatttgtcaagctttttagcattaaaagggcgctgaatatatgactagtcgtcatcagttttcccaataaacagcttgcctccatcttgtcataatcgaagtcacatgtttcatggttggccatggtagcacttgatcatatgaatatagaataggctacgttatgcagtaggcaaagttaggtaatgaatttgcgaaactccttttggttttaaaacacaaaccttgttttttggtctcagagcagaacaagccctcacggaagttgcagttaaaaaaggatttgagtcctgcataataatagacccatatgaaaaaaactccctcatcaaaatatatgagaaattatagacgagtgcaaatctgtagtacaaatttaagcatacacaacaacaacaacaacaaaaatactatttcaataatatagagtaagctcttttctacttctcaatgatgaatgggtgataatatgaccacattaaatactagaagcaacctgtgagcttcttatgtgaaagtctggatctataccaatgagctatataagtggacctccgagaaaaaaaaaatcctattcaaagctgaagtagtaacttagtgaatatgaaaaatatagtaattgtgacatttttgctatttaataatccataccgttcatttgagtcagtaatcttgagagatccatttatcccttgcaaacctacaaatatcgaatcagctcaactgcgtactttcctttcctcgtagtcacaatttccccaatctagagataaataataaataatttaaacaagtcaagcatagaactggttgatatagattcaagtgaatagggaattcataactttttaaaaagaaatatacatctagtagcattcaaacatcttccatagcatgttatattccctcatattatgtatttgcaaattaacacataatccttgattcataaaatcctattttcagcaaagcaaagcatttactttatcgatgtacatctggaggtctgatccacatagttcttgcaacattagtctaaagtaatatgcagcctataggacagtctacaacaatgaagccgttatgacaattgctcagaatgaacaaaaaagaagacgacgccatgaacatcacaacatcagtacacagtaaaggctgtggctttattatttgaaacttttgagctcatagtttcacaacaatacaaaatcttatagttttggatgtattctcaggttgaaacaatacaaagcaaaagcagaatggtatccaacttaattgatgtagtgatttagatccaagcaccaatatatttttgtaaggaagtaataaatatatataacactccaaaagttccatttcagaaaaaaggacatgccctgtgtcacaggcatgtggcccaagacctacatgccaatggcgcatggaatgggaattcttgaacgtcattctttggagtggcaaacacctgaatgccccttttcccttaaccccattcgtggaataccttacgcgccaattgcaacatcaaaatttatcctagaagtcgtctattaatgtggtgattgcatataattttttacctttaatctccccatcccactgacagaaacaacatccccagccttgagagtcactccatttttcgaaactggtgaccaattcacacggacatccccagcactggacaaacaaaagagagatttggatacatatatcaattgctttatgagcggtaattaaacaaaataatgcgtggatggcaccatccaaggtagaagggaagataacccacagtaaaccactgatgttaagataaagagatgttttaatgaacctaagaagatggatagctcacaaatcttacctgatcaagctagcaagctttgtacgtgagattttaaatcctgcactacccagggcatcaaccctgagtgatgattctacagttttaaatgacttggtcctgtggttcaaaggtacttttaagtgttgagtatctttgtccaggcatttatccaaaaataaataaaaatgagccaactttgagatgagatcagatgtcaagcaaaccttggtggttcatattctagagcaagcaaaggattctgtgtgcatgaaactccaactttctccacctgttgaatcaaacacaattcagagtaagctgcatttgcaagggtttgaaataacaacaaaaatacagcagtcaaagttcatgggcagagttagatcaatacaagactaacatgtaactaatctagagagttattctacgatgcaaataacctcaaaaatattggaacatgtgctgctattttaaatgtgctatgagtaaaaaaaaataataaaaaacacagtagcttcagagcttctgttgtctgcatagcatgtaatcaacataagtgaaaacatgtggggtaagataatgttataacttctgtagttctgtgtcatatataggtaagaaattatataacatatataaactcaccttttcaagtgtggaagtcagatagtcaacaagttcaggatcaacaaggacctgagcacctctctctccctgacaaaaaaaaaaaagatcacaaagaggcacctcagacggacaaaagtcaaagttcacaacacaatccagaaattaagcgattgggaaggcatgtgcacctgcaaaagtatatctccaactttatcccttgttattcctgtcccaagaatagcaccaagaaagtcaccatgagaacagggttccaatctgaaattccctgagatgctgagaaggcctcaaagttagcttatataaaagatggaactgcttatagtgcaaatttgagagaacctcaaagcagcaactacatctgggttgcttgtcatacagtccggatgtccaactgaaactcggcatcgctcagcctagataaatgaacaggtgagagtgggacagattaggtaatggaagctaataaaacaatttcctttgatgttactcaaattcacctgtgggtagcccccctgtgctaccgctttgatgtctgctaacttctcaattgccagcatgcactccttcactataggtggagtaagaaaattggtgtggaaaacatctctccgttgggaagccctttgtgcctgcataagttggataccatcataaattcatgaagttcaaggcaccatatcaacatgaaatactgcacttacaacttgaaacattcttattttgtggttagttacaaaagcaaactagttcaatgttgttgaaaggttatgtttgcaatcagcaaaacaatagtgagtgaatctgtctgatgtggcaaactactaatcatatcttgtttaaatgtcccttagctgtttttggctggtgtgttattagggatgctttgaatctggtttctttacctaataatctatgggagtgtatgagtctgctcaaagataggaaaaagtttaaaccttggatctctttaattgggggggtttgttgggctatttggatcattagaaacgactgggtgtttgaaaatattcttgtcaagtctcccctttatgtggtttataaatcgctctctttcatacagaagtggcacattttgctaaaggaggaagaccaggagctgctgggaggatggtgtgaagcaatcaggataaaactgaatcaagtcaggcctcatgtgctacctgcatcgctatagaatagctttagcctgagtttcagttttttctgtaagggtgtggttaggttgggagtacgttccttttgtctctggaaaactggtttccccagctatctttttgtgtttcttttattttccagttcttgtataagactctgttattgttcttgggcttttttctaaagccgggtcaatatattgatctgccataaaaaaaaagaaaaaatgtgtctgatgtgccgagagcaaaacaactaaaacacaaagcattttctttatttccttgagaccaatgtgctcatagtggcaaaattcactcgatggagtacataaactgaagctcataattgtttgtgaaatcgtttatcagggtggggggggggaatgatttaaccatgaaggcatttcatcagacacaacgtccataagcaacaaattgcactcctataaaccacctaatctagtaatctcaacaagttgatcttaataattgaggtttaatggtggaaaacaaactaccatatccaggatgctcctgagttcctcggctgcattcctatccaagctcgccttaaccgccgaatctcctgctgctgccgcggcgaaggagagagccgcgtgacaccgtcctgcaccacaacgagccatgggtagccaagcgtcagaatcgtcggacctaaccggaatcgaaccgagcggtgggtacggggcttaccgctagggaagaagtggtacgatgtggggatagcgcggcgtgcgaaagggacgtgaaggactcgccggaaagggctcgccaacgagacggcggcggccatccttaccaggaaccgatggggctgggcgccgtcgtcgcctgctcgttctcccctttgcctctgcccggcgggcgtcggctttgagcttaaccgggttcggttcgttggtggcaatagactcaggaggcacgaaccgtcagatttgcttcaagattcgcgcgcggatttccatcagattttgagaaggcgaagggcaccggcgccgaaatgcgcccgccgccgccgccgcgatgaccacgctcctgcgccgcctcctcttgggcgccaccccggccgacgcgttgctcaccggccgcctccccttctccacctcctcccgccgcacgccgcaccgcttccgccgcagccgccgctccccgaaccctgcgccgccctcccctgaagccgtctccgcggccatcgccaccctcccgtcccgtctcaccccgcctctcctctcctactccctctcctccgtctccgacgcccgcctactccttccggtcctcacccactcccttcgtctcgccaccttccgccctgacccgggccccttcctcgtcgcgatcaagcgcctcgccgccgccgatctctacgccgatttcgaccgcacctgcgccctcgccttctccctcctcccctctctcccgtcccccgggcccttcctccgcaccgcgctctacttctactgccagttccgcaagatcggcaaggcgttccacgtctacaccctcatgcgcgcctccgccgaccccgccgcgcgcccctccgccgacacctaccacgcgctcttcaccgcgctcttgtcccgcggcggcggcgacaccatggtgcactacatgtacatggacaccgtctccgctctgttccggcagatgctggaggagggtgtcccgccggacacgcgcgcgctcaacgtgctcgtcaagggctacgcgcagtcgctgcacctcaacgacgcgctgcgcgtgttccaccagatgcggcccgtctacggttgcgaaccggacgccctcacgtacagctacctggtgcacgggctgagcgagcagggccggacgaggaacgcccgtgaggtgttcgatgaaatgctggccaaggggctggcccctacggagccggcgtgcaacacgttcgtcagtgcgctggccatggcaggggaggctggggaggcggagcgtgtgatgtgggacatggctcgggcgggaagggtggtcgacgacgtcacgaggagggcggtggtggaggagctgtggagatcggggaggagggacgacgccgaaagggtggtgagggagatggaggagcgaggcatcgtgggtggcgctgagcggagagccttgctacgttcgctgcacgatgagttcggtgacgacgatttggatgttgatgatagatggcggaacacaaggtgattgtctgacagatggagagttgagaagcactcataatccatccggccatccatgtcccaaaaacatggcaatcaacattgaacactactaaatgccatgagatgtaacagaaaattttgtgataaagtatcagtaaaattcatttgcaatgatataagggttaactgcaagattgatatttattcatcattatcggttctgtgatgtctgaatcaccaatataagtttacactgtgcccttctagcactcgatcaaatgtatacaacagcatgacaagcagtttcttcattgcttacttgctttcaataagttcttctcagcaatattgcttcgagaattccaaaaggggaggctgatgagtgatgactggaaaagtttgaaattgattcttacagagttggggacaggggaaggcatgataatataactccaggaatgttctcccccgaccccaagcataaatttattctgtttactcttcaagttgatcggatggaagccattcgagggtgttgccagtaaacataggcacgatctctcctgaactatatgagtatgtatcaggtactttccaggcgctctttctaaggacaatctttgaagtgttccttggaaggccataaaaatctgggccattgaagcttgtaaatgcttctagcttatcaagagcaccggcctgaaatgcaagatatttcaaacaaacgtattagccacaatgttttctcagcattttggctattataatcatttgcaagttacactacaaattcgtggttttgtgatgcacttaacacactttgtctttacagctaactgacttgcaagctaaccccgatctacagcagaacgtctcttaacttaaaatataatctttcctatttatcagcgtgagagagaaagagagatacctgttcgaatactttcgcataaagagaaagagccacaggagcgctatatattcctgcacaaccacaggagcattcttttctccgtttatcatgaggagcactgtcagtaccaagaaagtattgtttactcccacttgttaccgcagacacaattgcttgtcctgagataggcaattcaaaattgtttagcataccaagttctccctaaagcagaaaagtggaatacaaacatatttttggcatgacatatatatacacaatgcaagtacagtgttgtcatagatctactttttcattaccatttaaggaacatctgggtcaaaggtcattttgttgaaccaaagaaatcttaatgtgcatgtacagccaagtttcctctatgttttgcctatacgattgcgtgtaattatagatatgtgaatactagatcatgcaggagttaggggagtaggacaattggaacatactatgagtttctcttttcagtactggtaagcaatagttgtgtggctgcaagccaccctgaaataacgcattcctgttgagaagaagatgttggggagtcaccgttgcagcaacatgacctgatgaaaatgaaattttagaaccatagatatgcacagaagtataatgctattgtagtggtgcacaccttctttgcatgattctacgaagttaaccgcatccatagtggtgatatgttccataacaattttcagctgtggcagtctttgtacaagtggtgccaatattttctcaatgaaaaccttctcacgatcaaaggtatcaacatgctgatctgtgacttctccatgaaccttaaggaaaaaaacaagggcataaggtcaattttactatctatacagctgacaatgcaagaaagtcactaattagaggcaacatcatttcagtgaattaggcattgtcaaggaacaaaggcaagtaaaagtagcattccgaagtaaaagtaggagaaaggatcgagacatgaataagaacttcaaaacaaatgggaaaaatatatgctgaaagaagagcatcagaactatacttacaagcaaaggcatctcctgcctagccatttcctcaagcacaggcaagcacttcccaaatatatcagtgacaccatcttgggagttggtagttgctccagaagggtacaacttcacagcaaaaaccacgccactcttttctaatgtcaatatgaaacaatatgcaacataaacatcacatacaaaactctgcaaccgatagactgggagaggaaataagaaggcaacatttataatacggcacttttaaatcatgatggctagtattttaagaacgtcaagtttgttctagcttctaagagatacaaatgcgactgccaaatcactgcacaagtgtacataagcactgagcgcgacaaatagacacttcaacttacagtagcaatgtagctaatgaaagaacggtgttagtgagagttcgtacttgcgagcttgatctcctctgggctagtattgtccgtgaggtagagcgtcatgagcggcacaaagttgctcccaggcggcagcgccctgaggatctcctccctgtactccaaagctcgtgctgtcgtggtcaccggtggcttcaggttgggcatcacgatggccctcccaaaatgcatcgcgctgccaaacagcacgcgaaacgatcacgcaagcagtcaccagacaggccacctctctgagacattacatcgaacactaggcgtgcgtcaccaggaaaacaagccacaagcccacaacaccaatcagaccaacctgtgggggagcacggccgcgaggacannnnnnnnnnnnnnnnnnnnnnnnnnnnnnnnnnnnnnnntgatggtgagctcctgcagcggcggcggcgacggcgacgcggccatggcgatcgagatcggtgtcttgttccggaaggagggaaggtggactagggccccgtaatgaggcgacggccggaggaaaggtccgggcaaatgcttcacatgcgggttcgcgaagaaggtggaggtcgcggcggtctgcattgatgattgggatgatgattgacctcgctttatgccgattccctcccgtagaagcgcgcgggtgtgtgcccgtattgtgggagacggtcccgtgggaaactgggaggtggagttcggtttctgagccgcaactgctcaggtgacaaccggacgcggctctctcggcggctccagtttctttttttctttttttttttagcgcagcccccacgggccggcttctcttgaccctcagatgtgactgaaatctaattcatggccctaaaccacaaaaccggatatctcgaccctcaaactcctaaaatcagtgcaatttgactccctcggtggttttagagggcggttttgctgacgtggcgcctatgtggcgatattgaccgagtcttcgttacacgtggcgttgacgtggcacttacgtagcattaaaattaaaaatatatatgggacccattagtcattcacacaaaaaggaatgtggggcccactcctccttccttcttcctcctccctatctccctcctctctctttctctccccttcttcccttcgaccggtggcgcgcggcggaagcgagcggcggcctagcttcggtcagcggcgggtggcgagagcgagcggtggccggaggacttcggcggcggcggggccttcccgaagaaccacgtcgcacagtacccgctcggcatgggccagcgcgacgagaagggcggctcgaagatcctcgcgctcaccgtcgacgccaagggcagtgtcaccttcaacgccgtcgtcggggtccgggaggcggacgccgccggggatgagatcctccatcgtgagggagtcgagtggcccgtatgccc

SEQ ID NO: 27501 - DNA, 12386 bp, Oryza sativa
cctccccgccgactacgtcgtgagacacctccgatgccccctccctctccagcgacgacggcggtgcccctctgtgccaaccatctccagatcgatgctgacggcgcgacggcgccccttcccgcccactagcgccaacggggtcgccgcacgccgccggagccgccgctcgacccactcgatgcctccgccgtcgacgtcccgcgccctcccgcccgccggccgaaggggaagaaggggagagaaagagagagaagggtgagagggaggaggaagaaaggaggactgacatgtgggccccacatgttagtgggcccacatttctttttgtgtgaatgactaatgggtcccactcatatttttttaattctactgtcacgtcaacgccacgtggaacgaagactcggtcaatatcgtcggtcaatatcgccacgtaggcgccacatcagtaaaaccgccctccaaaactgacgagggagttaaattgcaccggttttaagagttcgggggtcgagatattcggttttgtggtttagggtcatgtattagatttcgattactctcaagggtcacaaagtgaacttattcctttgggatttcccaaatgagcctagctataggtccagtgtgacgtgagaggaattccgacgtgagatgatctccacgctgtgtgggctcggccgaatgatttcgatgccttgattccttctttttactttaagaaataagttcattaaagatgcctcatcctgatgtcagagtttgaattctgtccttcacacacaataccggacataacacatctctcaacttgtaaaactagtgttactgagatcctagagcagtataatgctcaggttcagctaacatgatgactgagtcagcgtgggacccacatatcaggcatttcagtcggagtcaggaccctttttcttcctcctctctccccctttccactctcttcaccatctctaactagggtggtaggccagccgtgagcaacgtggacaaggatggcaaccgatggaaaggagggcaaccacggataggagacgggcgatagggagaaggttggcccgacacgacaagggagctctgcgttggattcgcccggtcaacatcgtccgtgagttctgccgacctcgcgcagccgacggggagaagggcagccgctagcggaaggtaggcgacagggagattagcagctcgacatgatgagggagctctgtgttggcctcgcccagtggaacacgagttccaccaactccacgcgaccaagatggaggagctgctccgtcaggtggccacggcagtggcgtcctcgctgcaagggataggcgggaagaaggtaggcatcatccaccactccactccacgctctccattctcaaatcctagtttgtcaggctctaaactcaacgagatgatgcgactaatagaggggcaaatggcaatgagagagaggagataaggtggcggcggtggtggtcggtatggaccagccaccagatgagaagtacagagggcactaggcggtaggccaccttggctccttactatggcagttggccagccgccatatctaagcaacgagcggcggcggccaagcaaagagggtggcctaaggaggtagaagaggcaccccgaccgtgcgcgaggctacaaccttgtgccacgctgcaccatacttgacccgtaccatgatctccagcggccatggcctcagcgagatccccatccctcctccgctaccgacactgacaccctcctcccgcgtttgcacgaccatctcgctcggacacacttcctacccaaccatatcttccttggccaccgatatcgtgtgaaaaaatgcatagaaaagggtagagagggataaaagaggatgggatattgggatgtgtcactgacgtgtgtgatctaccaatttttaatttttgtttcagactgaaatgccctgatatgtgggtttcacattgacttagtcgccacgtaagccgaaaaaaggcattatactatcgcagaacctcgggtacatcagttttacaagttgagagacgtgttatatctggttttgcagttcaaactgtgtggttcaaggccatgattcaaactcaacggtaggatgagggacctaaattgaacttattgcttttacttatcccctgtcatttatcaggcccgttgggccattggaatccttatactatttggtcgacagagcaaatggtaatgtctttttcataaaacgaactgtttcgtccaattcaatggtcattatccgaccagtcgacggtcagtgcctaccccatgtgcacgatcgagagcgattgggttaacgtgagaagctgcacggcacggcgcagcgggtgtggccaaagtgagttattaagccaataaaacacggtctaattttttttgagaggaaacacggtctaatcttagttggtagtactattagagtattattatagttttgtctattactccgtataagtcattacttaatgtccatgcattttttttcctccatccctctcttctaatatggcattaaaaaaggggcagttggttacttcgtctactatcctgatccacgtgtacaaatttgagatgaccgtttgttttgtaaacggtttttatatatctcctcatagattctgctgacgtggacaacctaagcaagccaatatcttgtcccacggataaaacctcctcactcgtcaggctcctaccgaactcgtgccgaaataacctacaccaagaaaaactcgacgcgacgtggcaggacgactcacgatgagccgaaccccaaagtgccaaacacatgtaacctgtacaccttagctcagagatctccaaaatctgcctcccagaagcgatcctataggccgggtcggggacaaagcttcagaatagcgtggggaaacagaccacggcggaccatgccacgctacgccgacaccgtagtccgtaaataccccctccctttacacgagatccacatggtcgtgggacacaaactatgcgaacgaatcgatcaagcacccttctttaatcaaaagtttttttttaaacacccgtctcgatctcaagtctacccctctttcgtctttcccgatccaaacaactagtagttttgtactaatccaaagtcgtctccaataattatccattataaaaggaacgcaacacacgcactccaggtaaaccctacgactccagctaataaacgcaaaggaggaaataaagcgaacgggagcgacaaggacggggaagattcgtgccccgattttttcgtgttcgagacgcgcagggaggggggaagagattgaggtggtgggaggatcggaataggatctggtgcccccctctcgtcgtggttgcgctctcatcaactcgactcgaccggtaatcgatcgcgactgccgccaccgcaacattctcatttctctctctcgtccccgccccacccccacccaccacaccacacccccgtctccgcgcgaaaattcccacgccacgcgcgccggaagagagggaaggcttttcctccgttctccgcccacgcgccgtcatcgctgcccgcctttcttcctccgctttgtttgggccggagcggggggcgcaccggcgccggcgacgtctctcttccgaatcgggtaagcgtcatctcgttccgatcttggatacaggttgcgtgagggagcttcgcggggcggggcggggtggggtggggtggggtgtggaatggggatttgaattctttggtttgatcttctcagttgcgccacctgcttcgggttcacgcctctctctctgccttgctctccgctttcccgcatgtgatgcttcctgcacgccttcgttttgttcttctcttttgctctttgctcttgcctgcacggttcgtcgtctgatccatccatacttttctgttggaaaaagaacgtgttgtttgaccaatcgaagcgttcgttctcgttttgttcttcgacttttagtttttatagacagctgctcctgcctggtggtttcctgtttttgatttcgtgctttttgttcctgatgatttgactcaggaggcgggagccagttcatggaatctggtggaattgatgctcaagtcagagcaatcgagcagcgcacaagattggagattcctatacgtgattgagattgcaaatgtggcgcctgttcaatgagttgtgggatgttctaggatctgggtttttctcatcgaggtttctttaatccagctcaaatctatttacacctcatccgtttgcaccgagatcatctctgtgtgtgtggtcaccgtgagattaggaggagatggacgaggaggattactcgtgggttcggcggacaaggttctcccactccgtcgtccgctccaagtccggcagggagcagttcggtgcattcgtcgagcagttcaaccgcggcgcggcacggaggcagagagggcccggttcagggttcatgctccatggcctcaacttggaaccgagggcgaggctcccagccaccacctcggcgaattcctccgttccgaggacgacaggatcgtcgaatgctcagccatcgtcggagacgaagccagcttcgtcgtcctcggacgccaaactggagcagcacgagaagagcctcaacttggaaccaaggacgaggctctcggccaccacctcggcgaattcctctgttccgtggacgacaggatcgtcgaatgcccagccgttgtcagagacaaagacagcttcgtcctcctcggacgccaaaccggagcagcaagagaagcctcgtgatcatcagccgtcgcaagaagtgtccaccaagcaggatgataaggctgaaaatgacacgaaggcaacagccacatctgggcctctcgagttctccttccatcctgatgagcaaaccttgaggctgcagagggcgtgttccagccctgttcctttcccaagcaacaagaacatgctggtggctgatgctgcagcacgtagctcatctctcaaggttgccggcgaggggccgaagccgaagccgaagcagagagcaaggtcccctcccctgcgtcgtgacgttcctgagctgttcaaggaggccaaatcgtcaagcaagaggttttccacaccgccaccgcgccggaagccttcgtctccaccggcgccgagcaggagccctcctcatgtctttgccacggcgagagcgcatggcaagccgaagcataagaaggattcctctgccaatggaagggcgaaggtcgccgcacttgaggtgctcgagaaatggaccgtcgatcgctcgcagctgctcatcgggcacaggttcgcctccggggcgcacagtcgcttgttccatggaatctacaaggagcagcctgtcgccgtgaagttcatcaggcaacctgaggatgaggaagatgcagagctggccgcgcagcttgaaaagcagttcaacacggaggtcaccacactgtcccgcctgaaccatcctaatgtcattaaggtaacctcatgaatttcgattacgcctgtttcaattctggagtggttgtggattagcatgaacttccgaggaattgcttgtagttagcactgttctattgacttatactgtactttttcgagctattttatttgggagtatttgcgcttagattctatttggatcaactatcaagcatgctagacaagatatgcaagatataaattatatacgaagagaaattatttaattgacctgtaaggctgtaattcgtggcttatgtatttcctagacagcgtagctagcttctgcagttcctccagctgagttggagtactttcctttttaccccgaagggcaagtattagtagctcacctaggagagttggtcatgcactcatgcatactgaatgtagtatatggcatttaatagttgtccctaatagagtaatagtaaatattgtgtgatttatgtgtgcactaaaagataaacgttactgtattcattatcgctgttttgtccatgtagctgattggagcatgcagtagcccacctgtcttttgtgtcatcaccgagtttctttctgggggttctttaagaacatttctgcacaagcaggagcacaaatctctacctttagagaagatcatttcaattggtttggatattgcaaatggcattggatatattcactcacaaggagttgttcatcgtgatgtgaaaccagagaacatcatatttgattcagaattttgtgcgaagattgttgattttggaatatcttgtgaagaagcagagtgtgaccctctggcgaatgacactgggactttcagatggatggctccagagatgatgaagcacaaaccttatggtcgaaaggttgatgtttacagctttggccttatcttatgggaaatgtttaccgggtcggtaccttatgaagacttgaatccattccaggcagcttttgctgtttttgataaggtatgaatttgttttcctgttcttatctgcatactgcatgaggaccttttgctgtttttgataaggtaatacatgttcagttgcttgattatcgtctcttcaaaacgaagaatcattgcataagataaaacatgttgagtcgtttctagctagtcggcctggtttagttcccaacttttccatcacatcaaaactttcctacacataaactttcaacttttgcgtcaaatcgttccaatttcaattaaactttcaattttagcgtgaactaaacacaccctaactgtcactgttgactacgaccatctcactttgatcacaaattacttttaaatgataatactatgatgtatgaaagttttatggttatatttatgatatttcaagcttcgataaacatgacatatttgcacgtatctataatttgtttgcaaaaaaaagagaagcggtcaaagtttaaacataaatagtaacaatgccaattatttgaaaacagatgaagtaacaaccaaatatatcttcagttccatgatcctatggctatttgattttcttttggaaaatgacgaaaactccatttttcagaacgagaggccggtcatccccagtagctgccctgcgccactacggcttctaattgagcaatgttgggcctcgcaaccagataaaaggcctgaattctggcaaatagtacagatattggacaagtttaaggcggttctagataaagatggaacactggacaatatgccatgcttaaacttgcaaggaactcatgatcacaagaattggctagctcactgggtccagaagctcaaacatacccatcatgatctctctggacctccgccaccaaaattgatgtagttaatcctctcccttccaaactatgctaatcggataggcctcagaatgtaactgtcaattttttgctttgttatataggaaaaatatatgtgtttgtcttcgcgattttatagcacagtaaacatttgcttagctttgctagtgacattttcttctttttgtttcgtctgttacactgtttgatacaagtgacagaaatgtctctatgcaattccttgaaaattgtttcttcggtttgttcggcctgtccgccacactggggtagattaggcctgctttcttgggcttttgaagcagcagtacatggaaattctagtagtctgtacgaaggcaggccattacagcctccagtaacatttcacatttttcttgtaacgtttcttgctttactcgttcaagcttctgagctactccctccgttcaaaaaaaaagacaaaccctggtttccgtatccaacatttgaccgtccgtcttatttaaaaaaattatgaaaaaaattaaaaagacaagtcacgcataaaatattaatcatgttttatcatctaacaacaacaaaaatacaaattataaaaaaatttcatataagacggacagtcaaagttagacacgaaaacccagggtttgacttttttttaggacgggggagtatgtgccttttctttttcttgtattagaagctataaaaaattaatttaacaccttcagtttgctgtgcaatctgccagtaccgcaatgtattttggttagtctttttggcttaccgcgcacctagcaagagggcacgatcctctgtaggtggatttaaattttccttccttgtactgtatttcaataccacatcttcctgatgtttttaaaccatgacctctgacaactgaataacttctgaattcatcgctggaagcgcgttcctcgatcttccatagtgaattcatcgcccttaacatgtgtgtgtccacccccgagcaccttattcatgaatcatgatattactcatgcagaattgcatatcttcggttttagtgcttcatatgattcatcttttgtctattgaagcccaattttatgaattgtccccttctttggagggccattcagcaaaaaaacaggctcatgaaattcgatttccatttgccatagtagtagtacatcccaattttgagcatcggtctctgaaatttgaacattgaccttcaattctaaaacctaaaatcgccggtacactcttctagctcatatagctcccgcagaacacaatacatacatatgcatacgtagacgcgaccgacatggcgatcttactcttgttgcgtgccataatcgacatgcgccgtcacgcaacctccacggcggcccgggcgaagtcaaagctgagcatggacgccctgaacttggtctgcttctccggcgaccagaccgccaccggcgccgccgccgcggccgcgacacgctctggcgtgccgagccacttggactgcatgtacttgtgcttcctccaggggcccatgtgcatgttgttctccttcatgcactgcttggccgcggcgcacatggccttgacgacggcgcgcagccggtcggcgcgtccgacgaacacctccggcagcgcggtcaccagcgcgcggtactccgcgctggcgcgggccacctcgaactcggcgcggaagttcagctccaccaccacccgcaccgccttgccgctcctcgtctgcaccaccacgtccacgtagctgtgctcgcctgcgcgtcacacgggaagaaaaaaaaaacacgtcagtttcgttggatccatcggccggcgcggcgcccggtttcggaatatctcgtgcaggttttggcagcgaatttaaacgtggtgtaattcctctggctcgtgcgagtttgacgctgacgtggcaagtcgtgtggcgactgttgcaagttcatctgtcacgagtttggatctactctttacgactttatgagcgtagctagaaataatagagacagtgacgggttcctgacattcccttggctgttgcctgttggttaatcatggaagtggaagcatctattgttttcttttaatcgtaggatgaccttgtccatgtgtgtcatgtggctctatggttaaacaagatagtatgcccgtttgttaagtagtaactgtttgcatttaaagcgcgagacaactattataagcatgcgaatatgctccccttattcaactctcataggaaaagatcctgatttgtggatcgaacaaactgttgaggcactgtacctcgcggaagcgcggaaagatcaaatctcttgactacaaggagcacccagatttgtgggacacggcaaacgtcctagaccacacagaggcacaggcagcaggctacacggcaaggcaagctgtgatgtgttttcttttgggactcagctgtttcgtgccgtctgaatttagcttcacaggtaaccgaaattacctgaagggatgtccggcgagcgcgtccacttggacttgcagatggcgctgttgtacccggcgtcgcgcagccgctcgtcgacatgccggagcgtgcagctccggcagtccccggccgccgcccgcctcgcgcaggagcagacggcgcccgcggcgcgcatcttcctgattgcctcctccgtgtcctcccgtatcctgctctctacctggctggtcttggccaaagcctcctgcacatccacgcacgcatagtctctctcagaaccagaagatatttagcccaaatcaaacaagttcaactgaaaatatcgtgatcacatccgtgttgcgtggatatgcatgtggctattggagtgtaagagatctctgaattaattctgttcctcacgaacgcaaatgtatagctgcgaaattcagctagcagaggggaagggacttacatgcagctgggagtgctggttctgccagaaggccttgctctcggcggcgccgctgccgctggagccctcgtcgtcgtcgtcgccgttctccggccatctctgctccctctcagcctcctcgaagaagccgagcaccaggttcgacaggctcatctcgccgtcctccataaccatgacgtgtttcagcagatcttttctactgctagcttgggctgtttgctcaacggcgctcagcgactcggtccactaggcaggcaaaggctgcctatatataaacctggagcgttaggggacgtggcgaatgggcagtggtggcggtggtgggtccggcgggtgggcccggctggggagcggatgaggcgattggggacgggcagtggggcccacctgttggttgggacacgggaacagcaaggatccacgtcaggcacccagccggattctttgcgcagccaattcgttcacgctgctcggccgttgttttcgatggttgggccttggggacttggggtagggacagtatacgacaaaattttgacaatttaaacttttataaaaacttattttaagaataaactgtgctaaaaacttatttcaaaaatgagccgtgacctcaacgccatcgggattggcgctgagatccaacatctcagcgctgactccatccgaggtggcatatattagccacgttataagaggtcagcgccatactctttagcgctaacctttacagtggctaaaactaagaaacggtgatttatatcttataggtatcgctggtgtagtggttacagaactgaagattgaagatcttggatttgaactctgcaacatgtacatttttttaatactttctcttgcaatctgctagcctaatttgctaccaagatcataagtttggcttatgaaaatcattttattctggacttgacaaatatgaaaaggatacatattataaaactttttagatatttccaattattatagagtaataattttataatatttttccaacattcaaaaattattttgaacttcagaaaatatgtaagaagaatgttgtgaatgttctcaaatttctatatacctttaattgtcatttatagttattcctagttgtaaatttcatgtatatcgtcatatgctttctaaatttatttttattttaataaaattgagaaaatatgttctcaaattcttcctactgataataataataatatacataacattaattcatattatttagttataagtttcgagcatggtagggaaaaaatgtaaaatagatgaaacaagaaaaatggtgctgtaccgtgggttcgaaccttggcccctctgtgtcggattagagcaattccacaactgagctatcataccatctagttataaatggagaggtttgattctttaacctgtacaaaagtcagcgccaaagaatatagcgctgacctctaattacgtggttaatacatgccacctcggatggaggtcagcaccaatatttgcggcgttgagatgttgtaactcagcgccaatactgatggcgctgaggttgcggcttatttttgaaataagtttttggcgcggtttattcttaaaataagtttttggcgcagtttattcttaaaataagtttttgtaaagggttaaattgtaaaaaatacaccagcatatggtcaacagagttatgctcttgccatgatcccatctgcccatgatcaattccaaataatggagtaatactctatcttatcaggaagatatctgatgtaaatcaaaattcaatggtaagcgcggagtgatgttaacagtgggaatcattgtccacacccttcaaccggttcacattctaattgggctcaccaggagttacagcacagtcatatctaacttgtactacctcgtaacacagtaggagaaaagttctacacgtgtcaaggacgtactacaacttcgtgctacaaaacgatggcccatcccatagtccatactgatcgttcatttactcccgaaaagggagaaacaggaagaaaacacacaaattttaacaatttgaccctttgcaaaaactaattttacaaataaaccgctgccaaaacttattttaaatctgacccttttgctcaacatcaaatcatgtggcgct

SEQ ID NO: 27502 - DNA, 48610 bp, Oryza sativa
atgtttgatacagcttcaactcctaaatttagctctaggagttgggtctggagtggagttgtggagctgcctaaacccagctctacaactctagtttattttgtgagagagctccacccagctccactcccagttttagtggagttaaaattgtttagctgagcaacagctctaggaagggtggagctggagctggagctggagctgtgccaaacatgccctgaagcttgagaagtcgagactcgagagacctgccggctttgcttctagtctgaaggctaacctgtagacttgtacagtacctcagttacccgggcccccgaacccccaaacccccgccgtctcccgcttccaaaaccctagctcatcgtcgtccggcggcggggatgccagggatgctgatggacggcggcggcgccatcgtgccgttctcgggagaaccaggccacgcggtggcggcggccccgcccgtgcggaacatccgccacggcgtggccccgcccatctcccgcgtctacgtttccttttctagcggcaacctcctgcaggtcgcctgcctccgcccaccgaatccggagggtggcggagaccgtggggcggagcaggtctccggggggagagtggtggaggtaaacctcggaggtggcggtagcgggcctggcggcgcggatgcggaggagatcgatgaggcggaaatgcggaggatcgagtacgggtcggtaccggcgtttgcgctgcttcagagcaggaagaacgcgctcgtagatggtcacggtacgttgcgcttgccctcagtctcgtagcgcgcagtatggtaagccattgaaatttggacggctttctgtgctgaatggtagtatttttagtctggactgatgattaatatggcattttggctgctgtataagactttagaggtctataaactgttaactaggtgataccctgcgcgctgctgtgggaaatgaagaatacaactttgaagcatgggtgaaagattgagatagaagtcaataagaccagacaacttttggttttgttcatgaatcatggggagtgtagataatagcattaattcaaattggtgatgactttgtttcagggcaatgcctatatattggagataaacttgtccaggtagaatataaatccaagaagtatggctattctcgttgtatgggtagaatcacccatcgcaccaatcacaggacagaccgtaaacttacgattcattgactggttgagaaaaaaaaaagaaaggaactgttcttatttaacagtcagctcttatagcaacaatgtctacattgtgcgagggaatagtccgaaaaagatgacaacaattgtagtttacgaataaatacacatcactacaaatataaacaactgctaggatacttatgaattccaattcgaaactatgaaaatttcacaagcaaaactgacgaacaactaagcagtatagctaattgtatgcttacactgggaactttattggaaggagggcatgcatagcttttccggaaagaaaactgtagaccattgacaacatatcattttaatcattgtatataagcatccttcgatgttctattatctgctacaaatttgtccttgaattagcacatacatcattgactcatccttcttggagcacagccataacatatttctatacctgcccaagaaccattaatatttaaatcagagtgaaataaaaaaaggacttaaaccaatcaaatcatcaaaaagctatcttgcggttgagagaacagcggaaggcaaaataatctgcaggttgtacaaaattgcttttaagatcagcatcgaatcaaaagtaagagtcaaatgaaccgatcaaatcatcaaatcaaatatgttatcacttattcacttatcacctggtggatagaaaaagcaatagcccttggggggaaaaagataatactgtaaattaatatgaagatctaatgagaaaaaaatgatagcaaatatatcactcaccatgcaagagctgatgatcaaatatccggttggtctacaaaagagatagcgctggtatgcgtggctgcaggactgcaagaggatttcaaagatgctttggaagagaataaatctgattaaccatgacatttggtctcgctgctataattatcagaggcagtttctgctgcacaattgcttccatcgtaatgggagaagtagatgcggcaggctaggtgtgaaggggattggatccactaattaagaatttgtaggattcagagataaggggactggtccgaggataatcgtttagcgtcttgattatatctaatggctgagataattgtgatgatgtggcttaacctggtggctgctttgtagtagtaattgcactaagtgggttccaactatatagaaagaaaggattactgcccaagctatgcttgtactgggataggcatgtcacatatcgctcagaattttaagttttagcaatgctttgttatattgtttgtgttcgatagctatccaactattcagataccctttttcatattgtagaagctgaatttgtagctcttaggcttccgcctaaatggataaatcgacatatctgaagtacacatatggttaaattttaaacatctgtgccaaagtggtattataatcactgtttatacagttaatctagatcaaacctctgcctagtataagctatccattttttccatgtgcttgcttctgattctactatgttttgtcaggtggcaatatgtgcttgaatacagtaaaaccatcggtagtctccttgggaacccagattctctttctgcttacatgattgatgacccaaagatgatccttaaggtgaccatatctatgtgtcacattgtttcctgttttcttgctttgcctttgtttgaagttaaatttacttttttgcctatagaaagtaattggtatattttatcttgcaggtcaaggagaagcctactagtttaaaggctgcgtgggagttgctagagatattctttgttgataaacagttgcaaacttggcttccagagcgtcttgttgattggttagccgtaatgctctttctttgatctattgctttgtttcaattgtgagcggactttgctgttacaatacctaggggcgtctcttatcaggcttcctgtggttttaggactatgacagcctcttgaccaagacagagaacacgatatatcgcacgctgatcaatttccagaaaaagctcatcaacctgcaggtttgactcattatatttgttgtagcatatagcattagacgtcaaatttgtacctctcaatcattttatttgttcttttctctataaaacttctacaactccatgctttgagttgattgttttgtagtctattttactaatgttcatttgtgctacttccaaccattgattcaatagcagtaatgagtataaatgaataatgagtgatgctctataggttgttgaagatgatcctgattattggagtggattatcagcagctctatcggttggatggcttgatattgtggtaagctattttcttgcacgctattttatagacatgtcagttttgattgaatcctacaatcagaagttgttttttttttcttttaggtgaatatgctacgttttcatggatcataccaattggatcagatggacagccgtgaggtagttaggttgctttgagaccattctttatttcttcatgacttgcatctatcattcacataaaaatcattttatttgcttcaagggcttaatttgttatgttttctagtagtatttacagtgttgcactaatcttttgaaataaagaaaatgtgctatatcttcctatagtgtacctgattgtatacaattatatttcgttgtagctttgacaaatatgctatttttatgtcaccagttgatttatatacacttgcttttttaacatcacccttttcccccattttggtccatcagacagaaaatgggttggttgaagctgttgctgttcttgtgtcaacaatgccacgcatgcgaccagatttgccatcgggtaaattaggccagtgttgtaaaacaagaccagattttataaaggtatgttttgtgatgcagagttttgatgcatagaacattttgaatgtgtctgtctgatgttttgactttctggctgcatatccagtagtgcaaatctatgtttctgaagaatctaactctcttgctatgaaatgctatcattatttgattatattgattttaccctttttgctgccttagcacgcaattacacactacgctgtttgcctttcatgaccactaattcactatgatcttctcacatgactatcagtacactgcttattctttattagcccactagttcttcatttcaatgtatgccacttgtgcaactatttcttcacagtaaagcataatatttctttgtgcttctgatatattgtgaaccttctgaattcactccactggattcaaatgagagctgctctactgtgctcttttgtcactgattgctgctgcatcctcgggctgctgctggctttgcacccaccaccattgttccactgctcatctatgctgagagttactgactatgttggctgaactttgaattttgcacaatatgttcttttgtgattaataattatatgtttatatcctctcaagctcagtagcataatggttacttcaaaaaaaaaaaggaaggaaagggcagtgaaaatttgtgtaaaaacttgtatagtttcctgcccaagtgtttggaggtacacagaaattgtattgcctccattgacgtcagctaaaagcatttgccaaattgtattttttacaggcattggaaaaatggcgaggtcaagtaagtaaactggagtgcagtgcattctggattcagtgcggtcaccaaaaaactcgtgatggtctgaagagtttgcttcatattatgttggggaacataaagaacctcactgcttctacttcacattggctggagctctttgcttctcatttactttatataaggccattcacagtggttagtcccatattattgtgtttgctaatatgttcttcattataatgctttcttgtcgattcatttatttgtcaccgcaattttgcattttgcagctgctattagagcaatcccctcgctagagagttcatttttagtttgttattctttaatctgtgacatgatgaaattacccattatatagaagagaatgctagatatttttaccatctcctatctcctgtaaaaggtatccagtaattatggttattcatcttgagttgtcttgtacaatagaacatgtttttatgttggcagatgtttgccttactgacccgtacccacttatttcttgtgtgatgtaaacagttagtcaatatatatatgtggcaacaatttttttgaaggggagtatatatttgaacaatcaaaacctcttgttatgttctgctaaaatctatatgtttgccagggttttgaagggatgcatcagttagcacaaaagtgcatacagcttaaaccgtctgctgacaatagcggattgacaggcctccttactggtatcctttcagaaaatagagaggttggaacacaatgtgatcatccattacataggcccccaaatttcttatcctttccacttttcttgtttgtgtgacatttttttttcttttctaacattaggttgtcttggctgaatgcacaaaaaattttggtccttggtaagatgtattgttggccatttgatttatgctgccaactttgaaacattgcatcttaatgtgttttgccatttgtaaatgcaggatggtcacacatgctatggagctgctgactgctgacaatgactatgcggatatgatgttgcatgaagagaggcctaacttcggtggtataagcatagaggagctgcacaggcttgtttatgctcaagttttgtgctctcatgctttaacatggcaggtatttttttgtagctttgtggattgtactaggcagatattttcttgagatgacacttggcctgtatgaattgcttgctacgcataactgtgacgttcttttgcgtatgactaccatgctgtttgttattatccattgtctagctttttgttgcagaacctctacttttgaacaggtgctgttatctgttaatgatagcaaatttttataatttgataattgttattaatggctggcttgcctatttgattctcagattgcaccaacttatctgtcctcatgtctaaaccaaggcctagggctgttggagattctgcttctgaagcaacccatacaagataatcgtgttgtattgaaggtactttgtattgatatgcccttgaattttttctgcacctttgctttttgttacctaatattgttgttgtgagcagactttggaaatttgccgcttgtatgagctggagaatgttagtacaaatatcatgaaggtaagatgttcttcccaatgcatgtacacctgtacttttccaagatttcaaaacgaagatttcttggagttttaacctggcttagttattatctatatattcaaacttaccagcatgcatattttattgtacccacctgtcgttttgactcacgagtcctatctattttttcttctagattgctggcatttatcattggaaacatggtaggaaaggaactggagtttactggttccagcaagctaatgataaagttcgtcttgacagaattgctcaacaattattcgaacatattggcaagtcggtcacagatgatagttttaaggtgccgatttctgctcctccttatgacctatcttttgtacacctgcagttagttctgagtgtactagtaaccaagaaatctgatcaaaagggagatctttttcatcaagcagatatatcgacaatgtttttgtttatgacatttgctaattataattttgtatggtcagcaatgggaggggctgcttgagttactaggttctgacatcggtagtgcaggtggtcttgagttccttcacaggtattagtcccctttccatcaatttctgtatctcttctcttcatgagtactaaatttcgtttcaacatatgcttgcacacaggtaccgagatttcaaaaggtcccttcagatggcacaagaaggaaggactggcgagtctgttcggcaaaccgtggagtttcttatacaggtgaaaatatttacaccttggctgggctgtcgtcctgcaattcaatttaacaccgcacagacagtgctgtcagcctgtcaatagcttatgcaccttgaatgactcttgataaatcaaacttaatatctatttctgtgcagctgatgagaaatccttctacacctcaacgtttctggctaccacttttacatgactcggtaagctagtcatatgtttacttggggtgttcagcaaagcagctagctaaatcttctttttgcccctgttcaataatttaatctgtatcaggcttttgattctgtttctatccccggttgtttctgcaggtgaggcttctcaattgcaaaccctgcccattgttaaatgttgctgaaacgactttgttgctcaacaagctacaagaactgtcattggccaaacttcggcctgacttttccaacattcacctaccaagccatgcattgaactccgtcagattagctctagcatcaaaccttgcgcgtgcaattcttgaagaaccttaagtaatagttctatttggggtatgagtgccacatccactttgctggaagtttgacggcgttaatcgtcagttgattaccagtaactgtatgttccttgggaagaggttgaacttgtgttcactctgaatgagcaaaggttgaacttgtgttccttcatgaatgagcaattgtgtcatgcatgtatatgtaccggacattgtatttttagctttagtgataccttagatgttacttatgtacaaagaaatgctagtaaatgtattttagaatgggcacaatattgtattccttgtttcttcctctatttcttttggggtgaataactctttatggtgactaatcctagacgttctggactaataagcaattgtagatcatagagaaactgaagagtgatcctgtaagttcagtagttgggaaccgtttctgggagctgcacaaaatgttgaacaagaatagaaagggcaagtccaaagctgttttctgttctattttgttattgagatgcggagtagagcaaaagggagccaggcgttggatcgtgaagcttaaaatattaacatgtcaatactgaaaatatatttgttgcatttgattgtgctaggtccaaactatatcggtatatagtttaagtgatatagttgtatataaaatatttgtgtcacgttaattgattctctttgcaaatcacgttctttgtagaattatggggaaaaaaacacactagttgagcttatatataaaacaattgtcgccctgttcttttcatctactctactaattgccgcagattatttactgtacacctaaaatgtagtttctcaaaaaactttcttctatttgtattgtatagaccacttgttttatgttgtttgctcagtttgtcttagaatatttatctctagaataaactagattatttgtggcaataatttggtgaataatatatttcaaaccaaggcctgtttgatttatattatttagaggattgttatctgtcgagggaagtccctcgatagcgggaggtcgtgagagcctccttttgtgagttcggccgggggaagaagctcgcctcttagaaatcacgtatccgcccctaaggctgctagctagcttgtacacaatcgaattatacaggttcgggccgctgtggagcgtaataccttactcctgtgtttgggattatggttgagtgttacaagggttccttaactccggagagcactctcgctcttcttctcctagagttcaggttttctgagagtcgtcccctttttcggtgggcaaggtcctccttttatatctcaagtggataccacatacaccgcctctacctactcttctttcgggtggggacccaccctatcttgaccgggactcgacccgtgccttcgtttggaagcaaagccacagcttgtccttgagtggggcccaacgccgtccctcgcttgacatgggggacaaccctgtcattcccccattaatggatgaagacttgtggtggccgccgtccgaatgaccctccgatgggacgggtcatacctacccccacttcgccgggagcagacgcgacgtgggagctcggttgtcggtctagtcagacgtgaccagaatcatgaccggtcacaaaccggtcattctttgattatggcgcgtcagattcgcacgccgcacgtctgccttactgcattaaatgcggcagggggcagttggggcattgtgtgcattaatggaggctcagcctgggccccctcctcgctagctccctctgccacatggcggctgggcgagggcctcggggcgaagcggtgcaaaggcccgaggggcatgacgtggcaccccgaggccccgacccctctccggtcgctccagcgatccgcgggttgcgggggcaagaccaggctgtagggacacgcgacaggacaggaaggtagattccccacgcttcacatacccccagacccatatctccgacagtagcccccggcaccatatcggacattggcctcctgaggtcggtctgatgtggtgcctcacgatttcccaagctagggttgcaggctcggcaggtaatctaagggaaaactgccgagtggccagactggcgtatcaaccacagcagcggtttggctgtcactgaccgcgctgtcgatgaggatgtctaaggcgcgaaaattggggggtcggttagactacgcctcaattccctcgctcgctactcatgcggcggtagtggcgacggttcgctcaggttgcgcccgtgaccgttgcgcgccctgctccgagtgtgccgctgataggcgcactaaatgcggggcgcggattcagtgggcgacgtgatgagtggacgcaggaaacgaagagacaaccgcgggcgcgagaatcgtgggggcaatcgtgagggcgtgaaacgaggaggtgagcgtgggtgaggcgaggataaaaggatacggaggcaggaactttgcccccttcctttcgccaactgcccactcgtcttctcgctccttaagtcctaacattctcgccacttcgcactattccgcgcaccaagcccttcgccgtttctccgccggccatcatggctcaagacgctggcgacacagtgctcccggcagcacgcattacggtggataggcaccttaacctcccccgcaagatcatgccggacggcgccgtcgtgagggcgagggagttgcggccgcggccgcggtatccggagcgatctgtgcacctcttgtccttcgctatggcggggttgattccaccgttctccggattcttccatgaggttttggatttctatgaaatccacaccttgcatctcgcacccaacgccgtgatgacgctggctatcttcgcacatctgtgcgagatgttcatcggggtgcggctgacgatgcggctgttccagtctttcttcatcccgcagctgctgcaaggtgcggtggtggggggatgttacttccagccccggccaggcacggcggggcaatacatcgagagtcatctccgcaagaaatgggaggactggttctacaccgcgctgccggaccacccgcgacttcggattcccgctagtcctctcgaaagatccgccgcatggctggcggtttcggagctgggcgaggagtacgacgcggtgtgggatcgccttaggggcctgcgaagcctgggcctcacaggggcaatggtctttggtgactatttccgccgccgcatcgcacctctccaggatcgatcccgtggcgcgtgggagtacacaggtcccaacgaccccatacgcacgcatgtgggtgagcgctgggactgggggaaggaggacgcgaagatggtgattcggcgggtgctgggcctagactccgccgagcaaacactgattccagacgggatccttcccctctgttgcgaccgcgatcgggagagcatcctggccgtgatgtcggtcgtcggcgccggcaggagccggtccagccggggcggcacaaatggtagcgctgccggcgtgggtggcagtggcgcgaccacaggcgggagtcggacgagcggacccggcgggggtggcagctccagggcacccggcccgagccgcggacccggggacgactcgaccagcgacccgaaagggaaacggaagatgcccgaatctcgactgccctctcccccacgtggagggggcgccgagcgcgtggcagaccgtccgccagcgggccacaagcgccctgccgggcctgaggccggacggaaaaagaagcggctccggaagaaggacaaatggagccgtgtcgggggagcttcattgagcccccgaagtggactttcaatcgccctccccgcaggtacgattgccggcacccacttcggtgcttttacccagctcggtctgttgttccctccttttctttttcttcgttaacgcgatctgggttctcttgtagcgagattccttcctagggggtctcagggtccgacccttcgcaggggaccaaatccgaatgatcggagcggcccgggcttggccgatccaaggccgcggggccttcacagcctctcggcggggcccacagaccacataccgggtccgaccccgagttaaccccagccaggactcgactcgcagcgggcgatagcggtggtgatgcccctcccgggggcagctccgagaccagggtccatgcggagcgccacccgggaccggggggcgagggaggtcgtggctcggaagccgcggccagaggcggccctgagctcgaggtcgagaccgaaactgggggcgggcccgagcccgaggccgaggctgaatctacctgaggacccgagacggggggcgagagggacggccgctcccccttgcacttggggcgccctcggggctggttgcgcagaagaggggccgagagcagcccccagtctcgcgggggatccagcagcactccgtcgtcccaggggcagaccacgaccttttcttctccaactccggcaaatatggaaccgctcctgcaggtgctcgccgccgccgattccaccgtccgggaggggctcaacgcccaagttcaagccctggcggaagagcgagcagccctggaggcagagtgggcacagcttgctgcggaccgcgcgcgggttgacgaggggcgccgcgccgtggacgacatggtgaaggtgggacgcaaaatgcgccaagcccaattggctgaaattcaggcgcgcgaggagacgctggactccgtcatgcgggagacggaggaagagcggcaggcggcactgatcgcctcaagcgtcctggacgaagcgttgggcgacatccgcctacagtacgagtcccatgccgaggacctggtgaagagggtcaaggatgcccgcagtatcctcgacgcagctgctgcccaagaacggcgggtatcggaggccgacacgtcgctgcgggcccggacggcggcgctcgaggctgaacacagggccttggatgagcgttcccgctccgcgcaggagttcgagaccacgattcatcggcgaatcgaggtcctcgaccggagccagcgcgagcagaacgcgcgcagccaggagcaggcgtagcgagcccaggagctggagaggcgggctcaggcgctggaggagcgagcgcgtctgctggatcagcgggagtccaccttggccgcccacgagagaatggcggcggaggtggaggcctcccttcgccttcgtgaagaggccgcagccaagcgtgaccgggtcaccctcgtcgcgaaagcttcagcggaccgcctcgcagaggagctacggcttcgggaagaggcgtgccgggaacgggacgtcgcactcgccgagcgtgaagccgatgtgaaccgcgatgaggtggcctcacaccggctgggcgagcaactcgcgaaacgcgaggaggccgttgccggacgcgcggcgatagcggcgagggcttctgagctggaggcccgggaaaaggacctagcggcgggcgggcagcccggcagcgcggagttggtgagccagcctaccacggctcagagcactctcgccgacctagagcgcttggtgcaagatcaggctggggagattgcggccctccgcctcaccaacgagatcggacctgggcagctctccgatgccgtcgatcagctggagcgcgcggggcgccgagtacacagccagcactcgcgctccggctggacgggctggcagtggatctggagaggctggaggaggagattggcgagaccgtgaaatcgtcgtcagcttccttggcatgggccgcggtggaactggtcctcgcgagccaccaagcgcgcaaccccgacttcgtcccgtggcgcgcactcgaggatttccccccggggaccgaggcaaaggctcgggagcaagtccgggagacggccgacgcgattgtctctaacttcgaggggtcggccccccggttcaccttcgggcttgcctcgaatgaggagagcaggagcggagacgatgatgacgacgtcggcggcgaggactgggacgacgtcgttagcggcgccggcctcgggggcccgggcactccgtgatcattcgcgctttttatttccttttgttgtgtgcctgcaacggacacttcttgtatttaggccatcgtgccgtcttatcttgtctgtaattaaagcttccttttcacactttgtacgcctttgctccccattgaatgcctgcggcacagaaagacgaagaaacaagagcaaaagcatataattaacctccctgtgaacgaaatgccgctcttaccccatcctccccccctcgggctcgttctagcgaaaaggcaaatccgtgctcggtccgtggtacctaagtggtgaggggcaagatcatcgccccgagggagccgcccagcgggactggccagaccgaggctacaacgaccaggggtcaaggacggccgtgtgtaggcccttccgagcccccggggttcggcgcaacccggggagcggcccgtgtttgggctctctttcgacggtttttaggtcgccccacggcacttagggtctggagtaaacccgaactgtcctttgaaccaggacaagctagaggaaagagtaagaagaaagggcgcgtaacagcctccacattaaatggaaaaatttattgcttggaaagggaaaaggatacacaatggtagcccctggccaagcccgcacaagccgaggggttgtgcgggggttggcccgagctcttggaaagcaaaaaatctcgacgctatggatagaagcgacagaggtgttcgatattccaggggttaggcaactccgtgccgtcctccgtggttagtcgaatggagcctggccagggaacgccgatcactttgtatggctcttcccacattggcgagagcttgctcagccccaggcgcgattgcacgcggcgtaggacgaggttgccaacttgtagtgaccgggcccggacgtggcgctgatggtagcgccgcaggctttgctggtagcacgcggtacgcagggccgcacgcctcctctgttcttgaagatagtcgaggtcatcgcggcgaagaccatcctggttggtctcattgtacagcgcgacgcgaggcgatcctagggaaagctccgaaggtaggaccgcctcggcgccatacaccaggaaaaagggcgtttcccccgtggcgcggcttggagtggtccgatttgcccacaacacggcgggtaattcctcgagccacaaatccccgtgttttttcaggacgttgtacgtcttggtcttgaggcctttgaggattttggcgttggctcgctcaacttggccgttgctcttggagtgggcgggcgaggcaaagcacaatttgatgcccatgtcgtcgcaataatcgccgaacagctcactggtgaactgggtgccgttatctgtaatggtgcggttgggcactccgaatagggacgtgatgcccctgatgaacttgagggcggaatgcttgtcgatcttgacgaccaggtaagcttccggccacttggtgaactagtcgatggcgacgtacatgtgctgatacccgcctcaagccgccttgaatggtccgaggatgtctagcccccagaccgcaaaaggcaagatagtgggatgacctgcaaggcttgggccagctagtgggtttgcttggcgtggaactggcatgccttgcaccgccggacccattcttgggcatcttgcaatacagtcggccagtaaaaaccttgtcggaaggctttaccgaccaaagttcgtgaggccgaatgggccccacactcaccctaatgggtttcagctatgagctcgatgccttgctctcgagaaacacacttcaagagtatcccattggtggcacgctggtagagggtcccttctgcgaggacgtaccgcttggatatgcgcgcgagcttctcagcttctgcgcgatcctcaggaagagtattgctgtcgagatacgccaggatgtcagtcatccaaccgacctgacgaggggggtcggggtcgaccccctcgggccgcgggtcgccaagggtcggggcggagggcgtgtcgtcggggtccctcgaggggttcggttgcgccgatggctgcgcgagtctttcctcgaaggtcctcggggggagtggggctcgtgccgacgcaacacgcgacaactcatcagcaaaagtgttgtcgcgtcggggcacgtgccggagctcgagtccgtcaaagtgacgttccatgcgccgcacttcgcggacatatgcgtccatttgtgggtcggtgcactagtactctttggatacttgattcatgactagctgggagtcgcctaggaccaggagacggcggatgcccattctggccgccgccctcaatcccgcaaggagtccttcgtattccgccatgttgttcgtggctcagaagtcgagccgaacgacgtacttgaggacgtccccgcttggcgaagtcagcgtgactccagcgcctgcaccttgaaggttgagggaaccatcgaaatgcgtaacccaatgcccgcaacgaatgtcggcgtttgggtcctccccatctccgagaagagatgggacgtttggtggaacaggttcgtccactggggtccactccgcgatgaagtcagccaggacctggcttttgatcgcgtgtcgtggttcgaagtgcaaatcgaactcagccagctcgatggcccactttacaacctgaccagtgccctctcggttgtgcaagatttggccgagggggtaggatgtcactatagaaacccgatgcgcttggaaatagtggcgcaatttccttgaggccattaaaaccgcataaagcattttctgggcctgtgggtatcgggtcttcgcatctcggagtgcctcgctgacaaagtagacgggccgctatacctttcggcggggccggtccgtattgtcaggggcagatgatctggggctcccttactcaggggccccgagggggtctcgagccatgtcgggatcataggcctcgggaccactcgccaaaagcctcccctcctcccacgggggcctcggggtcctcctggtggctaggggcttcgggcaccggaccttcgggggacgaagggccatcgcgagttaaagggacctccggtccgctttcttcgcactcgaccactagggcggcactcaccacatggggggtcgcggccaagtagagcagcaactgttcctccggccccggggctaccaagatgggggggggaaggtgaggcaagcttggttgaaagcttgctcagcttcctccgtccacacgaacgggccagagcgcttgaggagcttgaataggggtagtgccctctctcccaacctcgatatgaatcgacttagggcggccatgcatccagtgacgcactgcacatccctaagcttgctgggggcgcatcctctctatcgcgcatattttctcgggattagcttctatgcctcgggaggagactagaaaaccgagaagtttgtccgccggcacaccgaacacacacttatcagggttcagtttcacgcgcgtggacctaatactgtcgaaagtctcggccaaatcctgcagcaacgtgtcctggtggcgcgtctttaccaccaggtcatcgacatacgcctctatattacaccctatctgattactcaaagtaatacgagtcatgcgctgaaaggtagggcctgcattctttaacccaaaaggcatagttgtataacaaaaagtgcccacaggagtaatgaaggcagttttttcctcatcttccctagccatgcagatctggtgatacccagagtaggcatctagaaaacacaaaaggtcgcaccccgtagtggagtcgactatctgatctatgcgtggtagagggaagggatctttagggcatgccttgttgaggtccgtgtagtcgatgcacatccggagcttgccgttggccttcgggacgaccaccgggttcgccagccactccggatggataatgtcacgcccagaaattcactagtaatttccgaactaatttgtgcatgaaatcctcgtccaggaatcagccgaggtacacaaactgacaatttaatatacatattcatcataataataacgttacatacttataaaagaaaagaaaacaacagcggaattacggtctagcgaagctccggctccactcccacaggcagctcaactggggtataagccaaacgtcttctccttcgcaacttgtcttccactgaggtttgattgattattgcaaggtgagcatatgacatactcaacaagccacacaacaaatatgcaagtgcacaaggataccaaagaatggcataatatagggcttatttgcaaaagcagcatttagcaaacatttgagatttgtaaaacagtagagtaattaatcatcaatattaatcaacactgaacagcacacccatgctgcacaggcccaaccatcctgaacaaccatacccggctgtatagatctatctccaaaccagaaatgtaccattccaaaccaggagctaatcaaattattaccagttatagcatcatttattatggtgaaaagtgtgaaactaatcacgaaagacattgttagacctgcccataactgcgggcacggctattcgaatagttttactctggccagaggtgtaccactgtacccacaagacacagctccacgacatgtcaccatgcgcctcaataccaccacggtacctcggaaaggagctgtgacagtacccctcgcataacacaatccaccacagcgcaccgttcctggatcataatcactcccttataaaacaaggcatggactccccagcgacccccgtgggcttatctccgccacttctcagtctggtgccccgcaatgaaccatgctatacaaaaggtaaagccgttgcccacgctggcttgtggttggcacggttaatgtttcacaaccgaaactcgtgaaccagtccttaattgtcatgagcacgaccatcaaaaccatgtgctcacaactcaccattaatcatattttaattatcaattaattatcataacacgattgaccatcgtgagctaccattaaatataaccataaataataatgtagtatgattcatcccattaatgaactaatgtttctaagcacggctaagcaattatatatatagcatttagctgaaccaatccaatatataaggtccaagctaataaatttattacccataggaaaataaagtcatcttcggccataattaattgggaaaggctcaccacccgatgacattcgaaaataatgcatgagttgaaataaaacattagctttaaataggttcaacatgctcaaagggttgtttgggatctgtgtgacttgccttgagcttccgcaaacgcttccgaaccttcctcaacaaaaacgctctcctccggaacgtcggaaactaaagcaaaagaacaaaatcaacaaaacagtacaaaaacaagcataaacagtacatgtggatatttttaacatgtagatctcgattttagatgaatttagcgacttgaaccactcgaatccgagttacgatgatttagttatgaatttccgaagtttaatcgattttcatctaatccagaaaattattacgaattaaataaaagatttatgacgtcacgatgacgtcatcgccggcctagcactggacgacgcggccaccggcgatagagagctcgaccgggctcaccgaggacaccaacgcgaagaggatgacgacgcgaactcaccggtacaaagaacaacgacggataacgacgaacgacgaccggcgacgaggttcgacggcggctcggctcggctcgggtccccgacggcgacggcgctccggtggtcttcggcggctgcgaaggggtggacagggtgctcctccgccgtgcgaacccggtggcggcgacagatggcgacggtggctatggtagtggaacggcagcgacttggcacgcacgagcagtagcagcatggctgtagcagggagtggcacagcgacggctaggcggctagcgcagcggcgacgctagggcagtagctaagcgtggcacggcggcggctactcgacgacaaaaacgagagattaaaaactaaaccgagggaacacggatagaagtctcaccgaaccaaagcgatcagagagagagatgacgacggtgacccgacgacaacacatggagacgacgacgatgctagacaaataacggattagattgaattaagaccctaaggataaagtacaccggtgaatgacataggagcggcggttgccggcgaaccacggcacaataatgcaaacggagggcaccgggagaaagaggaggcaacggcgatgcttaccaacacttacgcagcgatgaacggcgaaggagatggccggcgatgactttccggtgatcttcggcggatgacaaatggcggatgggcttctcctcgcagctgcaaatccaatggagacgacggcgaccgaaggcgatgacggacgacgcggttggaggcacggcggcgctccggttcacgatgacggccaatctccggttggatttggcgcaaaagaaccagcggccgggatagagctcgactttgcggagccgagggaggtggtggagctgatcggcgacggccgaggcgacggcgcacggcggctggaacggctaccggcggcggagagagaaggagctcgcggggagggcgattccgacgacggtggaagatgagacatgaggggataggtagaggacgactagggggtcctttatataggcacgggagctcgggtccgagcccaaatcgactataaaactcgggaaagtctagggttctcgccggagtaaggaaagattgaaccccgaaattggaaaggatttccatagaaacttttggggatttcttggggaaaaggaagaggagattgagaggattccattcccgcaactaatttggaaaaaggagcaacgaggtggccggattggtgggaggaggcggcacggctgcacaggcttgggacggctcggtcactgtttggaggttgaagatagagtactgttacaagggttccttaactccggagagcactctcgctcttcttctcctagagtttaggttttctgagagtcgtcccctttttcggtgggcaaggtcctccttttatatctcaaggggataccacatgcaccgcctctacctactcttctttcgggtgggaacccaccctatcttgaccgggactcgacccgtgtcttcgcttggaagcaaagccacagcttgtccttgagtggggcccagcgccgtccctcgcctgacatgggggatagccctgtcattcccccattaatggatgaagacttgtggtggccgccgtccgaatgaccctccgatgggacgggtcatacctacccccacttcattgggagcagacgtgacgtgggagctcggttgtcggtctagtcagacgtgaccagaatcatgaccggtcacaaaccggtcattctttgattatggcatgtcagattcgcacaccgcacgtctgccttactgcattaaatgcggcatggggcagttggggcgttgtgtgcattaatggaggctcagcctgggccccctcctcgctcgatccctccgccacatggcggctgggcgagggcctcggggcgaagcggtgcaaaggcccgaggggcatgacgtggcaccccgaggccccgacctccctccggtcgctccagcgatccgcgggttgcgtgggcaagaccaggctgtagggacacgcggcaggacaggaaggtagatttcccacgcttcacatacccccagacccatatctccgacattatcgtagattatcaacttcattatagtgataaataaaatattttaagaaataaactaagcaaatagcttatgtaagtaatctaaatattacaatagaagaaatatttttaataaaacatattatttgagatgtggagcaaataatcaatttcaaagttcagctgccactgcttctgtacaacagtgaacggacataatcaatctgaaattggcaaacatgtctgatgcaatggcccagtgaccccagtacatgcaaaaacgtactagtacgtgcacgagatatcttcgatttaaagagcacaagatatattcactgtactacaaattaaacagcaggagtacgaacaatcgcaacggagggtttatgtacacattttacacatcatgtgaattactacagcctaacacgtacagatcgctatagtttcatttccacgtatattacatcttccggtacctcatacatcacgtactaacagttcaccacgtgcagcgtatgtatgtctttctttccttctgagaccacctaccaaacggtgactgcattcatgctgccattttcgtagctacaaatccaagcctccacttgtactgtgattcgatgcgcagacccaagacgcaagcagcagagacgaatcagtactggcggtgacatgttgggatggaccggcgtgtgtgttacttgctgttccttttcctgggcacccagcagcagtgcaagccgtagggcagcccgtacgggaacttggcccgcgcgacctcctcgaacgtcttgccgtccagcaccagcgcatagcccgacccgtccttggcgctcaccatcgatatcgccacgcctgccatcaataacagagttggtcaagttattacaaacgaaacgaggcaaagccaagacgtacgtatacgcagccaacgaggagagatggtgacactaaccgtcgtcttcctcggtggcgccggggcgtggcacgaagaagggctcggacggcacggagccctcctcgtgccagttcttggccgtcctctccaccaggtcgaccttggtgagcgtgttggggaagttgcacggccggcgggcgccgcaggcgtaggcgtaccggtactccctgccgacgtgcgccgggttgatgctgcacatgtccatgccccgcccgtgctcctccgggtccagcgccgtctccagctcgccgaactggctcccgtccagggggatcctgaaccgccccaccctacacatggtgttccccgtcatccatcgtgcatacgtgcatgcgtagcgtagcaaattgacggcgggacgtcgtcgtgtggctcgtgtgtgtacgtacctggcgtcggggaggacgtcctggccgctggaggagcggaggttgtggaggcggagcttgtcgaggatggcggtgttggcgttgtgctcgcagcagtcggcgatgatcgccgtcacgcgcccctcctcgtccgtctcctcgtacgcgttgatgaagtggaacgtcacgaacggcggcacctccacgctcgccaccttcggttggccatcgtcccgacaaatatcatcattagatcacccaaccaattaaataggcaaaacgggaacgcactacgggcggcagcgattgatgatggcttacaatcttgccgctggccttgcacatgacgtgcatgtagctgccggactcgaggtgccactcgaacttgtacagcggcgtgggctcggcgcggaggaggttcttggcgcagtagcggagcggcatctccggcacgacgacgtagtgctcggtgacggggaacgagtgcacccaccctggcgccggcccgccgcggcagtccaccctgccgacgaactgcctctcgttgctaccggcgtccatcctcgccaccacgtagccgggccggatcaggtcggggatcagcgtccagaactcggtgtcggtcacgatcgggtgcgccgagtggatcagcccgcccagcttgtccgtgtactggaacttgccgaccgtgtcgagcgtgtccgggtcgacctggatggagcccttgatggtctccgtgaggcagagcacgcggccgtcgccgagcatgacgacgccggtgttggagttgtcggtgagcgacgagcccgagaagagggtcgccagctggccgacgtaggacaggaagttgtccggcttgggcacctccgagaactcgcggtagcacaccttgccgtgcgcgcgcgccgccttgtacgcctccgactcgatctgccggtgcgcgcccacggcgcggccgccgcggaacgagacgcgcaccagcgtcgcgtagccgtcgaacaggtgccggaagccgtagtcgccgaggttccatagtcccgggccgttcctcaggtacgtgccatcctgcagcaagtatgcatcgatccgatcaatcatttgcagcacgtcgacaaatccgtccacctctaattaacgaccgacaaattaatctatccacgagcttacctcagaagattgcatttttaattagctgaaacgattgtattatccatagcttagtgagtgtaactacaaagttacaacaatattatactacatgtacacctgtattaattcctcaaatcaagtcactatcaaaattggcaagaacagtgataagatcacttggagttaggggagaccaaggtttttgacttttgttttcagagagttgcggggtgcaacaaaactgcaaccacaagacagtgatgccattgttgtcgccgatcgaagctaggggtgagcagagaatctgggtatatatgttgtgttccccgcaagcatcgtgagtgccaagatgccatctccttttcgctaggccagcatagggtaagttagtgtcgccctcctctttgtcgatcaaattactgaagatttgggtgagtgcttcagcaactgctggcacagtggaaattaaaaatgacagtcggcaagtaatataccctggcgtgttagatactgctggtaaaaatatgctaggtacgtggccaaagctggtacctttttaggacccttctggggctatatgcatatatgtgctctaggtcagcggttagcctgcactaatcaaggagatgctacaagatgaaaatggttaggttaattataaaggatttgttgcacagtgatgtggtccagaaagtgcctttcgtatttctcaatgtgtgggaagatgttgtgcatgcttttttactaagatgttcaaaaggatctttagtttatagatgatctcaagaaagcgatatggagtactgggaaacctttgaatcaaaataacagaaaagattcgcattcttgaatgaaaaatgcacggctagccttagcttgaccaccggcagatcttataaaatgctgaggttatggtgtgttcatgaatacttaattagggtggagagaaggcaaaagccaaatcaagtcatatttagggagatttgcaatcagtaggaggcttaacccaccagccagagaggcagctctccgtccacctcgagcgcaccctcccacctctcctgccgtacactcttccacgccacgagctcgccgccgcctccgccgccgccacgtccgccacggcgccgcggggcgtcgacggggcgggccggcggcgcgacgaccggcgcgggcggcgctgcctccgtcacggcgctagccgcgagaggctgcgccacggcccgcttgccctggtgcccctggctggccaggcggcccggccggctcgcggcgcctgacagcgccgcggatacgcacagcgacgacgcctgcagcatagcgggagacatggccacacctacgcgagggaaatgcacaacggtgtatataaaatggcactcgatcaatcttagcctctgctttgcgtagtgcagagagctctacgcgcgagaagagacaacaacgagcgatcaggaggagagacgggcggagtggtcactgtggtggcaaggatgagagattttggtttgggacgagaacgtaatcgggtcaagggcgagtatatataggccacaagatagctaagcccagcccgggtgacagcggacgtacgtaatgtggttggaatctcgcccggtcgaaattccttggcgcaaaaggcctcgcgctcttgtccggattccgctgtcacgttgcgcccagccgctgaggcccccccggccctctctcctctcgctagcttgctggtatccggttggtggggcgcgacgcgcgcgcacaccacggcatcgactcctccacggctccacctctcgaccgagcgaaatcaggtgtacactgtacgctacgttacgtggggcgtgggccactacgcacgtcgttgtcgcgtcgcacgctgcagcctgcaggagtcgtcgccccgggtcaggcccgcgcgctacgtaacgtccgtacgtacatcatcagtagcatgtgtgagttgcgatcgcgacttggcgggtcagggcggtggaaaaccagtggcccgggacggggggatgcaggtgtgtacgggtgaagagggttttgcgtgcattcagaggttaatcgagccttgctgaatggatcatccgatctgatagtttctttagggtgcgctcttttcagtttataggattagattctcctcgttttctgttagcacgttttcaaaccgctaaacggtatatttcgtgcaaaaactttctataaagaagttgttaaaaaaattcaataaatttattcataaaaaaattatatattaatacttaattaataatatgttaatcgtatttctcattttgcgtgcgactaaactgtccaccgccactgcacaaacgatcgcaccccagtcagtcaggtactctcgatttgaaccattcgatgttgacataaataaactattgttgtctagtgtagattgcgtggaaaattaatgagaattctgggatgaatcgacagtaattcaaagcaaacgttccctgaaatagtattatattagacggtcttccaagttttactgtaaaatatatgattgaatacacgttaaatgttatataaatgatgagcagatttatgttaaaatattgtgaaaagagaaattttactgtttctcgaaagataagaagagataccaaaatttttagtgcaaatttggtaccttcaagtaccggtgaaatttggtacttcatctagttaaaattttatgttagagactgtaaatcactattgcgaaaaatgatgctcatatgttgaggtttaaaatgtaataacttatagatgtagttgctatgtttatatgatgagcttttgatattcagtgagtttttttttgcgaggaagaccagatatattactcatttaaagcttcctcattcacaaactgtgaaatgagattacaagagccatctggccagaactcagaaagaaaattagtgcggcctctattagctaaaaagtggcttatgttattctggcatcgctgaactttctgaatgctgaccactctatcgcctgccagcagctcttctatgtccctgacaaggtaagcaagctgggacatctccctccctggtgactggatcatattgatagcgaccaaacaatccgactccataatgagcggcagcagagcccattgtagagctagattgatgccttctttgcaagccaaaagttcagcttcaagagggctgctacatctctccatagaaccgcaggctgaaaaaaatgacaaaatgacagagcctaaactattcctgagaacagcacctagacctccagttcctgaggttgcatcaaaaacccgtcaacatttaacttcatccatcctctctttttaaagtgggttaaagtggcatgcttatatattagtctttataatgttgtacgaataattactactatttttatatgttaagctttagatgcttattaagtggtaaggagataaagatacgtttacgtataatcatggatgggttgattttgtcgaaactaagcctgcagtgaaacttctgctgttcacatcgtgcttaccagttagaacttagttaaacaactccactattgttagcaatatataatgccacatctcgagtgacaatcctattgctgtgatcgtgccaatcggtcaaatgatctctctcagttttgatatggagaaaactgggtgcggagggtgctgcgcggtactataccaaccatagatgtgatcaatgtacgatagtaggatggaaatgaaaacatcacccacatacatgtattcaggcgtgtagtaaaggcaaaaggtgctactgtacttattattaaatgatgtatggttatttagtgcagattaagatttgagaaaaaaaactataggatcctttattaaataatatatggtttgcattgagacggtgattaagagtaaatgaggagaaatttaaatgtggtttgatttacggaacatattctactctaccgtaataactatttcgtggaaatatttaaatcctaaaagaatagctattcttgaactgaggtagtaatactccctccatccaaaaaaaacagacaatgaatttggacaacctcgtgtccagattcgttgtcttaggtgatgacaccatctatattgtttttttttctaagacggatggagtccttagccagagagctttcatcatgattcacaaagtgcatgtatggtaacaacttttaaatctgctttgctagcttgtactaaaatatttgaaaagacgttcttgcatgtgtgcttggtagttcactactgctcgtttaagttgggctgccgaataatttggtgagacaggtggacggtgcacgagacaaattgattgcaataaaaccacctgaaaggtggtcatacagtacaccataagtgaatagacaaatcagatttagtgaacaagaaatatatataggaacaacatatatgatctgtacagaatataattggtgtgggtgcaaaggttatcttgcagctacaattatttgtttgaaagagaccactagtttaaaaaggagaccctgtgacgtgtcccaacaattccatgctctgctttgaagcattgcagaggtgccggatgcttcgaaataagcaagccaaacttctgactaataacatataagatgccagaaatataatgacaaagatctagtcagggaatatacctgattcctgtgtaggcatcgacatcacattgcatcgtgccaagttgcccaccaaaatgatagctttcttacactaattatcagtctagtggctatcatttttctaacacttttttttatttgatgctgtttgactacacattatggtctctaagacgtgatcagtatttcactcagcaaaatttgatgatacaaattccaaaactgccgatggaaaaggaggaaattcacttaaccacatgtatatgtgagttgttttacagaacatatagcgccaacatgtccgccaccacctggacaccttgattgcatcacagccaagagattgctaatttggttccagttattcagatgtgatcctctcgtagcgtggctaggccccttcccgctgcttagagtttgtttttagccgccgtagtttctctagcttcagtttttttattttactttttctcccttcccctagtataagctggtctggctaactgcgtggtgtaactaaaactcttttcgtttaatatattgacgtgcaattcttttacgcgtttgcgaaaaaaaagtgatcctctcgtctccttgatacccatcggttgcttaccgctgaacataatccgtaattacttattaactataaaaaataatttattagtaaaacttttgtaggcgccttgtatggtggagcattgaatgaattctacgtgaattaatggatatgcatatgagaaattagcaagctatcaaaaggctttgtttcatactccagcaatcgctggactgcagcttcgccgggcgacctaggttgctgaattgagctgaatgtcgagagactaaaacatctccaactttatctagcatctcgctaattacactagctgaggcactagagttcgtttgaaatgaatttcggagagactacgaaagcaaatactccctccgatcataaatgttctggacaagattcaaacaaaaatttaaaacattggcccttttatgtgttatgcatgttctaatcataatgcacctttcatgtcgtcattgattcctttatagccagttcatttcgtgtgtgagatcaaggttactcccactactacgtagaagatttttcttccatgaagtgtgaatgttgttgtccagatatgattggcagatattgctttgaaatttcgcaaagtgataccaaacagtgaaaggaatctaaatttacttattaatattattaatatgttggaccctccactgctactagatagtataacgtataagtagggtcatacttaaaactaggtagagcctataaaagcaacatgctttaatttacaaaataacacgacgtacatcattaccaacggttcatgcaattttgttagagtgtattgaacacctttgttgaataaatgaatggtctaaaatcaattaaaagtggcaattgtggacttatgtagcaaatcaagtgccaaagttatcgaagacaataattacattacagtatgggacatattttcttgaagaaaactagacattaggttactgtgtgacacaagacggagtatgctcaatatatatgctggcaccaatcggacatggatttttattaaaaaagatcacacatttttagtttttaaccccatcgatttttgtttataaaaagtaattattacgctttgaagagtcgcgcgcatgactggtcaaaagcgtcaaatataagttttgagaaggtatgtttttaaagttatcggaaaagctttaaaaataaaaaatatcatacatgctcatgctcctaattaatgtatggcaatagtttcagctatttttttaatataattttgcttggctagttcgcacaaaattatgtacatgcctaatttgtacaattggtgattatgcagatatgcagaaatatagacatggagcatcagagcatgagctttttcacgtacggctcttaaaaaggtattacaaggtacattagttccagaattgatctggatgcggtgttatgcttccacctagggactaccctcgagatgcccgaagagcttcatgcttcttgacccgatgcgatccacgtgccacggctcaaagcgactctagccaaagatgacaagttgcgcgagggggcatgtggttgcccggggcggaacatttactatggggacctggttcttatgtcaccgacaatcttattttctagtgtcaagtgatacattacgctagaaaaacaaggtatcttcctagcccattgactgtaaatgttgcccagagcatctattgtgcttgtatgaaatcaatgtattctatgacttgaaccaggtatggcctataagccaatggcagtatggcacacatttttgaacaatggtgttagatgataagaatagttagctagatagattggttcttatcttcagtttgttgtaactaacagagagataggataagatctctcatcctttgtatgtaccacgctaggggttattcctagcctatataacacgcaggcatacctgtaggaagggtatcgcttccatcacatggtatcagagccttccaccctccaccaatcaatctttcaatctaatctcccaactcccgacgcaaatggcgtcttcttcctccaacccatctgctctcaatgggcagacagtttctgagaagctcaccaagagcaacttcgtgctgtggaaggcgcaagttcttgccgcgctgcgcggcgcacagatggccggcttcctcgacgggagcaatcaggcaccggctgcaacgatcatcgtcaccaaggacgatggcaagaccaccgagaaggtggcaaatccggcgctggtgcaatggaaggcgcaggaacagcaggttctcagctacctgctgtcgtctctgtcgcgtgaggtgctcactcaggtggcaacactcacaacggcggcagatgtttgggaggcaattgagagcctcttcgcatctcaatctcgcgcccgcatcctcaacactcgcatggcgctctccaccaccgtgaaaggaaaccggagcatggcggagtatgtcggtaagatgaaatctcttgcggatgacatggcttctgcaggaaaactagttgatgatgaggagctcatctcctacattcttgccgagctggatttcgactacaactcggtggtctcgtcagtcacgggacgcaccggtccaatctctgtgagcgatgtctatgcgctcctggttggctttgagtcgcggctggaacttctccagaacgcggccaatccttctgccaacaccgcgtcgcgaggagggcgaggcggacgcggtcgtgatggcagagggcgcggcggcggcaaccctggacgtggcggcggcttcgggcgcggtcgtaatgacggcaagcccaagccgacgtgccaactctgcgacaagatcggccacatcgtcgccaagtgctggaagaggtttgatccctctttcaccggtgaagagaagaacgccaacactgctgcagtgaactcctacggcatcgacacgaactggtacatcgacagcggcgccaccgaccacatcactggagagatggagaagctcatggtgaaggacaaatacaccggcaatgatcaagtccacaatgctagtggcgcaggtatgaatatcgatcatgttggtcatactgcaattcgtacccctactcgtgatctaacgttgaaaaacgtcctccatgttcctgacgcatgcaaaagccttgtttctgcccatcgctttactcgtgacaataaaacatttgttgaacttcatcctttcttctttttggttaaggatcaggtaacgaggatgccactccttcgaggcaggtgtagatccggcctctatcctctgccaacagacaagctccaaaccatctccaacaagcaggcttttggtgttgtcaagccctctcttttccggtggcacagtagattagggcacccttctttttctgttgtcaatcgcgtcattagccaaaataatcttccagttgttagggattctagtcaagagtttgtgtgtgatgcttgccagaaaggcaagagccatcagctaccctaccctaagtccagtagtgtttctattgaacctttgcaacttgtgttttctgatgtatggggtcctgctataaactctgttggcaataaagtttattatgttagtttcatcgatgactttagcaaattcacttggatctatctccttaaacacaaatctgaggtttttgccaagtttcaggatttccaaaaccttgttgaacgcttgacgaatagaaaaatcaaagctgtgcagacagattggggcggggaataccaacgtcttaattccttctttcagcgcattgggattgaacactacgttgcctgtccctatgcgcatcagcagaacggttctgccgagcgcaaacaccgtcacatcgttgaggtcgggctctcgttgttagctcatgcctccatgcctctcaaattctgggatgaggccttcaccaccgctgcttacctcataaacaggaccccaaccaaagtgataaactttgagacccctctacaacgtctgtttaacctgcccccagattattctctgcttcgcaccttcggctgtgcctgctggccgaatctgcgtccctacaacgcccgcaaattagctttccgttctaaacagtgtgcttttctgggttatagcacgcttcacaaaggttttaagtgcctagacatctctacagggcgtgtgtatatttcccgtgatgttgtctttgacgagcaaatctatccctttgaaaaacttcatcccaacgccggtgctcgcctccgggctgagatcaatctcctcccggtgcatcttcttccgctgcttgatcacgggggtgtacagatgcatgatcaaccgctgattgatgattctaatcctgctaatccaattattgagaatagtgcaggcagcagtgcaggcaatggagcaaaatcaggggcgcagcacgggcatgatttcatgcagagttccggcgggcaacctaccggcggccatcatgactctctgacgcacagtaccatccatggcacggataaccaggcggaccaggagaactcggcgtcatctcgatctgcagaaccggtcacgccgcgacacgcagcgagtccctcggccgcgccaaccgcgtcgccacacgcggcagccgcgccaatcgcgtcgtcacacgcggcagcctcgtctccgtcgggagacattgtgggaccgggttcacatgggccatcgcaggaggatcaagacacgtctgcatcagctcctgcttcttccacatctaatgatgatgatagtgctcagtttgccgctcagccgactcgaccagtgaccagagcacagcgtggtatccacaaaccaaagaagtacacagatggcacagtaaggtatgcaggactcacacatacaggagaactaggtaatctccaagaggctttaagtaatactaattggaagtcagctatggatagcgagtttgctgctttagtgagaaataaaacatggcacctagttccaccaaagcagggggtgaatgtaatagattgtaagtgggtctataagattaaaagaaaggcagatggaactatagatagatataaagctaggttagtagcaaagggctttaaacaacgttatggtattgattatgaggataccttcagtcctgtagttaaggctgctactattagacttgttctgtcactggctgtgtcacagggatggagtcttcgacagcttgatgtacagaatgccttcttgcatggctatcttgaagaagatgtgtacatgaggcagccaccaggatacgaggagaaaaagatgccatactatctctgtaagttggataaggctctgtatggcttaaaataggcacctagagcttggtactccaggttgagtaaaaggctacaagaacttggttttgtttcatctaaggctgatacatctttgttcttctataataagaagggacttgttatgtttctgcttgtatatgttgatgatattatagttgctagctcttctggtcaagcagttacagttttactcaaggaacttgagaaagattttgctctgaaagatcttggggatctgcactactttctgggaattgaagtaaagaaaactgagaaaggtctgctgttgacacaggaaaggtatgcaggtgatattattaagagaactggaatgagtaattgtaagcctgtgagtactcctctctgtgtgtctgaaaaactgtggtcaaatgatggtgaatttttgggtgcaaatgatgccagtcagtacaggagtatcgttggggctctacagtacttaactcttacaagaccagacatatctttctcagttaataaagtgtgtcagttcttacagaatcctactattgtacattgggcagcagtaaagagaatacttagatatctgcaaggtactcttggtctaggattaaagattgacaaatccctttcttatattgttagtgctttctctgatgcagactgggcaggatgtctagatgacaggagatctactggaggttttgcagtatttctgggatcaaatttgatatcctggagtgccaggaagcaagctactgtatcacgctctagtactgaagccgaatataaagccttggctaatgcaactgctgaagtaatgtgggttcgtaaattgctagaagagattggtttgttgcatccaggaccttctcaattatggtgtgataatattggagctacctatttgtcagcaaatcctatgtttcatgctagaacaaaacacatagaagtggattaccattttgtcagagaacaggtggcgcagaaaatgttggaaattcggtttgttccgtcacaagatcaaattgctgatggatttacaaagcctcttcctgtgagacaattacaattgttctgtaacaatctcaatcttggagaattgagattgagggggagtgttagatgataagaatagttagctagatagattggttcttatcttcagtttgttgtaactaacagagagataggataagatctctcatcctttgtatgtaccacgctaggggttattcctagcctatataacacgcaggcatacctggaggaagggtatcgcttccatcacaaatggaagttttgaaaagagaagagaataaggaaaatgaggttatcatgcactaacactaaccagtagccggcaattactcaacaaattgaccggtggagtctgcaatgcatgcatacatcgatacatagaacattaatactgcacaaacaacacaagtgacggcttggtagctaatagaattttggttgggaaagaatcttccaatgcatatggatcccttaccgcccaaagtgggaggagctaagctaataagcccccagataggtggggaaaagagatgccacttatgcatggtttcgtcgactacggcaatcatgctgtttaactctgcccgcccgtcggatcgtcagatcgaccttttctcatcactttctctggactccgaccacagatttgccgtgacgcgaagtatatatcattaatttttagtttttgttctacacacattggaatccaatgttgagaacccatataatattgatgtattattggtcactagatcttggcaaatcagctattcgcaaagtgactgggaaagtttcgcatgtagcgtaaattttgtctcctttcttccttttccgcatgactagagaagcgtttgatgcataggagatcattctccaattgacagaccaacacagtgggcaaacaactatatatacacacgattgattggagatcttcagtggaacagacgtaattattacttgaggacctcttcgatctaatagaccctcacgtaacatattataggaacccgttcataacgtgtgtaatggtgctacatactccctctgtactcgtaaagaagtcgttttggatagcgacacggtctccaaaacacaattttgatctcttatttctataaaaaaatatttattaaaaagtgatacatgtatacttttatgaaagtattttttaagacaaatatattcatataatttttacattttcaaactcaacaacttgagagttattcatgatttatatttttaagatttgacttaaacattgtcctaaacgacttgctttacgagtatggagggagtactagtacaggtaactctgcttttttttattttaatttagatggtgtagatcctacaaactctcgttatagaaggtatccacttttctttttgagttataaacctctcgttataacctcatattcttttatttctgtattacaacttattgtatttatataggtcgattatataaaacatttctattatatattattagaaaaaaatagcggattgtcatgtgtaactttacacgaggctagctaaaagtataattggatttggtttacaattcttcacttttgattacataaatataattgtaattcatatacaatagatttcaaaagccaaatatattttatatacaactcttagcatatatattttttatagatataattatactttcaaaacaatagattttttttaaagtatgattggattcacatacatctcttagattttgttttcataaatgcaaccacattttctataaaactatattaatcaatcgacaccgttataatttaggtcaataacaacttgacaactaatatctttcttttatcagattaatgtgataatgtttaggtctctaaagcgaacatgacgtctttcaagctatatttatagtaattaaaatagatagatagatttattgatatatatgaaacgatcataccttgcatcaacccctcagatttttcgaagcgtagtgtacttcctctgtttcatattataagacgctttgactttttcccatttaaatttctacaacgtcaaattagtttcattaaatctaacattagatatatttttatagtatatttttttgtgtaaaaaatgttgctatgttttaatataaattaagttagaagaattttttacttaaaaagaaattgaacaacgtcttaatatgaaatagatgtagtagatgttaacactggacggatagatagatcctacctatatgcattttatgtcgatacatttctcgccatcctctattttatactccctccgtcataaattatagggcgctattgtttataggaaaatcaaatttgatacattttgactaataattatactaataatatctatgcgaagtattatgcatgttatatcgctaaatttatattttaaaatattgccatgtagtgctaattttatatttattggtaacataacataaaataaattaatgattaaaatatatcactaaagaccgtgtaaaaattttataaaccttataataatttaggacagaggggtattacatatgtaatgatagaattaacgtatgcagtgtgatgcatggaaagtttatcgccatgcattcatgtcgatcactagcttgtaatgtaaccagtacttcagtcggagtcttcctattcaatctccaagcacaagcatcttccttattcttcatccctgtggccaggagcttgtttaacttgtgtgcgcgcgtgtagctcttcatttcctgcatatatttgactcgtgtagttgtatatatactactagtagtaatacactttgagtagtacttattgtgtatatctatcatgtctcgcgctgtcagcttcgtgggacatgcatggcttgtctttggttgcatgcgcacttggcgcacacacactgacatacccgtcagttaaaccgcgcgctattatctatcatccggaaattgacactgtttttgtctgatcacgctttcaggagactaaccacacttatgatgacgagagcaatgcgattttgacatgttgctcgtctggatttagcttgcgacccaggagctatagcagctagagctagctacacgactagcgctagctagtcagcactacatggaaggatcttgggcctgcatgcgctttcttccctttcacgatggccattgccgcccttttcaccagcagccatcaacaagggggcgtcatcgatccaggagtcggtcaaaaagacacacaccagcactgcagcatcgccggccggtgaagccagagagagattggacaccttcggaatggcaggcagctgcacgcagcagggagcatatctgcgtttgcatgctaacgctagctagctagggagcgcggaatataccatggctggcatgggtgcgcaagcctagcttgatagaggcatatttgtactccagtacacaggagaagaaaaatgtatgtgtgcgtatatacaaatggagcagctagcagaagcaatttggcaccacatatgtgcggctggcgattgcatgattgaccgatcgatggcgacagcgcagggcacgacatatgtgctcgttgtagcggcaccgggtatcagcgtgcgggagcgcctttgatccctgcacccgccattgtcgcttcgcacgtacactggcgtactgccaatctgccatgccggttcgccggtttcgggatgccagccagatgcctccagtatacgtgtgtgtgttgtgttctccgcgggaggatgacgacacggcgacgggatgaaacgatcaaacgagcagtttgtatctagtgaaacagatcggtgggctatagagctcccacaggcgctgcatggagtattggagtacgtggtggtgctcggcgcattcgatttgggtgcaatagcacggtggccgttctggccttcgaggcgtttgatcgatcgttcgcttggaaaatatctattgatggtatttcttctattttaaaatatagctatttcgtattggatttaacacactgattttaacttatgttaaattcaatactaaattttttttagataatggaataaatataccggcctctactcaaaagagctacagccaattattacatagaagcgtttgacgaacatagtgtaaatctaattgaatagaacacaccgcaagaaacaataaagaatccagtctaacataaggagattacaattattgaagtctatttgtaaatctccaaccataattggcaaaaagttgcataaccgtagtctcaaacttccgacatgcaactttcagaaactcttcatcatcttcacacatttgtagttgtgcccaaaaccgaagccaatgggttgctctgaaaatgacctgcatataggaaaatgatggtgatttgtcaaaatctatatcgttcctactcagccatattgcccaacaaatggtagaagctccaacaagtatcagtttactcattttattatcaactcccaaaagccacccatcaaaaatataagatacgctaactggaagattaaaaccaaaagagaactgaactgctctccacagaaacttcgcaaaatgacaatcgaaaaagagatgttgaatagactcattcttcaaacaaaacgaacacctcaagctgccattccaattacgccttgccaaattatccttagttaacacaacccctttaaacaagtacaacataaaaattttaatcttaagtggtatcttaagcttacaaatgcacttattcctgtcaatataaccattattaattaaagctaggtacatatatctcaccgagaacaacctattctgatggaaattccatctaaaagtatcagatgaatcattcaattgaatatgtactatagaggaacataactcatgccaacaatcaagattttgaccaactaaaactcttctgaaagaaacattaagcggaacagaacccattacagtagcaatagaagatattttcctacgagcaattgcgtacaaagatgttttcctcaattaaattcaatactaaataattggatgaagtataatttaataggtacacgtacacctagctggtaatcatttaattgaggttataaccaagatttctttcgctgagctgagagcgttcctctccagctatcctctaaaagacgtgaaagatcagcatatggtttttctcactagctcgcacgccattgcggcgctactggaagcagagtggcagagcacaagacaaataaaaagggaacccaagaggctgtagtgcaggtagacagaaagccggagaaccggagcccacccaccacgggggcgcagcttgattgggcgattggctgccatgcatgccatcgtccaagccggtgggccaatgcgcacgagattgggccccccatgatgcggaagtgggcagcaacagcgagctagctatggcccatctagcgcaatttggatgttagccctcctagtatctcaacattgcgttggactggaattctggaatcagcagtggctcacactcatttacaggccctttcttgcgttcaaaccaaaatccgagtgatgaacggcaaatctgaaataacgaactgtgaaaaaactagaatattagggaaggacctaatatcaaataattaggaggagtgaggctttaaatccaagtcgtctagcccaccaccttgtggagctagccggaaaacccctgggcatttctcagtaacgaactgtgatatggctggtagtactactagtacttcccatcctgccaagaaaaagttgtactagtactagtcctatgggagcaaaatgcaaggcaatgtttgacctaataatgcatgttcctaaagtttaactagtttaggaatagcgtgaaatgaaatgagcgctgttgaaactagtggcaccagatcaatttggcaaaggcagcagtaaaatgtcaattccatgaaactctattggcggatatgtaattgatgacttttgatcttgtagaaaccgattaacaagcagcaggtcagaatcgagctcagttcagtggtgtcacggtacaccgacgaattagtacgtggtggcttccagtgtgaattgcagttcgtacttcgtatactattcatatgtgaagatgacccatagtgaaacctagatccgcccctgattagcgttgtgggtaactcatataataaagatgttgaactaacacgctcacttgaatctagctagctagttgcagcaaccttcatccccaaaggttgtatgtgtttgcatgcatggatgattagcaacacactgtgccggacggtgccagtctctatcatttgctacgtacttaagttgacattagctagctaggcctgtaggccagatcaaaattcaaatgatgtcactgaatattgtggagtaggccggtacttacgatgataaagtagcatagtcataaaagatttacataaagccaggttcttttgtacaaaagcagagtaagttatgctcccaattattagattctttggtatagtaataaaggtatggtctttgacttggcatatctgtggagataccgacggtggaaaacaaaggacttggttgggtatagccgtataggtatatgctgatagcagaatctgcccaatttggaattgtaccatgaatgctacccgcactattaatctctgtgctattctctagaacgtattatcggtcctccgttctgcttgagaggaaatagaagcttatgagttctacggctgcttaagctgtcaggcaagcatctaccactaccagtaaaaagaaaagttgaaatccgcagtcaaatgatgagtggcagttcaatcattctgctacttggcgtctggcgccaagaataagctctagtagctagctagctagtcagtgcgttcggatgctactagctccgagtagtgagctcgtgacgaaggcgatcaacaaattggccaaatatggccgacatcgtgacgtttggaagccaagaggtccgtggatttccctctgacagcatgttgtcttggttggttagtccttgtaagagcttaagcagcagtttagcggtttatacagcatctatctatagcagcagcccgcaggcttctcttcaggtcgggcaacttgtgtggcttccttgatccatgggccgtttagccgtgccgccatctcggccgtcttccttccgaatagcacatctggcccatcctgcagacagatatgggccttcaagcggcgcacgtggctgggaagtggaaaccgtaggaaaagttcactctatatccctcatattgctgtccagtttcaaaaacttccatgaaccacaaaaccggatacaacacaccccctagcttacaaaaccagtgcacacgagatcctaaggtggtttgaatggtggttttagcttatgcggttccaacgtagcttgtttgactaggattatgtcccacgtgacgattgcgtggtattatgggtggattttttaaaaaaaataaacagcaagacccatatgttagtcacaaggggaaaaaatgaaaaacacgatggggccacatatcagcgggttatcggataaaaaatatggacccacatgtcatcaactctccatctccatcttatctcctctctattccttttctctgtccccccatcttatctctattccttttctctatccccccatcttatctccctctacaggttgtgaggccggaggcgggaggcagccccgtcgacctctgtcccggcctctagggagtcaacggcgccgggagctctaaaggtcgacaagccaacaatggaggagcttcggagcttgacgaggtggcgtcagggcacggagcttgagcggcggatctggtgaagggtgctggtcggccccttcctcttcccctcatcattgctaccgatcccttccccacggtcccgccaaacaccacctccgtgacctcgacgcagctggcgtcatctctttccaccaccaccacatctagatccacctttgcatgtgaacgcgctgatgaagactagaggggggtgaataggctgtccctgaaatcttaaaaacaaatcgcagcggtaaaattcaaacaaacccgaaactttctggtaaggaactccggaacttccggcctgccaggcccggaacttccggtgttctaagacaggaacttccgggtaacaaaacagagatgaaattcaaatttcgaaacaggagactaagccaatcttcacaagatggtgcacaagtattctaagcagaggatatatcacagaatcattcacagaaacatcacagaaagagacaagagcgattttttcccgaagttcggatcttgcgatcctactctccgttgagaagctccaaagatcttgtgcaaaaaccctagaggaaatccacagtcttcaaccccaaaaacccctaggcaaatttctagaattgagtgaccatcaagatccaacttgtcacgcccagaagtttccccctttttccttgctttaaatatttgttaaataaatcgtccgaagaaattatcttaattaacctagagctaattccataattaataaatgcaattaataatcagaaatagcgtggtggaattttcttgagttccccatgctccaatgcattaacaagattttagtggaattttcagagccttggaaataattttaaccaattaaaaatcaccaaagtgcaatatttaatcccaggaaaatccttctcctctttttcttttcttttccttcctttttctctagatgggccgtcggcccatctctctccccgtgctcggcacccctttcctgggccggcccgctcctcctttcccctccccgaagttctccctccctccctttctctttcgggcaccgacaggtggggcccacctgtcggtcgacccctacctccggtcgttggagccggagctacaaccgcccgcgccgccgccttatccgttccacgtcacgcctacactccgtgcccgcacctcacgcccacgtgacccgtcctctcccccgcatctcccgcgcgcgcgcgcccgcaagtggtgggggatttgaaatccccgaacaccctctctctctcctccacctctccacgtcgccggccaaataggggccatccccggccgtttccgcccctccctcgccataaaaaccctcactccagctctctctctcatttcccccattcaccgtcctctcccatgccctctaccgccgtcgcgccgcgctcgccgagctccgccgccgccgcccatctccggccgcgtgccgtcgccactagggccgccgccgcgccaagccgccgccgccgctagctccgccgccgtgtgggccatctcggccacctcctcgtgtcgccggaaccccaccggaaccccatctccctcgcgagccggtgagctatccattcccctccgtctccggccagccactttagttgtcgcggtcgccttctccatccctaactcctctcctcccctcctctaggtgtcgccgccgctcgtccgcccctcctctcgtcgggtcgtcgtcgccgccttcgtcttccgctccggccgccgtgtcgccggtgagtcctccctccccctcatttcctcaccttcccgcgagcgccagccacgccgctgctccggccatgcgccaccgcctttcggccgtcgccgccgcttcccgcaccgccggtcaccgccgtcggtggccgtgcctcgccgccgcctcgccttggtcggccggtcggccttgaggcagagccgagcccggccggcgcctccctcgcctcccctttgagccaccgcctggtggggcccacctgccaggcgccacctccctccctttggagccgctgacccgtggggcccacgtgccggcgcccccctttcgctgacgtcagccctgggctttattgcgcaataaaatgattaaggctttttctttattagtaaaaacacagtttatcttctaaaattcttaagtaattcatccgagctccgtttaagtccattcaagtctcagtaaatcaagaaaaatgcaaagaatccattaaaaatggttttgtttcctgtttctatagtcttatagcatgttttgcttgtgtgctttgtttgtcgcgtaggttttggccgtttcgtcgatccgcggtttctcgaagacgttgctgaggtctcatcagttcgagagcaaggcaagtcatgcaatacgtttgatcatattgtacccaatttacaaatatcccgcatttctattaaatgttacattcttttacaatgtaatgtgggatgggtcctattcctcagccacatattggttaccttatgccattgataacttgggtatcaaaatgactagatgttggcttaggaaatgcttagccatgcttagttcaactagtacacaaatggggatcacattattacatagactctgactattggcatagctttggattggtgccaccgcaagggtgtcagttaattaaaatattctgaatggcgggttgtgagtgcatggttttgctggtcgcacccatggcagttaaggaccggttcacgggaaaccctgggagacttaccgtgcttaccacaagcgggagtgggtaactgcttgatctgaagtatagctcgaccctttcctaggcaccggtggcgagggtgggcgtgatggagttgggtcggccgaggtgttcggttgtccagctgccggattcaccgcggcgcaagaggggaccgcccactgccttttgaggggtgggggtgaaaccttagcgtggtgtggatggttaggggagggttatgtggagggtcttgtcacgatttccccctttgcagtatcatggtgatacttcggggcatggcgacatgtgtagaatcgtgtcttgtgggtacagttgtacacctctggccagagtaaaactattcgaatagctgtgcccgcggttatgggcgatcaaccagattcaccgtgattagtctcacccctagtttagcttaatgaactggtgtagttcaagtggttggttgggcctgttgcaacgtggtgtagcgttggacagtgattggttaatattgattaattactacagctgttttactgctttcaactactgctttgaaatgcctgctttatgcaaaagaacccctagcttcctttggtttatcctgcatcatacctcatcttccggtatgacttgctgagtacagtgggtagtactcagtcttgctctcttttcccccacaccagagttgaagttcttctcagttggagccgtctcagagaggttggtttcgttgctgccgtcaaggtttgcctgtggagtggagtcgcccgctgctgaagtcaagcttcccggtttagctcgctttaatctttcccgctgcatttgtaatcttttatatttttgtaagacgtgggtctgtatgtcaacaattgtcgtttgtgtaccctggctggtcctggacagggatttaatgcacattcagcttagaaattctggttcgagaatttctgggtgtgacacaactcaacctacttctagaaatccaccacaagtgtgggttgctctacttggaaagcctctagaatctcagcacaagaacttcactaacttacctcattccctttcggaggagaggaaatccttcacaaacttacccgggacatccacaatatgcaacggattctcgcgagcgacacctaaccgtctaggagatcatctccaagagtaataagcaccgagatgacagcccatgagatattccaagtgctcacccaagatcctagtcttcacacatctccaaatcttcttctctccctctcaatctctctttctcacaagaattaggctctagattgagtggagaaggcaagaaacacttgggagaggctagcaatagctctaggtttgaaaagtgaaagtggaatggccaaggaacgagctggaaacgagctgtacatgtataatggctaggtaatgtcatctagccgttactcacaaatttgaactggaaacaagacaggaagttccggacctagaagaccggaattccggactacacttaggaaaatctttttcacaagaccggaacttccggacctggaagacaggaagttccagacttgcatttttggacagatggagtatttgcaaaaaaaaaaagaactcctagggaaacttgacacttggttcacactaagagcacttgatatatctcagagcatcacctggaacccctcttaatagtacggtttttcctaaaaactcgatttcagaagataaactatcctatgcacttcttgagttccggtccgctttgattttgtactttttggggggtctccaagcatccatcttccacaccttggactaatgcacctgaaagctactcaatgagctcattagtcccttaaccacatttgtcattaatcaccaaaacccactaggaggattaatgcactttcagcatggttgttactgccgacgcccaaatcttgcgactggccggccaccgccgttcgtcagcgacgaaggtgattgaggctgaccatctcccctccaggacatcctccacatgctccgctggaaagttgccacacatgccacaccctcggtggctgctgttgggtcatctcgccgacgatgacgttgaggtggaccgtgtacaccatcgtcctagcccggtggtcctgacggtcccgttgacctctgtccaatgaggaagaggtggaacggcaaggactacttcctccccatcctcccacgcgtccccatgccgtgccatgattttgacacaccacttgtgtcgttcctatgtgagcgatggtggcagcgagtgtcgaccttgccatcgggggtggagagaagctcgcctccaccatacatacacgtcaggagtgtggaggagcaagagagggggcgatggggaagagattggagagggggaaagaggaggaagaccaacaa

SEQ ID NO: 27503 - DNA, 9977 bp, Oryza sativa
tgggtttcttcaatctctcttcagctttactggttcttggaagaatgatgaagcggcgacgaaatccctcgcgattgatggctactccgggcctctgtttaaagttaagataacgagtggtgaattgtttctgcatgagagcgttaagcgcgcaattccacatagttgggatccttcagcattggctaggtcagtaggtaatcatcttatttgactgatatcagggtccagttctgatcattcgcatcttacattgttctttgtatgctgctgccattgtcatataataacaagctcctcttgtttcatatctcttcagctttatcgagaactatggtacccatattattacttctgttacggttggtggtaaggatgaagtatacataaagcagcattcctcatcccaattatcagaattggagttcagaaattacgtcaaagaaattggaagcgagagattctcagatggggatagcaagttaaatgcaactcccataaattacagtgagaaggttagctccatactgatatttctatttaaattaaaataaaagagggagatggcccacctgtaattgctgataataatagaagatcgtcatgagtcatgaatatcctaattagttacctggaaggctgtatggtcccttctgcgtcgtggctattttgtctacatctttgagaaccacctgaagtcatctgcaatgagaaattagataatttgatatcctaattttagctttttatctggcaaaacatcctaattccagcttgcaaaattgatcaacattttttatcccttatgcaggatatgacagtaatcttcagaaggaggggtggttgtgatcttgttcagaattttaatgattggataaaaactgttcagtcagcaccagatgtcataggcatgacatttctccctatcgtctcacttgtcggtgatatgcctggaaagaagcacctcgctcgtgcaattgaactttatttgaaatgtaagacacgcttctgattcccttgttttgtcagtatgctcatagtgtgctttgcctacttttaacatatagtttaaccccctgagctgttttcctaaagcactatcatttctgtatcaaagtccctttgtagttggccttcgtgttttagtaatgatcatctttttttcttctgtgatcaagatcaacagtttttccctacaatgacaaagtttagtgtgactaagttcatacggtagtggtgcttcacaaagacagtactgttactgtggataactgttttcctgtgtcttttttttctttctgttggactgagatattttcctggataaatatattacatgttggctcttcaatcatgctgttcttttttcactacagacaagccccaaattgaagagttgcagtatttcttggatttccaagttcaactagtttgggctccagtaccaccaggtattgctggtcaacatagaaaggagcctgtatgtccatcacttcagtttagtttgatgggcccaaagctctttgttagcactgaacaggtaaaaggataccccacaggccctttcttttacgcaagtacattagtgtgataatttccttttctagttttgctgtaagttggttaatttaatgttctcaccagctcctaccctgttgactgagtctctgaggcaaagacaaccataattttactttattgccttataacctcaagattatacatttacattggatgaaatatacttttgcttggaagttatgaaaaagataaaataaagtgtttttaagacaataaattctgaaaccaatgtagcacatgctaacatccaatgaaatatatgcagatatctgttgggcgtagaccagtcactggtctgaagctatgcctggaaggagccaaacagaatcgtctggctattcatttgcagcaccttggctcattgccaaaaatatttgtacctcattgggattcccatatcacaattggaccgccaaagtggcaaggccctgaagagcaggatagccgctggtttgaaccaatcaagtggaggaattttgctcatgtcagcactgcgcccatagagtacactgaaacaagtattacagacctatctggtgtttatattgtaacaggagcacaactgggcgtgtgggattttggtgcgaagagtgtactccatcttaaactcttattctccagagttcctggatgcacaattaggagatcagtgtgggaccatagtccatcaagttctttggtccataggacagatgaagcttcatcatcctctagtgataatgctaaacttgtgaagattgttgacatgaccgagacattgaagggcccacaagatgcacctggccattggctggtaacaggagcaaagttgggggtcgagaagggcaagattgttgttcgtgcaaaatactcgttattaaactattgaccaaatgttgaaagcattcattcattcactctgctatgaagcatcctgtttaaagatagcatatgttcttttgttcatcatgtatggtttttaatgtaacatcatatggattcgtgcttcttgttgattctgtgagggattagcgcctagatgtttgtgtccgattacaaaatatttgacctggtctcagtgatctgttaaatcatctctgtgtggcagtagaagatgtatattagtataaatttttgaattggtattttgttatgcgaagtttaacccagtggagttgaactgggcaatgctttttttccccttgtgatatcatgatatgcaatcaacattttatggtgcttatcaaattctatgtgatctgtgcatcctgggtgagaaattccttgaagttaagccaattttatctactgcgtggcataaacactctgatggacatgatgacagttttgtgaattctgcagatgtttggcaaagttgaggcacagcagctgttatggagcatcgatctccagatttgttctgccatttatagcgtggaccgagaaatgcatcactatcttttgtacgtttgtgcttgtgtcagcaagcctagtagtagatcataaacaagctgttgatgttgtctcccgttcatttggaagcctgtacggctgtacctgtctgttgcgatgcattcgtcctggaagagaacaaagtaagaagtggtcgccatcgacgtaaatacgaggacgcatgctccttcctgaattctgatgcggcttctacttctgccattgcaataatctttttggtattatggtatatgattcggtggatatcagggcagcttccaagtggaacgaatggaagctattaaaatcgacttcttttccattttcctcccgtttggattttttttcctaagcaaccatttgcaaaatactttctccagcccttttttaaaaaaaaagatcgtgtagaaacccgaacagaatttcttttgagaataccaatatcagcatcttgactattcacggttgttaggaattaagaacatctgctgtgttcaagttggggcagttatcaagtgattccattcgctgatcccttgtgcgctctgacttggtatttccgcagggacattcttggcgcctccgtggaatgttgattagtttagtggtgatgtcgaaggagatggagatccaaacataacagcgacttagttggaagttggaactggtaagtagtgcactagtgctcaaatcatttgcccagatactgtatgtgaacaacttaaaaatgctttggtttgatcagccatagcaatacacgacattgccatagatagtgtcattttcaactctgtcgttcattctgaagttgatctgttacgtgtaacatagaaggaaacaatttcgtttactttttttttaaaaaaaaggatataagaaatgaaatcatcttatcttcttttttctttgcaaggagaaatatcttgtccctggaaacacatttgtatgaatgattctctggatggcctaatgtgtacatgcaaaaccaactggaaccagtggcaaactaccaaaggtaaatgcaagtgtgaacggatgaagctaatgaaatttttttatgtactgaatcatacacatcgaccaagttatgttaaagaaactgataatctaatacgtcatctgacagctgcaaatcatacacatcgaccaacttgtgttaaagaaagaagatttctctatcctatggcggcctctcttattagttttataaccagattagacaatcctcggaggacccgttcaccaagcaagatgctttatatggccaagcaaatgcgccttctatctgtcactcgatccacctagagttcttggccaaaatggtacgctcatttactgtccagcatttccatcttctcattgtgtcgatactctcactgatgtgtggtttttcatgacatcttaataggaaaacgaggagatgagcaaagtaactcaagctaatggaatagactccagggtatctttcttggtttagctattatcttttatttgaaattgccggtgcctatcatttagtgtagtaacagcatggaaatgctgtccttactatttacatgcatgtagtacataaactaatatctaaatagatttatgcttgaaaatagattgctacttccttcttgttgcattttgatccaatgtgtaagttgtatgaaagctgaacataaacgatacaaagttaactgtgtttttgcacggagctgtattagatattcagatttttttagataatgaaagtttttattgaacccaatcaattatatcaaggtgatacaattttcccgagaacacttctagcatccgcatagtttttttatttttttttagaattgtacagtatttttacctggtctttacatccaatcggatatatgcagctttttttaaattatgaatttagcctattaaagagggaacttagccctcaaataacccaatctgaaattcactcctatggagatttgaactcagaaccttgatatgctacttaggtcactgcaaccactagtatttgtatagttaaaatgcacacaaccggacacacacaaccacactcaaaaaagaaaaaaaaaagataacatggaatgttgagggtcatcgatcctaacactaagtcgtcaaccgtgaacacttccttgaacatcttctccaaatacacagagtattaagagccaacaattctaagactgatcgccagcctataacgctgggtaaaaaacttcttgaccaccttctccagatgtaaacatatcacaaccatcccatatcccatgaatcaggcttctttaggatatagctcatgtacgaagccaatggttgcttattagatattcagatgaggattgatgaatcatttctttctcagtggttgcttatttcttaaatctttatcatatcagtctttctcatttcttgttattcttgaaattttgacaggaacacaaagggcagagcatagcagttgaagccaacagcaaagtaaactcacctaacgcttactatttcgtatctactccctccgtcccaaaatataagaatttttagggttggatacggatattaagaaaataagtagaattaaatgggagaatgttatgattggttgagaagtggaggtagatgagaaaattgaatggtggagagttgtgattgttcgagaaaaaaatgttggtgaagaagttgttatattttaagacaaatcttgagggttagaagttgttatattttggaacggagggagtagtagtttggatttgacttgttttttttttaggaaaattggaattgacttgttactaaaataaataaatgatcaatagggagagactcgtgaagtcgttgaagggaaggttgactggaggggaagacctgcaataagagggagtcatggtggtgttgccaattctttcttcattcttggtaaatttttgccataaacgcttatcacttctcttataaagataaagaaaatgacatgttaagtctttgcagttcataaaatatatttgcattcaggttatttagtacttcagtcttcagcaatgtgcctcttaaaactaaatgagaatccatatagttcacttatcatcatatcatgtcttggtgtataaccaaccgaactagtggtatttataactatgatcaaataaatatcgatctgggttacaataatactctctcgtttttataatataagggattttaggtggaggacgtgacaggtaggacggagagtagttaattagcatatactatgggtcatccgtgagacagattctagcaatttttgtcgattatggtactgtagccgcatgatatggtgtaatgaagttttataactcactaattagcaagcaaaagaactgaaaccggcccggtgagtgatctttgttggttggttatattggccattgcagtgaactttgggctcgagaaccttgcctcgttgtctctagccgtgaaccttatcatctacttcatgacggtcatgcacattggtctgactgatggctccaacctgctgaccaactacatgggcacgagctacatggtcgcagtgctcatctccgtcttcgcggacactttcattggccggtacaagactgtcatcatatcgtcagtgatcgagctcgtggtgcgaatttttaccatcatctacatgatacagttctttgcaacaattctacagcttaattactgcagcaattggaataaactataatactgtagtaaacattcctgcagggcctgctgattcttacactgcaagctcactccaataagctgaagccaccgtattgcgtcttcccgttcgaccccaagtgcgagacggtgagcggcgacggcaggacgcacctctacgtggggctgtacctcgtggcgatcggctcggcgggcatcaaggcggcgctgccggcgcactgcgccgaccagttcgacgagaagcaccccacggagaagctgcagatgtccagcttcttcaactggctgctgctcagcctctgcaccggcggcgccatcagcgtcacggtgttcgtgtggatccagagctacaagggctgggacaaagggttcggcgccgccaccggcgtgatgggcctcgccctcctcgtcttcatcgccggcctccccgggtaccgcatctccgtcgtgcagggcagcaccgcgcttcttgaaatcttgcaggtcgatcggaacgttcacgttgagcatcgcaacgactgtccagtgacagtgcgacacggttactcacaagttctttctttcttttttttttctctgcgttgttttcaggtgtatgttgctgccatcaggaacaggaatatgaagctccctgagaacccagacgagctgtacgagatcagcaagagcaaagctccccctgacacggacttcatggctcacagggataaaccgttcaggttgttaattgatcatgcatgccattttttatgatgcttgattatgcattcgcatgacacttagcgcgttgtactgcgtgtgtgcaggttccttgacaaggcggcgatagtacaggcgccaacggatgaggcgccgagcccatggcggcagtgccgagtgacccaggtggagcacgccaagacggtgctcgccatggtgcccatcttctgcagcgccatcatcatgagcacctgcctcgcgcagctccagacattctccatccagcagggcgtcaccatggacaggaccatcggcacgttcaagatgccgccggcgtcgctgcccatcatcccgctcatcgtcctcgtgttcgcggtgcccatctacgagcggggcttcgtgcccttcgcccgccgcatcaccggccaccccaacggcatcccgcacctgcagcgggtcggcgtcggcctcgtgctctccatcgtctccatggccatcgccgccgtcgtggaggtgcgccgcaagagggtggcagcaaggcacgggatgctggacgcgaatcccattctcgggaagcagctgcccatctcctgcttctggctggcgccgcagttcaccgtgttcggcgtcgctgacatgttcaccttcatcgggctcctcgagttcttctactcgcaggcgccgccggcgctcaagtccatgtcatcctcgttcctgtggtgccccatgtcgctcgggtacttcctcagcaccatcatcgtcaaggctgtgaacgccgccaccaggggcgccacggcgagcggcggctggttggccggcaacaacatcaaccggaaccacctcgacctcttcttctggctgctcgccgtgctcagcttcctcaacttcctcaactacctcttctgggccagctggtacaagtacaagcctcagcagtcagcccacgtaccagcagagcacaaagtatgatgatcatccagcgtctcgagaaccttggtaataaaagatgtgcagttgttgctaccatttttgcctcacgggtgcacggagtaccaacgtggcaacgtgagtttcccataaggggaagaatatataggtatacggaacttaattctaatcagttccagtacaaagatcatggaattgcatcgtcggtgtgtataaatgtgatattttgaagcacaaattttcatggggttattatagttgggcagcgctgaccgtgagtccgtgaagcgtcagtgcccaatggctccaagcgcccgcgcgcgccaccagctgtcgctgcctctgcgtcgcacatctgccagtgccacctacggcgcatgccgtctgccacgtagagcccaccgtgcccctcgtgtcgtgcagcatgcgcgccaacttgacagcgtcgcgccctacaaaacccaccggatgcatgcgcgtagcgtatgtgacggcattacggaaaacccccaccagcagcagctacgcgaggtcggatcggatggcgtccagcaacgagaagccactgcccacaccgatctctgccgccgccggcggcagcggcggcaacgcgccgccggggaggccgacgacggtggattcgatgctgctggacaagggcgcggcgatgctgcaggcgctgcgcccggtgaagcatatcaagcagcacgtgtgcacgttcgcgctgtacgcgcacgacccgcgccggcaggtggagacccaccacttcgtctcccgcctcaaccaggacgtcctccagtgcgccgtctacgacgccgacgacaagcacgcccgcctcatcggtgcgacgccgcgcgcgcgcgacacgctacatccccgcatgattacagctagctgctaacgagttcgtgtgtatgtgtacatgtgtgtgcaggagtggagtatatcgtgtcgcggaagatcttcgactcgctgccggcggaggagcagcggttgtggcactcgcacgcgcacgagatcaaggcggggttgtgggtgagcccgcacgttcccgggatgctggagaaggcggagctggagaagatggccggcacgttcggcaagttctggtgcacctggcaggtggaccgcggcgaccgcctcccgctgggcgcgccggcgctgatggtgtcgccgcaggacgaccccgcggcggacgtgcgccccgacctcgtgcgcaaccgggacgacaagtaccgctactccacgacggagctgcgggcggcgagggccgacgtcgcggtgccggcggagccgcgaccggggcaggccgactactggctccgccaccgcaagggcttcgccgtggacgtcgtgccgcacgagatgaagtgccacgcgccgttcccgtaagctgtgaacagtacgctggcagagctgtggcacacgactcgtgtacgtgaacgtagtagtgtaggaacgaccgtgggtcgttgtatcgtgtgtacggctccgtcgtaaactcgtaacaccaactgctaccacgtcttctgggcaaaaaatggtgcgtgacttgacttgagcactttcatgtcttggatttcacacagtttttcttttagccagttcaacaa

SEQ ID NO: 27504 - DNA, 1129 bp, Oryza sativa
cccatgaattcagaaccccagagtccgcacatcctcaaatacaaagcacttccctagttagatgtaggttagacttcccgttcgagaaactctaccttctacctgccctcaatttatgcacgattaatgaatgccacctgggtggaagcgagaggtggaaatggaaggtcttagttcggaggtgggatctctacctgatagttgcattgccattcatgatgatcccctggcattcgtccattcagccattcaccattcacccattcaactggaattttggttgaatgccggaattgtgtccacaaattgtggatggatagttggttggctggctggatggctggctggatggctggctggatggatggtgaatggctggcggcggttcggttgctttgaagcatttgttgctatctaaattccatttaaggtcgtaccttatcgcccagcatcatcttattctctatttgtattccctccatctttcagatacggatgtagccttggatgtgcccgtgcccaatgaagaggaagagcgcaacatgaaacgtaagtacaaaagtaccggacacccacccagatcccaatagaatccgccaaatcctgcgggaaattgtaatcccattcaccagctcctacatttaattaacaagagaactattgtatttatctaacacctggattatctccacctttcatttgatccctatttatagattacgctgcgttgctaacgggccgcacctcctatttcctcaagggtgaggaaatgaagtccatgtacaccacctacaatccgcagaatgtggtggccaccgcccgtttcctgttccacaagaagaatctatactactccttctacacctcatcgcgaatcggtcgtccgcgtgccattcaattcgttgatgatgcgggtgtaatcctggaggagcatcaactggagaccaccttggcgggcactctcagtgtctatcagaatgccacgggcaagatctgcggtgtctggcgacgagttccacgtgattacaagcgcatcctgcgcgacgatcgtctccatgttgtcctcctctggggcaacaaacagcaggccgagttggctctggccggaaaggtggccaaatacacggcc

SEQ ID NO: 27505 - DNA, 1174 bp, Oryza sativa
ttcctgcagccccgagaaggaggcaatccggtcggctcatcaaacacagatgcaaattcctacaataagttagcaactgcagctggcatagcttgctctactccctgggattcaacaacacacaattcaactgagtgaacaatagcatgacgatgaataagtcccttcagctgattaacatacacaggaggacaagaagtcacatctggtaacaccccttgcaatcgcacagtgcgattatttagctcaaattgcaattgtttcctcttccaatcaatatgcataggactgtgacgttccaaccaatccatccccaaaattacttcataacaaccaagaggaagaatcttaagatttgcacagaaagactccccttgagtccactattgacaatcaagcatttcttccccacattgcaacagacccccatcagcaatacgtaccgtcagtggcttaacagaacgacgacaaccagctaaccgatcagccaattgaacactgataaagttgtgtgtgctactcgagtcaacaagcatgagtacttcatggtgctgaatcaaactctgcaaccgtactgacttgggtgactctgtgcccagaacagcttcacgagaaatagtcaacagagcaccctcctgctcaccaatttcttcaggttcagtttgcaaagattcagcagcaggttcatcagacacaggttcatctacagaaaaaagttgcagcaattcctccacaacatgaagttgaacggtgggtccacaacgatgctcgcgactccaccgctcaccacaagtatggcagagacccttagctcgacgatacgctcgaagagtagcaaacttgtcatcaacagggacagcctttgagtcctcagattttacacaccagctcccccaggttgtcgcacaggttgattgacgaccggaaccacccgagagaaactgcgagaagtcctagaaatttcatgtcgtcgcctatcccgacgaacaacatcaagtacttcctcctgtaaacaagccaactcgacagcagtatccaaatcggcaggccggtgaagcaaaattgtagcgcgaatttccccccgtaacccttctatgaattgggtcacaaaaaaatgggtgttccacgaagggtgatgagcgtgcatcccatgcatcaactcattgaacttctc

SEQ ID NO: 27506 - DNA, 14666 bp, Oryza sativa
cttcgcgagctgctggacttgtgagcgcagttctcccatctcgtcgcgtaactctgccaccgtcttctccaccgttggcttccatcccaccaactcagcaaccatgggcttgatttcttctattgatcccaccgaagtctggattgcaacattatgtttttgaatcgcctccatggctgccatgagatctcccaactgctgctccatctcctggaccttgagttgagcacgacagtggtagcgtggcttctcaagatactccagggccgattgctctgataccaattttgtcacaacctctctcaggaatttgaccgagcacttggggaggaagagagatgaacagagggagagagggaagaagcagaggttgttggggattagtttttctattttcaattcgataactagctcgattacagcatagcctttatatacacaggctgaacactcacgccacccactctgcccactgacgcgtggattgggccgcttactcctactgggcctaagcttaacagggttggtaacatttttataaaaacaaagtacttccattttaactactgtaaactattttccttagtataaactccatttacacgtgctaaacatcagtagatagttgatacagaatttcagagacgggtcttggtatgcctggacaattaagctctttagggataacgtggcagctaacacctagtttgtccgaaagctgcattattcggtacaagatgcgctgccgtggcccgtgaccatttcttctacacatcgcaaccaatcctctatattacacacacacgtcctagcagaatctttaaaccgtgtaaccttttccttcatttctgatcccctttttcatcccccatttgcacataaccaatgtattttggtctacgtattttgcatcctagaaaatactgtataagacgagcatcccaactactcccagaaaccaaaacaaggaatcaaatcaaacaaatctgaacagaacaatacatcattctgaaatacgaatcagtttggtcggtttgggtagcttcatggatcacccaaacaaagcttgaccttgccaactcccaacttccaaagtactccacaaaactgcttctgcttaagtattctagttaacccaagattcgtacaccatgtcattagttgtccttaacttgccctagctgcatcatcttcctcctctcctccgccattgccgcttgcttcactcccccgcaactctcctcctacgccactcaacgcatccgaagcccgcgccattacatagctgcgcgcgagctcgccccgatcttggtgcatctcacagcgcggcggacacgatggagcccgtgacggcggcgtcggcggcggcggcggcgagcgaggagcaggtgacgcggcgcgtggcgagccggatcatccgggcgctgcagcaccagctgcggctgctgcaccgcgcggggcccgagttcttcgtgctgggcgcgacggggaacgtgtacacggtgacgctggcggcggcgccggcgtgcacgtgcccggacccgtccgtgccgtgcaagcacatcctcttcgtcctcctccgcgtgctcggcctctcgctcgacgaggcctgcgtgtggcggcagtcgctccgcccgtgccaggtggcgcggctcgtcgccgcgccgacgtgcgccgaggcggacgtcgtggcggggccccgcgcgcgggagaggttccaccagctgtggtcggcgagggccgccgccaaggccgaggagagccgccgccgccgacgacgcgacgaccaggccgccgcagccggcgcgtcggggaggctcgacggcgcggcctgcccggtgtgcctggaggagatgtcgccgcctggggcggcggcggcggcggcgatgctgctgacgtgcgcgatgtgccggaactcggtgcacggcgagtgcttcgcgcggtggaagcggagccgggggaggcgggcggcgacgtgcgtggtgtgccgggcgcggtggcggcagccgagccgggagcaggagaaggagccgtacatcaacctgtccgcgtacatgaacgacgccggcggcggcgacgtcaacatggtcgccgccgacggcgacgacgggggactgtgcgccgggtagctcagttcggtgacgtcagctgacgtaaacgtgacacggatgtaaattaacgaagttgtacattgtatatagtgctaacaatctcaattcgttgcgtttcatgacatttttttcgttgtttttcgtagaggctgaccttgctacttcagttattcatataatcatattcctgtacataattgatatgttaataaaaggaacatttattttaagtcactttgccttttaatgatttttgtgttcacaagctgacatgaggcactactctgccgtcgaatctgaatctttatttaaattttaaatagctttgtggtagaggagcaatacgtcgaacaccttccagacaacgtgagaaaacgagcaaaaaacagaggaaagacagagcaaggcacaatgctgtgaaattgaacggcgaaacgatagattgacacttggtttgtgctgccaaaactgcatagtttttttttctagttctcattcttcgtgagtattttacagcaacaatttgtatttgcgcgccacgaactaggatttgtttggtttggtgatctgagtgaaattatgtggctctgtttgttttgatctagaattaatcctctacaatctcatagaaagaatttacttcttttggttccaaatggctcaataggaaaaggaattagtggggtgctgaaatcataaaatgtttctttcaattttcttcaacacttccccttagttaagatctaaaagtttctgaaatcataaaatgctggtgttctttacaaaaatgttataattttgtttctaattatcttgtcattcacaaagtgcagttatttaaaaccaaggaaacgaatagacctccaaattttgacattttcatcttccattttggtcctgaactttgctatatatatatatatatatatatatatatatatatgatcggaaaggaataacagctcttctagtacttaacaataagcacatgtgcatacattttgttcatcatttatttattgattacaagattaggagtgctactcctccaatattacatgcatacattacatatgtactccatgttagctgaagagacagggccaatctcaactctctccatgtggtgaaaatcaatataatacaccacaaaacagaggtaaacaagagccccatccaaaaaaaaaagcacctaaacacactactaatcaaagggtgctcatgcatccactaacctatctagctagtgagattacattttaatattgcacccccaaaacatagttgacactccatgcaacgaatcacatggagtgcaaacaaagcaacaagctgaagctacccaactctgcaaaagcttctatctaattaagctagaaaagatgcagcaaaaaaacacacacaccccaaaaatcaagtgtgtaaaacatgctccctttctagcctaaaaattaagaagaaaacattaagcaaagcttaatttatgcttgtagccaagccaaaagctaagtgaaattaaaaaaaccaagaaactctctagttgatgttgacgcgctggctgaactcgtcggtgatgaacggcaagcagctggagctgcgtgcgatgccgccgccgccggcggcgccggcttggcgggcctctcgggggttgatgctggagcgggagcgggggccgagcttggagcgcttgcggaggatctcgcgcatggcctccgcctggaagagcaccgggtgcgtgcgcccgaagccgttgaagcgcttgcacacggcggtgtgggcgcggagcgccgcctcgacgccgccggcgccgccgcgcctcgccgcctcctccgccaccgcctccgcgcacagcccgcacaccagccgccccgcgaaacgggcgcgcacgccgcggatgtactccggcgtgcactcctccgacatgccgcagcactcgcaccgcgcgtcctccacctccgcgatgtcgtcgagctgctgcttctgctcggcggcggcggcgtcgtccaccatggtggtgcccttggcgccgacgtggtggtggagctcgtaggagacgtcggacaccgtgcgctgcagcgcgtcggaggacgtcctccgccgcttctccgcgttgccgtcgacgctgacgacgccctgcatgttgctcgccatcgcgatgaacggcgccgccatcgccatcgccaccgcgcaaacctctctgcttggagccatatgggcttatctcacaatcttcttcttctacctctcttcttcttcttcttcttctaccttggcaatgtagagttgtgtcaagaattgcctagttttgcttagtctttttgctttgtatgataaggagctcgagagcagaatgcatggtggttatttatagaggttttctagggttgatgaacttggcatgcatccaacaatggccatagattatgtcaaaaaaggtgatgtgcaaattgctgcgtgtaacttgtggttgctacgtggtgatgcatctaaagtcattgcaaattgcaacttcaagatttgatagaaaattaatgaagggctattagttcatatcatatatgcatctttttgtcaagtggagatgttactggtaggtttgtaagcttatgcacgtgatgatggtgtgtgagtttgggagaatagacagcataaaattaattaaggtgcaaaatggccaaaaaggtgattgtgaaatgtagccaattgtggttgcggtttagatattgctagtaattttgatccgactttgcattttcaggagtatgttttcttctttgtcggggatctgttttcttttcttttcttctttttgtcatggtttgaattttctgaaactaatttcctaccatgtttgagactcttggcatgactgattaattcaactgattgattttcaacagaagttctgtaattccattaaaaaaacaaaagttatataaacagtggccgatgatgctaattaaaaaacaataatggacaacgaataatttctaaaaataataatctttatgaaaaggtaatcattaattgtaagcatgcatggccagggttcaatctgaagaaaacgcatgaagagaagagtcaagtagttcacgaggagctcgccaagagacatctctggaaggtagctgtccagactccctccgctgctgatcactgttagttgtactacgaccagtactgaactactgattagtggttgctgttctcagtagcttaataatcaagattcagattaacgaaatccagaaggattccgagatcagatatcgatgctagctagctactgtgtcaccctgagagaagagatttagattgtattaggtacctttttgccagatattagcactggccagggattaaccacataccgttcaggttgcatcttgtggctgttatggtttcatcagttctcatgcatctctgatgggaaagtcaatttgcttgtttgcaatttggacactgttaagtgcaaatgtaaaacagtactgtctaagaccaaacaaaatgaggatttagctacttgttgtcattgactgaaccaatataattagtccctgtttcttcagtacagatcccatatatattgcaacttccattggcagcccagaacaaagctctacacatccaacaaattttaatttgtcagaaatattcagagttcaaggggggaaaaagggcaagcgataagtaagtgataagctatcatttgaactctctcatctgcttttcacaaaaaaaaaggcatcaacttatcataccaaatacatgcataggccttgacccttatcagctttttttcagcttcatgtcattttctcttgatcagaaaaaaaaagtagtaataaattgaccaatcttaatcattatagcttatcaacttggatgcgcagtaactgcgtaaagcctggagcttcacatgctgaactcatccagccacccgatcggtcgtatcatatttacagtttcgtcaggtttcgtttcctgtatctgaaactgacgtcgcgtctcggctgtagccacgggaactgtagatattatgagaaatggatgcaggttggtagttcaggtttatgtcattgctgacatattagatatgcagtgtctttgtcagttgttaattactgttccctagcattttgagggcatctgaatgcagacatgaaacatatattgtttgcttaatgtaaatattagtactatagaatgtttgctgttgaattcttacatgaacataatagtttagtttacttacatgtttggttgaaattgggaaactatttgcacgtataggaattcaaaagtgtttgaacttgaaaactctcaaatcatttgtgcaaatcatctgtccaaatgctttaagatgtatcggaaaattttcgattcaaaagcattaaaaaggatatcgaggaaatagtagtaccacaatagcagactgactaccagtgaagaagcaggtaaaaaaaatgttttgcaagctcagacagtcagaatttcacatgaacttccgcgtatattatactgaattcatgaatagatcactatgcagggtttgagtgtctcggccaaagccacacgagtcaagaagaaaatacattcgatagtcgattgtctttctgagcacggatcacatagagtgcactattggcaccaaccatacatttgctatgagctaaacgatcgtaacctcaacctgaaaattctatgtgcagtagcccgtctaaattttcagggataaatccgtataataaacaatgttcatgtccaattggttgttgtatcactgggtttcagtcgtgccagtctgtttagcgccactgtcatttgagccgttcgacccagagctgccatcgccgacttgagattccttctgctcggcattggtggaagcactggtttccatcttgatatccacctgctcaccattgttagacgactctgtattcccatcattctggttctccacaggcttggtctcttctgaagagccatttgcagcttctgcagcagacgcttcttgggagttccctgcctccgtgtttgcagcctggtcattagaaacttctgctgccacattgccttcatcagattttgtttcgtttgaatcagatgcctcattggctgagcccttgtcatcatcaccagatgcagtcccagatgattttgctgcatcttcattctcagatccagtctcaatgtgaacagcctcgctagaagcatcagatgtggtggaagtcgcatcactttgtgagttctcattctgccctgatggtagattacctgtttcatcaggaagagttccactggaatgctcatcatctgttccacccttcgcatcatcggacagagattcagaagcattttgagaatccactgcctcttttttctcagcttcctcttcattagatccgtcacttttcacattggactgatcttcattagtagattcatcaccatgtgcaacttcttcatggggcattctgttcgtctctgcactgctttcctctaggacagtattgctttggggcatatcatctccagttgaatggtcttcacctttactctcagcgtcagatgaattggactcagcgtcactcttctctccttctgagtgattggtcgttccatcctcatcattactattagcttctgtattcccatctgcactactgccatgcccttcaccagcttttgatctgtcagtgtttcttatatcatcatcatgagagtcagtattgtctttctcaaacacagtttctccaatgttctcttcgtctggtttgcttactacatcagggttctccccacccttttccagaatgccatcaccataactacctcccctttctttcctcccctggaacatgcttctatcatcatgggcaagctggttctcagcatcttccaagtactcatttttcttatcataggaatgtttcacctggtacataagccagacaacaacacctagaagtaaggtagcctggagtaatgttttgactcttgatcctctgttcctttggtgccggctattcgaatgatgaagcatgtttacggcagctaaaaaaggcaaaagacaattgtcaggttatgagctgttcaattctattatatcagtataatagacaatatatagtcaattagtaaacccttacatatggtacaaataattagtagttggatagtatagtgtcaaccagaagtgcttccatgctacacctctggaattttgaaagctactttgaggggaattatgtactgatgcaaagatagagaacaggagatgctcgtggataaaacacctatccttgtcaagactaccaattacatgctgcgactacaaccaaaatataactgggactatagctatgtgctcatagtcgctaataaacccaatcaaactgtctcaagagggaccatactgaatacaaataagtaaataaccaactctcagtcttagtactacactgcccacagggctcaccacatctcctagactgttctgacaacacagagctctatatttcaacaaattcatgcatggcacacagcatctggggattgctttctgatatgaacagaagcattacaaacgctgatctaaagtaggaatgaataacatgttagcatttcagagagtggtttccatccatgttgttacaaactagagaaagacttgcatttgatacaaagagttaagtctttcagataatgggaggtaacaatgactagtagaacaggtcaagttctaattgccagggttcaggcgtttcaatcaggaagaagggattggtcacagattagtctccacttaagaatatcatgagactagtacctctataatctgaagtaacaaccattggatctaaaggtctagtgagagcatagaagcaattactatttactagcagtttgtagaaaagaacatgctctttgcctttggcacgaatgagagaacgaaatattcaattttagaagggaaaaaaaaatctctggcatgccttcaaaatgggcgaaagaaagtctaacagcacaaacaaggcctagcaaaactaaaacacaatatcccagatacattgtacacttcgacacagtgaaatgggaaaaaataaaggtagtaacagaaattggttgctaagaccacacttgaggtcagcatgaatattaaatgcacctcacaattcccctttcttgaagcaacaatagagtaagtaaagagcacatatgacatggaaatttcagtgtaagcgacttctaaaccaatacatataataatcagaagccaaaaacaaaggacgtccaacattcggttggtaagttgctagtgtgcaccttcaactgtcaggttattactgcaaccaagtgtaacagggctaagatgaagtgatcttcagtcaactcagggctttccacactaactagtactagtagtatagtaatatgcagagatctgaaaggtgaacaaaaccactctggatatcagatatacaatacccaagaagaggaagctagtttgacggatcgatttcaccaagaaccgacaaatatgtcactatctattttggatcccccgctgcaattgtcgaagtcccgagcagtgagttccatctactgatccagcgatccaccacccccagttccgtgattccactaacccccaaaaaaaaaacacaaatcccgttcgggcacacgcttgaaccgaaacaaatctgatcccgaattctggttcgcagcggacacggcgcctgcgttggtgaactacccaacccaacccaacccaaaaagaaaaaaaaacaaaaaaaaaaaacaaaaccattccgagatgcggcagcacgtaacgacgcacgctcccccgcctagttagagcgccaccggtgctcgccggcggcgtacggcacgcgcattggcaccagctggtagtagaggggtaccactaccagcgaaggcgacaccgagcagccggggggagcgggaggtagggcattggagcgcgggaaaggggggaggaggaggggtttacctgcgggatggggatcgcggcggaaggcggcggagggaagcgggaggcgactgggggtggactggtgtcgtcgtcgtggttggttggaacttggaaggaacgtgggtctaacgttgaaggtggtgggtggcgtggggtttagatctggaaactagtgactagtgttgggtgggggcgcaccgcacctgcgtgctttgcctttgctgctcctcgcctccatatcactcttacaaatactcgctccatttctaagtatttatcttcgtcgacctttttaaatatatttaaccatttattttattaaaaaaaattaattaattattaattattttcctatcatttgattcattgttaaatatacttatatgtatacatataaatttatatatttcacaaaagtttttgaataaggcgaacggtcaaatctgtgctaaaaagttaacggtgttaaatatttaaaaacgatgggagtattacttaaggattaattatcggacccatatatcatagacacatggaggatccacatgttataaactatgaatgtcaaattcttaattatcacatattaaaagtgacaaaaaattaaatgctcttcacttgtgctggtctagctagcaactctttctttctttttcttaaatatctaaaatgatgccgcaagtttttttcatgaaaaactttaagatataactatagtaaaattaaagtttaattacattgtaactacactatagttacactctatagttgcactgtaaattatattgtaactacgatataatttatataaaacgtgccttccattgtggtttggttggctagcaccggatcttacttatggtatgtgaaaattatttgtagcaattttttttacttcatactcaaatctcaagacaatccgatagctacaaatctaaaagttacgggaacagaaaaacttatgaaagttttcaagcattttcatttttcttttgaagtataaattctaatttatacccttctttttaccgcagtttgcatgacaaagagctaaagactatggtatttgggagcttctaacggctatggttttttctaggtcttatgaatctccaaacaatcaggtaatgagaagttgatattgtaaaatctgaaaaaaaaaaaagaagacacagaagctgaaaaacatagcatttttcatcagttgactactcatcaactaatattaagaattttgagctctctaattcaaagaatctattgttgtataatcttaacattttaaaaataaactagaagttagaattaaaaaactaacaactagctactcatcaactacttctcaacatcccgagctctcaaaacaggatgcaaaggtaagtttggatcctggccaaaaaacttttagccggttcttttttttcaaataattaataaatggatcaaagggcgcacttgtcaagtttacccaattattattccaccctaccaaaactttatttttaactataaatctgaatggatacttgtataacctaagtacatatagttagaaataaagtcgtttttccgataatgttttgactttttttttcttgctttcggttttacttgtaacctcttaaactctttttcttaagcgaatggctcaccacaatcttcccttaaccaatactgaattttgctctccatatgtattttttttctttcatcctgctgatctatcctcccccctctcttctctctcttgtactagtagtaccaacgatgaatttattcccactttggcagggtgccagtgtgtgatgtgctggtagtttggacttacaactcgcgtgataattgattgattcccccaaatatggacaggacaagcaggtggatgggggaatgagatgctggatcgggccggtcggttggtttgggctcacaaacacctgcaatggcagtggcgccatggagtcggaatctcgctctcacgtgactagagtgaggaggggtggggaaagtggtccacgcgcgacgtcgggtcgatcggtgccgtcgtcgcccgtccgttgttggcgcgtcgctacccgggaaattattcctccatcggtctttcattaatgctggcaactggcataatgatcatgtttagggacagggtcgtccagattcacttttgcccagcttcaaagaaattaattagccaactagatccttataaaaaataattttacttagagttagtgtattacattgctactacctccgtttcaggttataaaactttctagtattacccacattcatatagatggtaatgaatctaggcacacatatataactaatataaatatttggatttttccggtcgtcacatcgcagtaatcacggattttcgtccatcattaatcgcgctaaactcatccgatccgattcatccgcccgattctgttttggttcggtccatatggaagtacaatacaagcccaaactgatttcagtattctaggtccatctacaagcccatactcacaccaattccaatctaatctatctaatctaatttgtctagaattctaccggttctgatttgtccaggattaagcccacaattctataagcccacacacaccaaattctataagcccatacacaccaattctaatttgtccaggattctatttttagcgccccgagtcagattctatcctggttttcttttagctatttttagcgcactccactaacgtgattgcacagatttttttgcaggctaaaatacatgatacacaaattcaattacatacagacaatagaaataatagatgcgcacaagaaaatatagattgcatagctcttcctcgacgacgcggcacctcaaatacaattacaggcaattgaagatcacaagttttttcgtcgaggacgttaaggcacctccaatcaatgtcgattccaggttatcaataaactcaaccctgaatgcaatttcaatttcattattaattacataaaaggaaatcaacagcaagcaaatcataaaccgtacatagccacatcccaactccgtgtttccgagtttcagaaacaggctttactatttgttgtgcaatgtaaatcaacaagtgacagtgtactactaatttagacttggtttagactggaagtttggaagctaacattccggaaaagtttcagatcagcaaacttaggccagtaacagtctttctgagtactgaccatgctaatggcactaagcagcacagtatatgattcgaattcaatgtcaatggtaccataattctattcaccacatggccgtatcagagtagtggtatactgatttgatttgttcgacttgcatattcagaccaaaccaccaaattgggccaacaaacctcaccggcaatacggatttcacacggtttacacaacaattcataagcactcacacatcaatatcaatatcatgaggtagaattgccattgtgtaaacacaaaccaaacataattgaactccgcgacgaataggcataaaccaatcaatttacaaccagcaattgcgcaacgattagagggggtgtggtaattgaacttaccatatatcttacctattgaccatgtattttcttcctgggctcctggtgtactgccatacccaccatcaccaccattgctgcccaagtaaccactagcaccaggcattccattgctacaaaagcctttaggtttagtaagcctagatttgtgacctgcaagaaaagttttggtgtcagttggaagacgcagaattagacagtgtcaaatactgcatgtgtcctgaaactgatgaaaattacagatctgaatctcatctttgatatgtagttttgaatattttctgaaactttgtgatcacacatgaatgcaacaatatttgatcttgattgaatagtagtcgatgttatactgatatttgaatgtagcctaactatattgtaatatttattgtcagattcatcttctaagctagctgttggtgtgacaccatctggattgacgtccccacccttggatcgtaatgcacgaaaaaggcaaaaagatagggagcggtacgcacagatgactgatgagaagaaggaagaatgaaataaaaaaacgccgtgaagcctataaatgcaaaaaaacttcaagagcccttgcatacgtgaagaaacaggatcaatcaagttcattgcatactacacaatccgaacaaaccaaccatgttgaaataactggtatatcataatgttatgactccacttctactgatgttacacattatatgcttacaaatatttttttactacatttaattttaaataaacttgaaaactatacagatgatttctcccctccactaggcgagtttgaacaacaaatgcaaccggaacttgaaaactgtacagataatttcgcccctccactaggcgagtttgaacaggagatgcaacaaccagaatccactcgtggtactcctcaaccagagggtacaagggcaattgaagaaaaaagatcaaattatagggccgggctgcaggaat

SEQ ID NO: 27507 - DNA, 5133 bp, Oryza sativa
  unsure (1)..(5133): unsure at all n locations
tctaaaattaataaaattgagttatggaatatagtttgttaaaaaacaattaagggaggtcgtaaagatttcgtcagatacaaataattaatcatgctagccaaaaacctttttttgaaaggccgtggcaagagatctaccagatatattaaggagtaaaagagtcaaaacaaaaacaagtattagagttactacatcagagagcagaaacaatgtgagggctaaatgcaagaatacatcaagaacgtttaaaggctagcgtgcgctaatagagtccttagtgattaggttagcaaccatggcatcatctaaagaatactttttggagcactcttttattcctctctagccaaaagttccacttttaagtgatttaggcccatatcatctcctttctctttgtttctagttgtgttgtcactagtttatttaaccatgattgaataaaggcttcggttccatcttggttaaaaagtttcctgtcgcaaaccaaagaccaaaccttctttgtgaaatcacaattcctgaaaaggtggtcggtatcttcgaaagcctttgagcacaaggaacatattcagttacaccgccaatgcgttatgagcgggcagtaagcgctctttgatgcagtgcaagccagccgaagaaatgatgtgtcggctctgcctgtgcgttccattacatagggaagttttcttccactattgattcatagaattgcaaaaaggtaaactctcttcaccgagtatgcttctatgatgtttttaggaaatttgttattaaccactggaggttgataacttacagaagagttattacctaatcaagtattttaaggcaatggacataactctaatggagtcgaagttttggagaagcctattgaggatacttggaccatcattgaagtactttagaacaatgtggtctctggaggaagactaaatttgtattcattcaaatcattttgaagtttgtcatttctttagtatatgcatagcaatgtttgttttgaaattcgttgcatcagattgaattttgttacttatctttgactttagactgagttgaggaatgctagcctgaaacaatcattcattgttagcaacgagtcatctacaagccattccataaatattagatacgcaaatcatcctagtaactaaaaatgttggatatgccaacaatctttttaaccaaaattgttagatacacaaacaatcctgttaactaaaaatgttagatacacaaataattttcataactaaaagtgttagatacacaaagtggtaggcagaaaagcacaacaatgaagctgattatgagaatgggaaagttgtggagataatggtgtcttctttgccgcccgttctcataaacaatcacccacaaaatcaagagaaatttgggcatagttgttttgatgctatgggaaaaatgttctagcattttctgattcttgatcccttatttgtacatacaaaccaaaaatgagctggccatatatattgggcacctagattgtgtgccatgactctcccaatatatgacatgccccatggacaagtcacaccaggcactaatgcaactaaagattcactctggatagcgaaatgaattgctatagtgagcaacatttaattgatatagtcacaatttgagattgttctagatggatgaatagatagtagatttttttattatgtgatgataatcgaggtacaagcagaagagttaactactactcgtataagtcatattggggttatcccatcttcaagttgactttatagaaaaacataacaacagtttcaacaaaaatatgtcatacactagttatggcattttagtctctttactgtggaacactctttttttcggttcacaccatatctccgatgccacaacttttttttatgatcaatttcattgtatttgtcttgtgtttttttaccttgggatgtcctttgatccactagttcaacaaggtttcgtcgccattgtgtgcgcttagaacatcacttctcaatttttgcataattttctcctatatttggcgtacaaatgtgcatgctgcatagtttcgaggttttttgtcatagagctggcagaattaattgttcagccactgacggatttgcagctggtttaccatctttatcttattttatagtaggagccatatattttttttagcattttcaaagtgctcatgccttccatatcagctttgcagctactgaatctaatctcccattgaattgtgttgtatgccgactttgcactggtattccattgttcgtccatcgccatctaatgatgtcatcaacccttctgattggattatgttgttgcttcgtatctgaagaaacatgtcgaagaattccttcatcaggtcgacagtgaggttgtacgtgatatcctgtatccgctgatcgtttgttactgcttcatatatcgatcgactctttcgctttgatcggttgttaaggccaggtgctatagctctttgagtggttgatgactgaccaagttcgatacccagaaaattgctttgcttccctcaccttttccatctcagtttgctggtattacgcattctatactagataaaatttcgttggacattctgtactacataaaattttaattttgatcgttacccattcagtacctgacagaaaaaattcttttaccaaacatatattttctaaatcatacatatataacgtgcaaaattattgttcgcacggggtaacaacttatacttccagatcaacttctaatcatgtcattccatttccaaatgacatttccaaattcttgacaacttatacttccagttcaagttctaatcatgtcattccattaccaaactctttaacactgcaatgtaagttgcttacatgaaattaagggctcacccgaccattacaaatcatgcattcatatgcttatgtacacaacagcaatagttagaggccattgccacatcatatcccagcctactacagcaaaacaagttccattacatagctaagcacatctttattcagtgcaccatcgccgctcgcacgcgtgtcaccaataagcactactgcacccatcggaaacgacttccatggaggataaatgccgccgtgtcacgccaccagccagcgacggcgagcggagcgcgccgacaatttcagccaaaattagcggcagcgatggcggcagcgctggtgcatgtgtcagtcggtgaggagcgagagaatcagtagccgctgtccactccgaaagcgaacgagcagccggctgacccgccggcggcggcggcggcggcatcgacggcaacgtcggggaacatgtcggcgccggtgtagaacccggcgaagtcgacggcgtccgggccgaacgcgccggtgttgtcgccgtcgagcagcagcctcgcgcgcttctcgccgcaccccgcccgcgcggcgtccgcgaacccgttgtcggcggcggcggcggtagcggagccgttgcngtagccgccgccgccgacgaggcggtgcagcttgtcgcggtcgccgacgaccctgaggaggaaggcgagcatctgcttgggcctccgctccgtctcctgcacgcggcgccacatcgcggccaccctgtcgtcgatggtgcgctgctcctgcttcagccggaccacctccgtcgccaccatcgtcatgtcttaatagcaacagcaaccgccgccgtccgccgacgcgtccctgcgcttgccgccgccgccgccgcctcccccgccggcggccgcgctgccgcggcggacgatgttgcgcaggaggtgggtctggccacgcaggaacgacgcgtgggcgaactcccaccgatccggatccaccttgcggaaaccctggtagtagtcgacaaaatccaaacagaatcagaggtagaaagccaaacttacatcgaaatcttttcaaacacaaattttaaaaccacgacttcgacacgtcttatctaattctgtgttcggttctttctatatccatgaggccgatgaacataatcaaggaagaaattaaacgagttactacagtttcttcaagttgttctttttgaaactaagaccgagtttagatacaaagattttcttcaaacttccaacttttccatcacatcaaatttttctatacacacaaacttttaacttttccatcacattatttcaattttaaccaaacttccaattttggtgtgaactaaacacacccttacccttagtttaaggatgtgatagaaaaattaaaagtttgtgtgtaggaaagttcaatgtgatggaaattgaaagagctagacaaaattggatctcttgggtattcccggatgaaatttgtgaacaacctcgaatcacaaacatgaaactatactcactaccgatttcttcaggtgcagagatcgaaatcgtcttccgttggcaaggccagcattaattttccaaattgcgttattttttccccgaagtacagctgagtgacgcaaaaaatgaatatgttccggacgtccatgatttgagcaaaaatcacttaaaaaagtatgcagcacactcaaaagggaaaaaagaacatcagaacatgaatgaattctattctttgctttgttctacagattttagtacaccaagatgtacagctagctgaatttacaacagcgcatatgtacaatttaaggctacaacaataaatgatgggtcccaaactctgttgtcctcacctctcacctcctgtctctccaagtctacaaaatcaacatgccaaccaccacaacaattttttatctcatcttccaaagaatctcccaaaacacacgcacacacgaactcaagaaccatgtagctcagatccatgggccatggccgaagcccctcagaactcactttgagttgggtaccactgagaatccatggcagcatgatgtgaagtgcagagagggggggagtatgatgagacgatgaaatagaactgggagtgacgagactgacataggtgttgagctggcggacgaagctggagaagttgttgtgcttgaagtgggcggggagcagggtctgggagaagacgaaggggtcggcgacaacaaagctgttgttccctttcccccacccga

SEQ ID NO: 27508 - DNA, 18423 bp, Oryza sativa
cccccccccccccccgctccggggaaccccacccggtgtcccggtatgtcgcggtgcgggcaagagggacccgcggctgtagacaatggcagccgaacagttttccctacgtctaaaaaaactcaattccggaatgtttgtctctaacgtttaaccgttcatcttatttaaaaaaattataaaaaaatataaaaatataagtcacacataaagtattatttatgttttatcatctaacaataatgaaaatactaatcataaaaaaatttcatataagatggatgatcaaacgttggacatggaaaccaagaatttagtcttttggatagagcgagtaacgttttatcatctactccgtcgttttaggttataacaaattttggctttactcaaagttaactgctttaagtttgctttaagtttggttaagtttgtagaaaaaaatagtaacatttttaacccaagacaaatttattatgaaaatatatttaattattgatttgataaaactaatttattattataaatattactatatttttctataaacttagtttaacttaaaatagtttgactttggccaaagtcaaaacgtcttataacctgaaacagagggagtaataaaaatatattaatcatcaaaaaaattctaaataaaataagtggttaaacgttatacataaaaatccacgactgcacttaaaatacgacaaagaaaaggtaataagtattgagatagtaccataggatcatgatactctatattttaaaagtacaaattttatatacaataataatatgttgtataaattaaagcatataaattgattttgataaatgtaattggtttttacgtaaacttaagcatatttatttatattatttgcaatcaaccttacttaaaataatattttataggattgtacactaccggagaaacggtttgtactcctggttggtaacccctgtagtcctggttttttaaccggtataacaatttgggactaaagatggatatttagtcctggttagtaacaccaattgagactaaatctttagtcccaccaactgggactaaggtttttttttcttttctcacgtccaatatctccaaatcattaaaaactaacaaatcacatacgcatcacaaatcacaaataacagatagttcacatatcacatatctctcaatatcattcacaaatcacagatcacagatcgcatcacaaatcacagatcgcacaaatcacaatcattcacatcacattaagaaggaaaaaagaaaaaaaggaaaaaaaaatcccatgccgcctcgcggccctccgctctgggccaccggccgccgcttgcccgccaccagggcagccctccgtacctccgccgcatatcaccgtgggccctccgcgcgggcagccgccgctgccaggcctccgcgccggccgccgcttgccaccaccgagaagacgggggagaggggaaggggaggaggaggaagaggagcgaggagagaggaggaggaggagaatgagtggtggggaagaagggataagaccaagggaggaaggacagacagatgcgcaaagagataaagatcgaccgagatatgcacgtggcttggggtgaattttggacccagttggtataagcaatcgggactaaagatttatttttagtcccggttgtttataccaacatggactaaagataattggggcctgacgatctgacaacttcttcaacggggactaaaaatgatctttagtcccggttggtaatgatcgaaccggtactaaagatcaaaaagtacccctaagcttttaaactgggactaaagatgctttttagtcctggttttattggaaccagaactattgtggaatttggtcgaccgtccgaagatggtttctccagtagtggtagggatcgtagaatcggaatactaaataagatttcataagatggtatgtaaataaatagtaagatcgggatattataaaaattaggatattagatatggttgatatcgtttcatcttgattattatcgtaatgtcgtactctctccgtctctaaaaaatcgtcgtcccataaaaaatcaacctagtactgaatatgacatattctcgtactacaaatacgtataaatatctgttcagattcattgtagtataatgtatcacattcaatcatatttttttgataaaggtgtactccatccgtcctataatataagagattttgggtggatgtgatatactagtattcgagattttggatagatgtgatatattctagtacaataagagccgttttggtttgataccaaaaacataccctaccaatttattggcaaattgaatagtatgtgtgttattttggattgaagacaaatatttggtagtgatcttatactatttggtcattttatagaagtttcttcactatactataagaatttgactttatattggtagcaatctaaatggtagccaaataattttaacctaccaatattttagtagtgccaaagtttgcctagactttggcactactaataaattaaattggtagggtagagaaccaaacaagccgtaaatctggataggctgtttgtccaaatttattgtgctaggaagtgtcttatttatctaaaacctcttatattattgggagggatggagtatatataagatagttcgggatgctgacagcgggggtggtgataaaagcggtgtgctcgggcacgcgaaagaaggacggggtgcttttgttcggctggtatgcgatttggcggatgtggctgtggtggtggtttctacggccttcggcagctgtaaccgcatggaaaggggaggaaaagcggaggttgaccatccgttgatgcaaattgcttgttggtcctactggatcggcgacactggcgtgcatgtcagcttttgtgggttcgaacagggactgaaaatgtgacgataaaccggtttgttttctagaaaccgcttgattgatcgatcctgatccagatttctttttaaaaaaaagagaatcggttaagaaaattaattctaatctcacctggtttggttgatattcccgttccagaaggatcattggaggttatcctatacacagtggttgagctacactaacaatgggtatgttcggctacaagggttgcagtgctgctgtacccgcaggaacagtgaagcaagcataacaaataaaaaaaatagtggctggctgcagccagatgttacacctgcctaccgaatagggctaatagatgccgcgtgaatagtggttgagatgctataccaatagattataatagagcatttataacgatttaggctcacgttagaactaaaccctagttaacgggtaacctcgtgccatctccataatctgcaaatgacataggtatatatcctagctaaaagtaactccaacatatgaagccatcgcttaggaagctgaattgtgtgaacatgttgtcccaccaagcaaaactaggaatgtttgttcgatgagtcacctctatcttatgtttctctttgccgttgagattagactctggagcctagccactccgatgtcaatatgtcgatatggcctaacccagcaacaagtagatctaacaacttcaccatcatttatcgttaaagacactgacccaagccactccgcaacttagtaaatctggtgctcctctacgacttccatgtcactcaatcgttgaaggtgcgcaccaccctgagccactctacctctaaggctgcaagatccgagatgattccatgacatggcaaacgggattggggaggacagcatgaacgcattggccacccggggtggaaccaggcctaggacgactagggctcaaactcctaaagcctagctaaaccctaaaccctaggtctaagatccaaactccatgtagattttatataaaattcagaaaaatgtatgaatttgtaaagaatttagctaggtgacaaaatagagttgagctctagacgtggcctctagttggctctgccactgttggtcaccaagaatacaatagcaacagatgaaagttgagagaataggatatgagcaacgacagtggccagtgaggggatggaaaagtgaggggagggcagtggccagcgatggggtagatgaagcggtggtgaagaacaaaggtggggataataacaacaaatgtgaaaggttgattcaaaagtagaagagggacataggagaatgaggaaagagatatttatattttggaccgtaagggtttattggggatatttttgccataaggttgatagtgtaaaaagttccaatgaatttggtaataagaaatttaataaatgctattagaaaattaattagaggatgaaacacaaaattgtttgtattgcgagtggctcgtattatggagctatcatctaataaagggataaaatgctttgcattgtttggtagtgaatggtgtgtggtcctcctacatgactagaaaggtcaagtggcacatggacctagcatccaacaggtgggaggcatggtagtacaatcaagggaaaatttgaaccatgccacacaaattttgcaaaatttgtgatatgccactctgacccatatgtcattgactcatgtgggtcctacatgtcattgagatacgggtggcatatcacaaattttgcaaaattagggtggcatggttccaacaaacccaatcaatcaaaccatctgataggaaattggaaatgatgtccagcgtgatgattagggttggggggaagggagcaacctaaggacctgttttggggagcttctagcagctgcagcttctcacagaatcttcagctcctccaaatagttcaaattgtcacccagattctaagaatatgtagttgtagaatactagaatccaaataataaactataacccaaaagttggaaaacctagcttctccagattctgagaagctagctagcaactagcagattctcataatcttaagctcctcaaagagggcctaagggtggccaggtatgatggtatgtattgtgttatttttttactttaataaatgtagttttatggttcacataaaaattcttcaagggctcaaaccccattaatgttgtcatatggatccgtgttaacctaaattatgcaccatgtattggtaactggtactaaaaagctatgaaagaaattgcatgttttatctggaaaactttatgtattgttaaagggtctgttcgggtgcaagctgctgcagcctataggaacagtgaagcaagcaaaaaaaaaaaaaagcagcggctgaccgcagctggctgcaggtagctgctgtacctgccagccgaacaggcccaaagtatgtacgccattacaaagtttatatgttgaaaaataaagtacgagagccatattgtagaaattatgggtaccatatatgcacacaaacaacttatctgactggcgatagataatggaccagatccgtatattatgtaaatagactagggtttagacattgaattccttgtgtttcaagatatagtctacagtcttagtcttatatgattgtacagttgtataagaaaatccatatcgagttcgattggtttttcctctttataaccttgcgcccctcctccctccccccccccaaaaaaaataaaccctatataagtagggcaaggagtccctcaagggcataaaccacaacaagatcatcggatcagtacaatatctgacagatacaattcctaaaatagaaatagggtattacttctcatcgagaagacttgaatctgtctaaatctttatcactttactcatctactttagatcttatgtggtatcccttatattattgccgattttccaaattgacacatattttccatatctatactttctatataattggtacccactaacaattattggaaactaaatttcaacatgcaagcatgccacatcatcacccactaacaattactattctagcctatttaaaatcgcatgcaaacatgccacatcttcactcactagcaattactctctccgtcccaaaataagtgcaattttgcactatttatattcaatgtttgaccgttcgtcttatttgaaatttttttatgattagtatttttattgctattagatgataaaacatgaatagtactgtatgtgtgactaaatatttttaaatttttcaaataagacggacggtcaaacgttgggcacggatatccacggctgcacttattttaggacggaggtagtactattctaacatattttaaatctcatgcaagcatgacacatcatctacaatattatattatagtgatcaataagtatgtgaacttattcttttcttctatataagccttgtgtattgctgggccttttgtgccaacaaatggcctagcactgatccggcccaacaaactgggttatagtcgattagagcaggtacaatagtaggctataagttataaacatattttaaaaagataaaggaagagagaatagcagcgggctacagatctgtagccagctgtaacacggactccaagatataacatgtgcataacaaatgggaccaggtattgatagtatagtatgcaactattgtatgaattgactattacattggctatatatgatttggaactagtagtgggctatactattagggtctgtttactttgatgtcattttcaaccttaccaaattttagtaaaattgccaaaaagtggctacatttagtttgctgtcaaaaactatataagaaatcttgccaaaattttagtaagttgccaaaattttagcaatgccaaaatttagtaagattagttttggcgtcaaagtgaacaagcctttaaactagcttgctcttagtcgttcggaacgctcgtgacgtgcggtaggctagtcagcgcattggcgacacgtgttgcatcatttcgtgaggaattaagctgaaaccataaaatttttcagcagtgtatgcgtagacaatcccttatttttattcagtattaatttgacgtgcttatagtctctgctctcatgttcttaggcgacgactaataatgtactccctcgaatatttaacgttgttgactttttttaatatgtttgatggttcatcttattgaaacacttttatgaaatatataaaactatatatatacataaaagtatatttaacaatgaattaaatgataggaaaataattaataattatttaaatttttttaataaaataaacaatcaaacatgtttaaaaaagttaacggtgtcaaatatttagtggcggagggagtattagcagtaaggtaataatgtgcctagctcatatacggccgcaagacaacacagctcgccgtgttgactactgtaaattacagtagtaataattactgtacctttttcttaaagataatctacagcaacccttttctgccatcaattaagtaaatcaattcaacatataaacttgtatgtctacaagatctttgaaactctgttgttttttttccgttgaatgcaaaaaccaactgtaaattcacagaagagtaaaatatcaaattgaaataagatgtacacagaattaattgcatccatctcgtcataaagaaaccaagcaaccagggaagaaacaagtgcaagttagcttaggtaaaagcagagaccagttcatcactaaccaaatcaaactcatcttattctcttaataagtacatcgccaagaaactaagaaaagcaaacaaagcatgcaactaagcaccgacgacgagacgtcgtcgtggcgccgtgcacctcatcaatttaactgcaaacgcacacaagccacagctgaggtcagatctgaacactcacacaattcttgaataatatacgcatggtttgccacgacgcatccatgcaaggacttattcatcatcaacaccatgacgacactagctaccaactagctaagagagagagatggccggagagatggccggccggcggcgaggtatgggtagctaggtgtagtggcaggcgaggttggccttcttgaacaaggcggcctgctcgatggcggcggccttggaggtgaggccgaggaggatgcaggacttgacctgctgcgtggtgtaggcgaacttggcctgcttcttggcggccacggagttgatgtacgcggcggcgccctcccggagcaggtcgccgtagcagtccttgcgggtgctgcacagcgcgtcctgcagcgtctgcagcttgctcccgaagaagccgctgcacacgtccccgaacgaccccacgatgctccccagcgacccgatgcacgatattatcttctccgggtggctcttccagaaactgtgtgtgttcatcatcatcagatgatcattagcaacgttaattgcactcacaaattgatactcactccgtttcgaaatgtctgacgccgttgactttttagcacatgtttgaccgttcgtcttattcaaaaaatttaagtaattattaattctttttctatcatttgattcattgctaaatatatttttatgtaggcatataattttacatatttcacaaaagtttttgaacaagacgaacggttaaacatgtgttaaaaagtcaacggtgtcaaacattctgaaacggagggggtatatagctagtgacatatagtttgttcttactcgcagctcccggtgaaaccggtcgtgggcgacggtgagtagccgccgccgccgccaccgccaccgtaccctccaccgccaccgccaccgtagccgccgccgccgccgccgactgccaagaattgagatcgtcggtacatggatgcatgcaagaatgtatatatagacacaaattaaatgaagtacaaatcacttacacttcttttccgcgacgtgatgatctccgtgcaggttcctggtggcagagctctgctgggaggcaatgccgaccaggagagctgtgaccaggagaatcttgcagctgcccattctagctttgatctcttcaacttggagaagtagctagtgaagaagagagatgcttgggttgagtgagtgtgagacactgctcctgcagtgtatatatacaggtgaagggctgcacctaccgtgttgtttgctgcattgcatggacggtggtgtgtgaagtgtgatcgatatgatcgatcttgctgcaatgctgccaaggcataagggcagttggcctccattgaatgcatccgttgatccatccagctcgatcatatcggtatactaatactacagtcatctcctggctggcctcacaccgctagctgaatgatttgcatatggatgcttcattagatcacagttctgtattatgacaaattcagagtaccatcagatttcagtaatgctcctggccctgcacccatgatcagcttggccaatggccggtatcctacaaattaacagaggttacagtatgagatggaggattaatttcataattgataaatgttgctatatgacgctcgaagtttgtgtaatttgttagaggacatcgcaaaaacgtattatgactagagaacaatgaatagtaataataatttgtaagaggatatttccggtctaattggaaagagagacttttcaaaaagataaaaatacccctcggctacaattttttatctccactgtaccgttaggttagaagcttgtggctctaggggcactatcctttttttttatagaatttatctttctaattgggtcgaaaatgtcatccagcaaattactaacttttttcaatccagctatgacatatttctacgatgtccagtagtaaattacacaaattttgaggctcctatatatagtgaaatttgcattcataattacactcaagtttacagtatgaaaatccttatatagctaggtagttggaggctggctttggtgatgatcactaagatataaagcacatgtttctacaaaaccactgatatagcttccttgtgcaggccagtagtacaaaactgctgatggcttatttcctatgacaagggacatgcatggcatggcactatcagcactaaaatggtgtacccgacggaggggattaaattggattcggcgcttgccacctactcgctatctacttaatcagatcggactatgcccttaattagatatggccctttaatttgccaaaatggaagttgcgacgtcgcatacgtacgtgtattgcaattggttctaggtaaatattgtagaatgttactcataattgaaatatatatctatcattgatttcttttagggttttctagaccagttaattaattatgtttctcaactgaaaatggcattacatgatcgatcgatgttgtctgccatttttttggctaatccagtgactttgattctattatgtttaatccagcattggttttggtttatgtactcctattttaatttggtgctttttacaggtacactatactggtagtatatattgccattataaacaatccaagagttgtagattgatttttctacccgcttaaatcgaatgagtataaaattaaaagggtaaatgatccatgttttatgtgtttctctagttatctgggttaatgtttttatgtgtttgatgaatctatcgattctatcaagagcatatgattgtgccatctattcgaccgtatccggtcagtaatccgatctgatgcatggacaattatgattaccatcggagtgaaaatatagcatgaataactattgatcattttctatttttgcggtagattcccaacacctcattttatactggtaatatatactaccagcatattgtaccataaaaatccttcaaaaaatggcacttctctagtactactagttgttgttgcatttgcatatgtaaaatgttctggtagttttctactagttgttgcattttgcatatgtaagatgttctggtacctatgtatacatccatcaatccatgttagtaatggcaaacattatactagctgctaccagcaaaatcctgcaggtttcctgccactaggtgctgcctgcaaattaagctgcatgtcactgctacatttcgagttgcaaattaatggcagaatggaacccgccgccatttttgttttgaggaaagagaaagtactaatgctttcacttctatgaacttaacaataaagatatccaaataataagctcacaagaacatcagtacaatatacagtgtatagagtacaggtgaattgaccatttttcctagttacttttactttcggatttgaatggtacttgcagctcaatatcaagttagaatacttgctgacacgcaattaaaaacagtacagcccacctctattaattcgatatttaaggctcaagggagttttcatctgagatggagagtttgactactcatcgatttcatattataaatcattttgactattttactaataaattttcttaaaagattgataagtttataaaagaaattagttaataacatcaataacaccaaattaatttcattaaaactatcatctaatatattttgataatatgtttgttttgtattagaaaagttgctatatattatatttttctttaaactcaatccaacttacaaaccttagaagtaaagtgacttagatagcataagtgaattggtggtctcgaattcaaatcttagctgatgcaattaattaaaggatttcccgcatttttatcaatttaaaatttttggttcaatcggaccagtagtccatgcaattgacataatatatatttcagaataaatataataatcatgaactttttttaaagaaatggatgcattttgaccgaacacaaaggattaatgaaatgggacaattaaccttataggagtattaatttattcaataactaaatcatttaaaccagagggattttttttttcagaggggcatttatttgctctaccaatttcacctactttcatatatgcattactaaattatggagataacagaacaaattcatctttttttcttaaaataatcacaaattgatgaattaattaaggcaacttctaacagcactcggatttagtggcggcgcataaatactagctataaacaggatgtgatgatacacttattaacatgttgagttgacgtgaaggggacagcctgatctcatcaggactcgaaattaactctgaattagttagctggggctcgtctatagagttctatagtacttccttcgtctcacaatgtaattagttattctatcatttatattaatgttaatgtatctagatagatatatgtctagttatttagattcattaacatcaatatgaatgtggaaaatactagaatgatttatattgtgaaacggagggagtatgtatgtttgaatataatgctataaacagtatgctagggaagatttgggtaattgcgtagtctttgtccaaataggaaggaaatttagtaacatatatggaagtaatatatctagtactatatttttttcatgaccgatgaaactaacacttcaaatttgttacagggcagttattaattaattatacatctaaagctttgaccatgcaattccttggtaccactactacataataattgacaagaatatttgcaatagtagacaccaaccagatgctgattaatgaagtgcagtgggaggaggaaaagaatctgttggagacttggagtgtactttgcttgagaagatttgcttcggacagatgccatgtgatctctccattactggtcgacgaaacagtttaagggccagggtttcgggttagcaacttgggccaaacggatggcttaattaatggtttgtacaatattgatggttcaactaatgagtactacaatgatgcgtccacacagcacacatgacacatctctctctctacttgttactcttaaaggtgattaagacgagattattctcactgatcgatgctgatcataccacaacattcagacaaacattactacccttttgctgtttcagaaattaaatcgctgtcattcagaaggtcccttcaaaccgcacattcagctatctgttggtgatgatcaatgtgaaccaaaattaagcaaagcatattttgctttagcagaggctagagctaaatattacatccctcttctgtccctgcgtcacaaaatcaagatcgagcacctccatcatatatattcggataagcatctatttaggctctgctattgaacaagttatacatccacaatatggcagcttatcgatcgaattataaatatagtatgcaaaacacgtgaacttgttaagcacttaagtctttgcctattttaattagctttgcattatataatcaaagcgattttgaatttttttaaaagttttttttaaagaactatagttgcactataaaaaaacatacaaaaggggatgacaatatagatgctggaaattaaaaaaaactaatacctataaacctttttccgcctgaggtgcgtgcccacggggcaccatccggtagaaccggcacctttgtggagaataggtactggtttttaataggaaccgacacctttgagtgttatcccatcgtagtagtttttagtggggctaagacaaaagtgagtttttaaaataaatcagcacttttaggtcaagagcggagctgaaccacctgtggttatcgttttctcgccatccacccctctcattcttcatctcgccactctctctgaaaccaccgtcccacctccttttcctcctcctcccctagtccataccttcctgttcttccttcacgccggggggtcacggcggtggcagcaatgagatgtgggccacccctactcctctcacctcttcacattggccacccgcgctcgagggcggctggatccaacgccgccccttcccaccggcgctcgggggcagctaggtctacctccgcccctccccataggcgctcaggaacggttggatcaagcgccgcccctcctcctctccgccccacgcccttgcaaccagctctcaggggcggccggatctggcgtggcccctccccacaaggtgaggtgggacaaactttgttttttcttcgttcatcttgttattataattggagtgatagaattctttatttgtgccaaaatttgtgattcaaatgctttgatttgtgttgtggatggatgtaggatggatgaatggtaatatggtgatatgtgggatgaggagttgcttgatgcttcggctcaattcaagccaatgcattgagctggcttttttatcctttctgaaacgtcaaagctgctggtctttaaaccaacacctttagtcacctcaaaggtaccgtctgctaagtactgattaaaagaaatccggaattaccacatatatccttggaaataaaaatagtggtgaaaacccttaatactagttattcctaaaactaaattcgaaatttaaaatacggagtaatctatacactaggccctaatagagccagttaactattttagaatcactaactctcgagataattaagattctcatcgttacgatagtcataggatttagaaaataaagtaaaagtcaaaagttagcttctcacctattacttaatttttaaaatacgaaccatatatagggacggttcaatttgatgttattttcaactatactatttttttgtaaagttatcaaaaaattgtctacgtttagtttgttgtcaaatttggtcaatacataagaaatcttgtcaaaattttggcaatatagcatcttgtcaaagttttggtaatggtaaggtttattttggctataatctgaaacatgcccatagtctaaagataagacagacatgcaatgaagcaatatggtgacaaagaggaagcaggagtatatatttctaggatggtgacaaagagaaaggagagtgatgatcaagaacggagtagttggatggtgaccaacaaatccttcattcacttccactttggcctaccactactgacgatgtagatgatgcctactactactactcatgcgacccttcttgtgcttgtatggcatagtacgtagttgggcagaattcctggatgaaaagtggaaaactctactgtccggccgggcttcgatccgggcatccggggtggtgatcaatcgcgatacatattatgtgtgcgtttgcttgtgtagccaggttgtacgtacgtccccgtcacggtactgtacatgtgtgtggtggtggatgagttgtcgaaaactctcaatacggaataggatgaatctgtggaattaacccgtacgcgagacatatatgtacaagacattaatattctagcttcacctgtgaagctgtgacgtgatgacgccagcggtgatcatccgaaactgaaatgagcagagaaaacagcggtgctacttgttagatctccatcgtttggcttatttcctaataagccaaaacagcttattagaaaataaaaatgaatttgtaggtaaaacttttataaatgtgttcttggtgacttaaaagccaatgttgaaaaagaaactacgttgaaaatatctcaaaatcaatctcaaaattaagcttcaaaatttaaattttggctttttctttagctgattaggctatccgatgggagccttaacctttatgcgtcaaaagtgatcttaaccattaatttataaaattgtactactcctacagttggattagaaaaaattaaactgtcttatattggttctaataccagtacagagctttgtaacacatctcttctcttcacctatatttgcagttctcaagtcgtattgcccgtagtttgttgccggcaatcgttcggttaccgtgattatcaggctcatgcagccgtccgttcatgggctgggccgccgtccagtgcaagtgccggcaccgctcgacttgcttgctggcctgtgaacgatcgacatcatgggccgggagagaacctgctggaagagtatgaggaaggaataagtacattttccattcctattcctaatctttacgtcgagcttaatcgatatccctaaactgtaataccagaaatttatacccccaccttaacaaaatcatccaagtcaagtctcatggcagtatcgattggtttttgctgatgtagcatcttagttagtaaaaaagaaaaaaaaattaaaatttaaaacgtggggcacaaatgtaagtggacttccacatctccccatctatccagggcccacacgtcagagtcaatccacacgctgctagatgccacaccggcatgtgaagcattttgttcgagtatggtgtggttgtgtcagcgttcttaatgagagaatggagctggaggctgtggttgtttttccatggacactcctgtcgtgccccgctgttctcactgttgttgcgcgattgcctcgtcagatgtctccagtggtgaggcgcactacacaacccttcctaaggaaccggtctgaaaagttgagccgcacgttcttgctatggagcttgaaggtctcacggtcgtacgccatggcagcgtcctcggcggtgttgaaggtgtcgcgtgtggtaaagcttctgcggtggtggcaggaccgggagcagctttgtcgctctaacggtggcggcacatgaaggggaaaatgtgtcgcgtcgacagcaatgacgagatgatgcagattggagcatcagaagccgaagaagaaggacgtggagagcaacgacggggaggtggtcgggggcaccacccaatcttcttgagatggcaaagcaatgccgctgatgaatcctccaaagatgtccccaatggccaccgcaactgtatgccggtcacccctttccccttccacctcttgccgccgccaccaccaccaccaccaccactgccgctagggtggtaatttccccgcatggtgcggggatctagcggggacccaccgctacgggggctagggcgggtcgaaatttctactcgtcggtgaactggggcggaaccctgcaattttgttaggatgggagtgggacatggaattaatccgtgggtcaaacgtgggggccccaaatggtccatcaaaacacatgaacaaaggccatcattagcaggccggcccaaatactctagttgttaataaatgaatcaaaccctaattcccatccatctcccagttgatttctgaacatcgccgcaaatgaccgctcggtgtgatgatttcccagaccatggctcctgagcaacgcagctcttcgcgttcctcacacaaagatgtgagtagctgtgtgatgcacataggcacttcgccaagctgagcatcgggactgtcgcatccatgcataaggaggagaaagtccttttctaagtgcatacttctcgaaccgctaaacgtttattttagcaaatctatagaaaagttgctttaaaatatcatattaatctacttttcgagtttaaaatagttaatatttaattaatcatacgctaattgctcatatttttttgcgtatcttatctttattatctcttgccctcctctaaaacttaataggctaattcatccgcatcaatttacaaaaggctattatgcaaatatgctgtataatagttgagcactttagcccttggaggggctctggccattgctttatgtcaaaatttgtattcctcgacttcctctcactttacttgattttaccataccgataatgtatattgctgtgtagatttccattaactttggatagaggtttagtaacatacttaaactttaaataagttgctaattttctttgtttggtgttgtcatgctggtgtgtcgtttttacatctacctttgtttaattatatcatattaatttcaaaacaacaactatgtaataagtggatgtacctttattgaagtaaatgccgtgtttatatcaattatccttaaagaataatatatattatgtctatgttaatagaatagtctactcttctcttccctcgccttctctatcctctaccacagccaattaacaatcggatttgctaaaatgatgtcgccatattttatggctgattacagtcgaatttctgaccgtcagatgttgttcagtccactcaggtccttagcatctctcggctgtcattacacgattaattaaaacttaacatgcttcattagtttaagattttgatggttttactcatatgtatctgtatagtatataaatatatgtaatctacaatgcaaaatatagacgttgcataattacattgtacttacattataattacattgaacttacatatgtaattttgaaacttacatgataaatacactaaaattacatatgtatttagggacttacaatgtaaatacatggcgactattt

SEQ ID NO: 27509 - DNA, 4173 bp, Oryza sativa
cctttccccctcctgggaaaatgatttttttgccagctaggaaaacgatttttctagtagtgattgtgcattactggagaacagatctttgctgggtcagcctaaaaccacattagtcccaatttcaataggattcgggattaaaaatcatttttttccggttaaagagccgcacgcacttttatggactaaagatcatttttagtctcggtttagaaatcgtccggccccttactatctttagtcccagttgttattaccaactggaactaaaattcaacgcatattatataatcccttgctcgtattttctcctcctcgcgcgcaaacacttcctcctccctttcctcctctctccactctctttttcctccctcttatccttttctttttctctattaacctctattttgcagagagtgagcggctgttttgcagagagcaagcggcggcggccccgcgcgggagcgggcagcggtggccccacacggcgacggtgacaacgcggtggttgagggtggcggttgatttgtgatttaagtgttagattagttttatgtgaatttgttgatttgtgatgtctttggatctggaaatttgtgatgtgaattgtgactgtggatgtggatgatttttgtgactgtggatgattttgtaatgtttatgtgaatgctgatgattttatcgtggagtttggttagaaatcaatatgcaaacagcaacaaacaattaaaaaagaaaaaaaggactagagatggagtctcagatttggggtcccggatacgtacatagattaaagggggttacgaatcgggagtgaagaagggtttttcagcggtggtgttttagcaaattgccacaaagtgtgtcatatgttaattaagtcatcagaatgtcttataaaactacggtgttcgatagctaattttgtcttgatcgagcgtaccaaattgacaacacttaagttttctttgcatggtttggttggacatatgtagaacgtacaaggagtcaaggacataactacacagagcatatccaataattagttttaaacagctactatttcaataaataacgaaaataatacgcatcccttttccacgtgggagtatgaaggcattaataaaaaaaaatattcttaacactatacttagtcttcaaataaaatttatttatcctatatatatatatatatacacacacacattttgattataccataatgtttgttgcaactaaatccttaaagatcttatataattatattctaatgaaataaatatgtgttttgcgaattaattttatcatgtaaattactttatcatatatatgtatattatatttagatttgattaaattactttttatacattcataaagttgtgaatatagttctagtttttagttagttataatttgtgttgatttgatttattttttatatatacgcatgtttttaccccaacaactacaatccataattttcttaagggcacagaccacccaggacagtatcattttggccccacaaaaaaataattggccgccacccgagcattctcgattcttgtatcaacagatttatttttaatgttgtgataacttatttttattgtgccaagttacttttatcatagtgtaaattagttatagctaggctttattgaatttaattaccttttaagaagtaattaaatagaatctaaatatatatgataaaagtaatttacaacatatatttctttaatcagaatataatcatgtgagatatttttataaatatttaattgcagcgaatacaacagtgtaatcgggttataaaaataaggccgggtttaaaaaaatgtaggttcactactacataatcccaaatagggaatggctcataggtatcgattcatttaaaaccgacacctttaagcaactatatgtgtcagttatagagaaaaaccggcaccaataatattggtaccggttttttaaaaaagaattgacacctaagtaccaattaagtaaaaatcaaatcctagccaggattttttttgtctctcctttgtagtgcaaagggagagagcccatggtcatccttatccactcgcccaccccttcacctcccgctctctcgcccacctccatcgcatccctctctctcgcccgcccctcctgcctcctctccgacgccatccctccggctccagtacctccctcctctcccctcttcagagctgcagcccctcctcccctctctgacggtgcgggtggctacaacaatggcaatggcaacggcgggcagatccgtcagtggcagaggctcccgtatgcggatcaggcgatggcacttctccggcgagcggatctggcagtggcggcgacttctcgttgattttgttcatggatgtttgtgtacttggatgggatctcatgggtgattaagagttgcttgaagcatcggaccactttttttattcttggaacctgttgacaaaaattccatgctcagacgatggtgttggaactgtgttggcgcgttggcgcaaactaagtcaacgaacacaacggcctgggagattttcttagctccattgcaagtccaaaatttgatgagatgcaggcgtgccaatctatttaatcctgcaactgagaagatatgtaaacaacagatcaaatagccgatccgttgacaagccgatggagtagttccagccgatgtcggtagggttttgagcaatcggctatatatccaatgtatattttgacacttgagtaaataataatataaagacaatcagctgatgataatgtaatataacataattcaacagaaaccaaccagcttataataatatgatagaataaatgatccgatgattaaagcatacatcgactgaaggttcgatgtcagataaacaatgaaacctttgttttgatcagctaaaaccaacttgtatgcaatccttgtaagccgatgcaacatccagataactcatcagctgaaaccctgatgaaacccttattataatcaaagatatgttagccttttgattctaagcacgactagtaatgatgcattgcaaagtatgctaagaagtataaagtcttagctaacctaatctggcaaagcaatttagccgataccggcaaaaaccctaaagcacatcccagcctatacagttaatcgagctatcaaactagattaactaagatatatgataaatagataggcaaatatactaaccaaaccagagcgatgcaagagatcgaagcgatgaagccttgaacaacaccaatgtagccgatacaactgtctgggccggcaaacagtaggacttaccccttcaccgaagatcgaaagctgatgcagccccgtgtcaggtgccaagtttcaccggatgataagtaaaaacctcgaaaaagatggtggcgatacgccgagagtatttttattgatcggagatagtttacaatgaccccgggtgcacaaacttatacccatgggtagatacgagtcattcttaaacaagaaataaattttcctaaagattaaagggaaaaatataaagttcttatcggacactaaacacacttttctaaagataaaaggaaactactaaatcatgcctaattaatatatagaattacgccgtcatgccacgtcttcacgattccttaaccgaatccactaaacaatcttactaaattttggcgttaacataaccttaaagatgccagttccaaaaccggcactttttatttctcccataattgacgcctatgtgtcggttagaaaaaccagcactaggttcccagtcagcatctatttgtatttctgtagctgtggttgtcaaaaaaagttaatagaaaaaatagataaaacagtaccttgcactgtttgaatgttgccataatatatgtttggccctgcttagtttgacgatgtcataataaaactaaatcagagtaaatagccactaccaactagcaagcttgtactggctatatgtgtatcaagtactatcactgttgcagtgtagctagcagttataatcacaataatttatatgcagtcgattgacacttgttttgacttgatggagcataattgctacgcctttagactttccatgatatctagctagagatctaatataatgggtgttcagaccgaacagt

SEQ ID NO: 27510 - DNA, 3329 bp, Oryza sativa
aaaatcagtcaagggcttgattgtctagatattatgtttcttttcatacttagtgctgcatcagttaagtttgatctactaagtcgtgcttagaaccataatctctagtcttcttcttggttgccaataagggtttcatcagggtttcagccggtaagttatcaggacgttgcatcggtttataaggataacatgcaagttggatttagccaatggcaacaaaggtttcactgtttatctaatcatttagattttatgacatcggatctccagccgatgtatgctttaaccatcggattagtgtttattctattatattgttagccgattggtttctactagattattctattgttatcatcagcggattgtcttcatatcattatttacatcgtgtcagactctacattaaacatttagccaatagctcaaatcctatcgttatcggctggtatcagcataggctggaactactccatcggcttgtcagccgattggctctttcatctgctatatatatatctcgtcagttgcagaatcaaactgactggtacgcccgcatctcatcgtatttggacctgcaatggagctaagcagatctcccaggccgttgtgttcattgacttagttcgcgccaacacagttcgggcaccattggctgagcgcggatttcttgtcaacaacgtttcaggctcgattccgtaaagacctttgtatatggtgggccccgtcaagtttaatatacaagtatatcccatatgtagcgttattttgacaagtagcccttttaagatgaccgcttgtagaaatatatttttgcaagcggtttactaacctggacctccgacttcagtttcacaagttttttactttgtctgcttaaaaaaaaataggttggcatcagcaaaaatctttggtagcggagtataaagtcaacgtcatttaagagaaaaggacaaattttaggtgaatagtgtcatggtaatatttagccgaaatttgtttcttttttactctcaaataaaattgagtttgaagtaagaatgtattccatgcctacatccatctctattaatttttttattaatttacaaaacttttcgacctgattttaaagggtttcaccagatatgttctcttgtgtagctagttaactttaaaaaaaatacaaccttcgtcgtttttttatatatgatatgttgactttttgcacataacgtttgctagttcatcttattcaaaattttggtataaatatgtaaaagtataagttaaggttagagtttcttttttttttttataaacagtataaatataagcgcccacaatgagcacatgttatgaacatacacgcacaccctagctctatgagcaccttcgaagactggaccggcatagtttgagattgatgaagtcaccacgggtgcctcactgtcgacaggtatgtcgcaggttagttctaccacaagaatgtaaccaattgagttacgctcacttggcggttagagtttcttttatggtaaaacaaatcaaaagaaaataaatgatatatatatatatatatatatatataacgagtggccaaacattacatcaaaagtcacaatgttttacaatcttttttctttttttaatgattgaacactcatattgaaactttgaccaataactctttttcattctatatacattctataatacttttatgatacagtaggtttccaggtatttataaatatattataggaaaagtagtgatcgaagtttgtagaagcttagtcaatgctttgaattatttttttaaaaaaggaggtagtaagaaataaacctgacaaaagagtttgaacccccactaatactactaagtgatgtggactagggttcacgatcttccgaaagattctgataagcagtcgatttggacggagtcatgacacaactcgatccggcttctgaacgaacacgctcttaagccccgcaatcgcagccccacgtctcctccggttattaaccatgtcgaaacgtgattgacgtcgctgataaggctaatccctgtttgcgatacgaagaacacaaacaagaacaaggaagaatacaaccaaaattacagatgaatgattaagcttacaagttgggatcttacaaaccaatctagcggcgagactgttcttgatagaataatctaagcaaaacctgaaccctaaaggtgacggcgggtactgatatatagagtttagggtcatgcaaacaacccttgacgcaaccctaatgggttccaacacaatatacggtccaaaggcccaaatacggtgacgcaacaccgggacaaattctaaacatcaatttgtttggttgattcctattgacttgaaaagaatttggacgtgggactagaaccattggaaatgttatcttcttagctttccatccatataaagaacaccctaatccgagcatgtatgcgatctgggcgtccgttttagtgcagactagtcttggactccgaataatactcgaagtcgacttggttgagcctccatattgatttgggtgcccttgatgatttccacgcctctaagtctttctctaagcgtcgctttgtcctctccatgattcttaatcataatataatcattagataggaatctattctcaaaatcatgtaaaaaaacgtaggaacaagctcacctctaaattcaattatcgtgcgcgagctcttgtaattggttttttaatgaccggtggaggattgttgtgtatatccaatggagtgatgtcctcatcactaaagaaacttcttttataagcaacagagagacgaaataaacaagactggtatcaaagattgttatgaacttttgtaaacaattgttttctcccaagtgttgcaacggttctttccgaaatttatccgttgcatccatggtagtcgctctctcttcttgacccggtaaacacaaataaacatattcactcactccgtcactcggagaagaacaaattaattaataaacaatggagaatttgaggtaaatcagattcagatagatatatagatagatggatggatacagatgtagtgagattgggcgaggatggagcgttgctgacgacgacaaggacgtcgatggcgagagaggagagaagagcgcgcgcgcgtccggtgagacgtcgccgtcaccgcgcgctcccaccaaccactactaaaacccccccacgtatctcctcctctcgacacggtctctcgtgctctccattcgagctcacgtagtggctaagtgtttgtgtgtacagttgtttgatcagctcgccattgcgggctgcaggaa

SEQ ID NO: 27511 - DNA, 2488 bp, Oryza sativa
gcatctggctcggcacgttcccgacgcccgagatggcggcgcgcgcgcacgacgccgccgcgctcgtcgtcaagggccccgccgcggtgctcaacttcccgggcgccgccgcgtccctcccgcgcccggcctccgccgccccgcgcgacgtgcaggccgccgccgcgcgcgccgcggccatggcgctcgacgccgtcgtccccgcgccgccgtcgccgccgcctccgttaatgccgccccaggcatcgccatcagaggcggctcgcgcgcacgcgctcgttgcccaggtcgaccaggacgacgacgacgaggagctggaggagatcgtcgagctgccgcccatcgacgagctcgacgccgcggcagagctcgtgttcgccagcagcggcgctacgacgttccactacgaccccgccgccgaccagccgtggtacgaccagccggcggcgtgtctgcaggacggcggcggcggcggcattgccgtgcacgacgcgctcgggttcgagctggaccatgtctgggcggacggcgtcgtggcgtccggcttcggcgcgctcctgtggaacatgtagtactactatactactatctctctctcctttttgacctgtgattctgtgtatatatatatagctagccagtaataatctttggcttatggcttatgagttctttctctcttttttgtttttctctgggtattaattcagaggcaggatcttctgaatatgcttcattttcatttgacaattttaatagctatatttatatgatattactatgagctagatggcttgttactggtgcctgtccattattaatacagacgcatcagtcatcagtaatatgattaatgagctgtcagtaagataaaaaaaagaacactacacttgtttcattctatatttgattatcgcattatttaataattcaatcatttgatattataagtcgtttgacttttttcttagtcaaacttcttaaaatttgaccaaattttatatactattattttcaatacaaaacaaatatgtttgatcaaaatatatttaatgttaaatttaattaaactaagttggtgttgtagatatatattactattttttcctataaatttaaacaaatctaaagaactttaattaagaaaaaaaagccaaacaacggaggaagtactttttttttagaaaatagattaaaatccaacctctacatccacaataaatgtacacagcccaacggaggaagtaccttaaatatcttttttataaatttattctaacagtagtaaacaacgtcgtatattcaagaacagagttagtatagctcactcctcgtgagatttagtatagctcactcctcgtgagattatctcatcaatgagcatgcatgatacatcgacaggcaagaaatgcaagcggttgaggaggagacgaactcataactatcagagaaaacctgtgtgcgatcgatccgcaggaaaaagacctatctatctaggttgttccaactcccaaccaacaagagcgtaccaaatcatggcatgacacaagccagagaaagcttaattaaaacatgtggttcacgaagctcaactcaagcatgttcatgatggaacggttgctaaacgacgtatgtatactactgtactccgtatgtactccctccatcccaaaatatttgacgccgttgacttttttttagacatgtttgaccgttcatcttattaaaaaaaatttaagtaattattaattcttttcctatcatttaatttattgttaaatatactttgatgtatacatattgttttacacatttcataaaagtttttgaataagacgaacagtcaaacatgtttaaaaaagttaacagcgtcacatatttatatttaagaaggagggagtaagtaggtacgtacacatgcatgcatgatgcatggattgctcccagccaagaacgtgtgtacgtgtacgtgggtaaaacaagacaactgaaactgaagctgctctgtcagactgtcactagctagctagttgctgtcaaattaaatggtgctattagactttgattggagtagttcattaattcgatctgcaagagaaggacaagtagtgatcgattgattggcatggcacaggtggctggctatggcagtaataagctgaacaaatcaaatgggaatgctctcgcagaagtaatttcgtctttatgcagataccgtcgcatcgtttttatatgttgtttaaataattattaaaaacttacttcttccaattccataattcctgatattttttacaatgacacgatcttcaaaatatatctttaactaagtttttctattataatatatacaatcaataaatacatttttacttttacttttacttagtactttacaatacaaatctgtatatgatggtctatgcattaaactaacatatttttcaacttattgaaagtaaaagttataaaaatttgggctgcagga

SEQ ID NO: 27512 - DNA, 787 bp, Oryza sativa
aattcctgcagccctccgtgctctatggaacaatcacctagaagcaatgtcagaagactatcgtcgcaactattaatgtgcacacacagtgcaacagatggttctaataaatatcagagatatgttgcagtcaatggggaaagatatacgatcgtttcctttgcccgaaatagacgagttacatgacacgacaaatggtttacctagggagatcattgaagaatccacgattaaggtagaccctcaagatgtaccattatcagactccctcaacaccgaacaaagggttgcttatgatgagattctagctgcaattgatcgcaaggaaggaggcttgttcttcgtggacggcctaggaggcacaggaaaaactttcctatacaaggcgttgctagctacagtccgcaaacagggaaagattgctgtggccacggctacatctggagttgctgcttcaataatgcctggaggaaggaccgcacactcccgattcaagataccactaaggatagatgatggggctatttgtagtttcacaaaacaaagtggaacaaccaagttactttagacagcgtcgctaatcatatgggacgaagcctcaaagattcaactttagtacaatacaagtataaatgatactctagtatgggaggaagtaatgccatgtattgagaaattatactgttcagcatgttcaacgcaaatatgtgagaatatctgtttgagtttttttttacaaaatatattttcattaattaggtgcattgttcttcccgatacttggaaa

SEQ ID NO: 27513 - DNA, 13524 bp, Oryza sativa
  unsure (1)..(13524): unsure at all n locations
cgcatattttccatacatttgtgtatcagtagactataatagttctggtagtatgggatagcaaagaaagctgatgtagaaaggtctcctccagcgtcactcaaaatacagtagctcccgaatacagtagcctcccataggccatgtaatgtatattccatcaggtaaatgtgttctgtttataaatatttaacgcttaaggtaaaatttagttacatttttaaaacttaatttgaccatcaattttatttagaataagcgcgttcttgtaatttaatttatagtggagagtaaattttataaaactatatatgttttgactaaactgtctcaaaactgtagatttaaaaatgtgtcggaaaactatagattaagccctaaatttaaatttatcataaaactataaatttaaacatcgtattagaaaattacagatttaatgacaaagctatcaaagaactacggattttccccgcaaaaagaaaaggaactacggattatggagtttatatccatagcactgttgaggttacaaaagttatagttttctgattaaattgattttaaatctgtagttatctgatacaatactttaaaagtttcgtaaaaaatatggtattaaatctgcagttttataatacacattcttatatatgtatatttgtaccagattgattaaagtacatatagttttatcaaatttactctttatagcattatggcactccattcaagagttcttatttgnctttcatgcccttcttttagaccttaaaatatgaaatggatatattccttctcatataaacatatacaagaaaaggataatgataatcctctcattgactattccatttttatttatgaatggaaatccatatccaacgaagacagattttcgaacttgctatcctttataattttcatgagaaacacatatgcatatttttttaaaaaaaaagactaagcaattaagagatcgttgatgttaagttttatcaagtctcgaaatttagtcaaatactctattcatggttctaaatgcccctgtttgcaggtagctagcccaaaatacaggcagtgacgtttattttcttgattgcccttgaggtcgacgcctatgtctccttttcctctttggcgaccgatgtgcacacacggtgcaggcgcacttgttgcgtttgcttttgtttagttacctttattagctgacgagcctagctatttcgatccatatatacatcttcacgcgcgtgtgtgtgcaggagtcttgtttgtcaatcattgttaagcctaaaagcgcagacgacacatgtaatgccggctgcgattgtgccgctagctattgagcggagtacatattttttaagataatggaataaaaatcacagcctctacatcatgtgatgcacacagccgaactatcgagctacatgtgtgtgtatatgtgctcctctgatcatcaaagatggaaacactgaaagaggagtagctatctatctagctttctttcctccttcctccttttggtagtgaagggctttggaccatgtcagtatacatagctagatactggtccctgcagccgtgcgggctccctaaaccgtgggcaaaatgcaagattcgaatataatgtgctactaacacgtataaaagtgaatttattttggaacgggcagagtactgctgagctataacgctgatcatgcatgtatttttgatttcccaatctttcaaatttgtattcagttgcatggagcatatggatcactcactttagccaaaaagtttaaattgacaagaaaataataataattcacttatactttcatagaatatactggcataactctatccatgatataagctacgaccaacttaaaattttaaataatttaattggggttcctttcatcaaatccgtcactcaatttgtacatgtcgcccaccacctctcatcatcctctcacacctttatctgacatatatccataaaggtttagaaatataaataaatgcaagaaaacatttctcatgacaaaactattggtgtttattttcccacatgaaattataatgctagtttctaaacaacgcgttaaatacgagtaacctttttgcgcatatcgaaagtaaattatcaagatcgagcaacaaaataaaggttcaggacaggcccatggtggcaccccctttgttccctataaggtcgatcggtcgatcggtcagccggtcaagccaaccttgatcgatcttgtattgccatcctacactgcaaagcacgccattggagagagatcgatagatatagatggagaccccagtgatcgagatgggccgggagagaaaaggaattaggaaggatggatggatgagggtgtggtttggaagccgccacttggtggagcagctttagttttgctgctatggctgctttagcctttaatggaattattacaatcgtgattggtcccaatccaagatggcatgcatcaggagcagccatgcccctcctctgcctgatgcaggcagcagctgaatgctttggtataggagcccccacatgaggttgaggtttaggttgtgtttggttgctagacatattttactgtagttaatttgtcacgtctaaagttaagcgggtttgatcacattggcagctgtttggttgtagccacaattgtagcacgattatcctcctataaattaggtcccacacgtcattaactcggaaatgtgtggcactattctcttagacttgctaaggcatcattaaaaatttgatcgtctcagcttagacatatgtggtaatatttattggcaaatggtggtaaaacatgactatgaaccaaacacaccaattttatctagcttagaaggctatagagagctacccctgtagagcgatcagtctcaggtcacgagccttactcactaagcaatgggaaggatcatgtagccgtcttttctctcgatctgtggctactctagatgcatgtttggattgttttggcatatagggtatgtatgggcagcataattattgcttaaagcttagcgaaagcccaaataaggtgtgctatatgtgtatctcctctagctaacttatgcctcctgagctcgtacgtcctttgttctcatccaaagaatcctttaataattctgctttacccctcttgtcacctaaaagaaatggttaatctaggttaggttgctacatgcatccatatctgttatatatactttgcgaggttgctgattccagtaactttaacgatacgttcgactacaaatacagaatacctatattgcagcaccgtcgcatctctcatgacttgtgagttgacgcctggagccccacattgccaccactacaacaaaaacccctcatgcggaggcattttgtagaagcgttttttaagttgcctctaagatcagaaattttattatgtaagcacattttttagagccactttaaaagttgtctaaacaatttttactcaggagacattttcatacattttgttaaattttatattgtagaggcattctttccgtaatttaaaatatgtctgatatataaagacatttgttgaggtatttttaaactttgagagacacttcctagaatgataatgtatactaagagacttaaatataaataacacaaggcacaaacatataaatattttttaaacaacacgcacaagataatgcgatgttacatattgatatagcagaaaaaaattacaaaactagaaccctgtgtctacaccatgtgtctacacccggatcccgctataattgggacaggaactcaacatcctgaaggaaagcatcttctgttttcaagaaggaaagcatcttctgaatgacgttttcaggaaggatacggcatcgagagtgccgccgccgcctgtcctagggtcaagacgtggttttcacctagagaaatccatcagggagtaggaaagatcattcaacaacactccaaggggaaagtgtcaccgttgctgacccgatgagtctaggcttttgcctatgatctttctacttccccgtgtcgaggatgcctgccagacatagagccaccaccaaccacacttcttcaacgcgcagccactgcgctagctcctcgccaccggccgaccatcaagaaggtgctcgacatctggcgtgctccaaatccatccacgcagttaggttggagagggagagggtgagagaaaagaatggatcccctctaccccgcactagccttccaacgtggccatctcgtggtggcaagacgccaccgcaagaggagtagcgtttggatcaggaccgtggtaagcctacaacgcctacctcacggcaccaccatcatcgtcgtatcctgtcgtggccgtgccggattcgacgcctccctcgcctggggggagggggggcgccaccgccacctccacctctagacctcactctcgttgtgcttgatccgcctctcctgcgccagaaatggggcacccggtgtggttagaccccgccaccaccatcccggcgatgagctccggcaatggcgaggtggaagggaggagggaagggcggcagcggcaagggctagggttgtgcccccgagccacctgcacgatgcgaggaccctaaatttttttaaaacatataagtaatgatatgtttagttggttagtgtattgaagataaaaatgatttgtccaagagatcctaagttcaaggattggaaatagcaaaggaaatcattttattcgcttcttttacatgagtttgatatggctatggtataatttaatgcctctagaaaatacatctacccctttatagacattttataaaacacctattcgttcatattcgtttgtaaatttatagacattttataaaacacctattcgtttgtattcgtttgtaaagacaattcgctataaggtacttattagttattttttaaaatgtctttacaatattataaaggcatttgggaagtatctataagtacttggaaaaatatttctacaaagcattttcttgtagtgcgcactcacctataaaggcatttgggaagtatctataagtacttggaaaaatatttctacaaagcattttcttgtagtgcgcactcatctcaatctccaaatccacgttgaggagcaggatccatcctggcgaccccacgtctctgattttgatctaagtatgtttggggttctgccaagtttttagtaggtttatttgctcgggtttgtcttccatgatgtctatggagttaaatttatactcccttcattcaaaaatataaggcacaacctccttaacccaaagaccaagaaataattattatcttttatagtttggatcatcctaataaatataatgcatgcatccaatagtattagataacatgagagtggaggatttagaaaaataataatttaatgaagaagatgtcatagttaattgcatgcttgcatgcatgccttatattatggaacatgtaagaaaaatgtggttgtgccctatattatggaatggagggagtaattgtttagagttttatcttttcattttctttcaccactacagaaaagggaaacagtgccgttgggaaacccccttcggtgccagtttttccaaccggcacaagggaagtgacactgatttgaaaatcaaaaaggtgccggttccgacaccttttaggttcgacgaataaaaaaaaagccggctctgtgtcggctcgattgagccgacgcatcgagccgagtagtccctcctcccacatccgtaagaatagaatgaacacgaaaaaaaaaagttggcaacattcatcccacaacattcaaagatagattcatccacatatcaaattttggcaacattcatcccacaacacaaattttagcactcaaatttatgcaataaaaaaaataacacctcttcagtcatcatcgcacggtcggtcgtcttcgagccgtcgcgccacctcccgtcgcgccgtctcccgtcgacgagcccgccgccgcgtctcctccgcgagcccgccgcctgccgccaccaacccctggtgagcccaccgcccctgccgcctccttccctcgctctggcggaggagagggcttatccccgccggcgagcccttggccgcctcccctccttgagcccgccgcccgccgccccctcctcgagccctccgctgcctcccctccttgagcccgccgccgataatggatctggccaccccgcccaccgctgaccccacctgccgctgacgcctcccctcctgccgccgccgcctcacctcccaccggatctagtagagaggagggcgcggtcgccgctgccgcctctaccggccagccgccggcagcaggagagaagggagggagagagagaagagaacgagagagaagggagggagagaggagagtgagagagaagggagcgagagagacagagagaagagagcgagaagggcaccttatctcctcgcgtcgcctcatcaaggtggggcccgccggctccactctagctcagctcgatttctatgggtgtcggcctataatatcttataggtgtcggtttttaattaaccaacacataatatattataggtgccggttttttaaaaaaaccgacataaatataataggcgccggtttttatttagaatcgacacctataattacttaaaggtgccggttttttacgatttcaacctgcggaggtgggaaaaggcctataggtgccggttttagcactaccgacacctatagtggcgatacctatttgatgttttgtagtactatttgtcagtgcagtggttcgtttgcgaggtagtaatgacactactaaaaaatcattttcccgtgctatcaaaatgtattttcacgagcgggtgggcgaactgcttctgatttagggcttgtaaaaatctatgatttgacctttcgtgaaaatcagtttttttaattttgtagttgaaaaagaaaaaaagtttcgtattttaggatgtatctttatactcgaaatatgcgtacgtttggtatcatctcacatattaagcagtttgtgactatggaattgacgctattctgacttcaattaaaattaaaaatataattctaatttacttagtctagttcttattgtgaagaactagaattaatttgagcaatgctacacgtactaaatttttcttactaaacttttactaacaatcatttcaaccgtttgatttaagtagatggaagttacaaaaaatctagatgcactcgtagcatgacacatcagtgttagtaaaaatttaataagaaaaagttagtacgtatagccctttccaattaatttacttggattaacgtggtcaacacatgtgcgtcaagcccatccctatagatcaacatcaataaagataatgatttcctttcaaaaaagatgatttcaactggaaacaaaagtgagaggccctaataatgatgtaataaattccttatttttccaatcactagacaatatttagacatgataaccggggagaaacaaaagtacgtgcatgcatgatacatggtagaggggtctgatcatatatatatatgcagcattctatggaaagttcttgctatgaattattatttttttgaccttgatcttgctatgaattattaggaattataaatacaaaaaaaaaggacattcttgttctgatgtgttgcttagctagctgaccatagtagagcagtcaagtagcagctacagggcacatcattgttcataaacatatgtatgatcagagtctgattcaaaaaaaaaaacagagaagaaaatctagcttaattatatcactttcagatgtagctagccaacacaatattgagcatatttttagacatttaaatccatgctttgatgaaggagctacagtcaatatagtaattgttaaaaaatctgctcatgatgagcacgcaccaacaagtctataatagcacacaaaacattaggaagcgatgcacactagaaatgtctagaccctacaattattgaagcttaattatgaatcttcattcgtttcattcgtagttggtgaacatccgcataaacattgtttctaggttacggcgtacagtcaacataagtttgttgtcctcgtcacatctttgttgctgtgctcaaatattaagcgtaaagctaggtgtattgggttatcatgcaaattaattgccactgaaaccaatactgttacagcatgtggacatgatactgcacttaatttgtgcttggcttaaaacttaaattaattatctcagcagtaccctagcagcttaactaatttactcaatcacttgctaataatcacactgcgtgttagggagggaaacggttgagactgagatatctcaagttacagatcaagaggagcatcgatcatgtacgtatatctgaacaattaatcttcttttcgggtgcatgcgcatgatctatttgtgcaggaatataccaagaattaatcgatccacccatagattcagtccgggtcgaatcaggggagatctagagagagagagatgagagaaaaagaaggaatccagatcatgagatgtgcaggttccatcgaacagaaaagagtgagctttcactaaatgatttataagattctgtgatgtttgacaacgtactcgtaccaccagatcgaccaaaaggttgtaatatatagatcaacgatgttctagcacaatacgtagatcgaattaaagccaaagcagatcaggccccttaaaattgtggccaaggcaagaagaaaccaatttactagcacacagcagaaaaaaatctttgatgacaacgaaatgctacgtggaatggacctgatcttgcatgaaacgtattgtacagtatgattataaggttaattaaatcatggcagatatatatgtctagctacttaattactctgtgaacaaaatcatatatatcagccaaatattccaatcaaatcattgagcctcccatgtatagacgtacatatatacatagcttctttttttcatgacttgaattctattaattcatcaatcatatttgcacacaagcttgatcaatcaacataaacaagctaggcaagattgcacagtactagcagctactacctaggctaatacagtactagtatataataagtactattaattctagatttattaatatagtgcatatacatatatgcatggattctaagcatgcaaaatctctcagctcttaagaggaaaactattgcagtgcagtggacacttctctacaaaacatgcttcatccatgtacatatacaaacacatatatactagtacgtactacgtggctacatgcacacttcacactaaggcacaaaaagttgtgcaaattgacacgcatgcatcgccggtgaccagccggcggccggccggctagtaggcgacgccggtgaccggccgagagtagccggcgtagtagtccggcgtggcggtggcgaggctctgctgctgcgtgcgcagctgctcgtagaacttgttgatgaactcctccgcctccaggtccaccagcccggccccggcgtcctcgccgccgtcgtccctgatcgggaacggcgagtcggtgatccggagctgcctcaccggcgccgggctgcggccgccgaagctggtgcgccacagcgccggcgacggcgtcgcggccacggcggcgccgccgtcgcccaggagctggtcgctgctgttgaggatctcgaagacgcgggcgatgtccgccgcgtcgtagttgtaccacccgggctcgccgccgttcgcgccgcgcccgccgccgccgcggcggcggccgttgctgccgttgttgttgcggcggcggcgcttggtggggatgagatggaacgacgacgggtaggagggggtgttgctgcagctgaactccacctccaggccggcgccgcgcgggtcgtagacggcgagcgccgggtcgagcgcgcggccgcacgagaacggcgccgccgccgccgcctcccccgccgccgtggaggcggcgtcagcggcgtggccgtggccgtgggaggcggtggcggtggtggtgttcatgatcttgccgagggccttgttgccggcgatcttgccgcggtggaggaggaggtggaggtccatggcgagcttccgcttggacatgcccttgcgcagcatgaacagcacggcgcgcaccacgtgccacagccgccgcgccatcgtcgtcgactcctccattagatgatcgccgtctctttgatggatcattcttgcaattaattgatcttgtctcgaataataattgagagagggatcgatgagcttgtggtgtttgtgtgggatgatttggtggttggtttggttggggttttggcacgaggaagagaagggagggaggggaggggtatttaaagggaggtaataatggtgggggatgcatggacatggttgcctaagggaaaagaaaagggctaagggagcttttcttgttaagggttttctattcagtggtgggagcttctggtttggagttgctgtttggttggatctgcagttgtttgtggaggattgtgatcaagtatacatgatagtattttgatgaacaggtgtagaaactggatcagagccattggatccgagcttgatggccgagatataatatagggagccatgtcgttccttgtttgcacttataatggccatgcattttggattttatttgcgcgcaccaggaagctttctagaaagtattgtattatcagtcgcctggtttttattttcaaaatcttagggtttttttttttacaattgggaatattcgagatttatgcgttagtttgtagtcctaacctagccccctcctcttttcatctcttttgatttactgcaaccatgacatggcccactctagctacttgtcaccacagttgtcgcaacccggacgatctacccccacctcgcctcatctccctatcgccctagcacacgacctatcttactagcgaaaacaatatattcaagagagaatatattatatgcccgtgagtttactctagctcaacgatttgtcattgattttatctatttctataactagaaaggtggcccacgcaatgcgtgggcatccgtattactccctccatctatttttgatagtcatatttcatattttagaaaatctagaaaatctgaagatagatataggtgttagctaaaaaataggagtagtcaccgagaaaagaggagagaaagagagaggccggagggagggaggtatagcacgtacctgcacatgccgcatatatgcacgatggggatgagggctaccggatttttaatggttaaaatatatgggtccaccgatttaacagaaaatcaatggctagatgtttattagattttttatgatattctatattttattagagtgccacgtggtaactcgagagcgtttataggatgacacatggtggtttaggagcgtttgtagagagtttaatagacttttagtatataatagatatatcgccgactttgtcatttttttctacaatatgtcattagggtgcatactttttttaaaatgcctaaaacgcccttcaagatatagagggttgacaattaatttacctactagaagtataaaaaatatataaaatttttacatagtctccatacatcacatgaagtgtgtgtggatttttcaatttgcatgtattaattttttaaaaaaaatataatttatgtttcataggctaattatagaaaactctagcgttgagttcttttatgtaaatcatctttcatatgctacacaaaattatttttctaatgtatctacattttgtgtatgtgatccatctttaattcataggagtaccacataaaaataatttttcaaaaaaaattgaagataatcttaaaaatatatacacaaacttttatgtagtatatgaaggctacactacatattacgaataaatcaactcaactacataaatctagtagtacatgtacacaagttcatattaaaatggtatagacgattatattgtacatactgatatatatatatatatatgctatagtacctaggccagtataaattaatatatgacattgtggtgaatacattgcaagttatatgatgtgtatacaaactcattttatggttttatatttggtgttttgatctaaatagtcagtttctgattcagttactcactacaatatagtgtagttatcctctaagaaaaaaagtattatagtgtttttctcggtcaatatccatcatgttttatcaagcacaatcctagacttctacagcaaggccaataaacacaagatgctctctgttttgctgaacaaattaagtatttgaactcttctagtcatataatgttaagttacaattgatatgtaacacagtaaccattttttaaaaaaagtaaacatatgcgtcaaatatatgtgttaaacatacgtataatctatatgtgttaaatgtagttactgttgtcaacctgacaacaaaccaaattattaggatcaaaagcaaataaaaaaaagtgtttccaccatgtttttaaccttttccacgtttgtcagctacgtgggctcaaacaacccaataacctgctaaagcatgcaaaccctacacatgaatgcaattattgaacattaacatttacttaggggaggacgcttgttgcacataatgctgaaaagttttcatggtgtacgccatagagcacttagaagaaaacactttcagattaaaggtacaatttctaatttatccatacactttcattagttgattatatattaacgtttgggtgcattagcactacccaatcaccaaattaattttaatgagaaaaaaatccctgtaaattagtgaaaaagggtgtttatttgtaaatagttattaatatttacacaccacatgggtttacacaccacatggcacatgggtgcaaaagaatttgcttcaagtttattcgaaagttttgcctagttacatcccttctctaacaaactagtaatcactaatttggagttggcataacttatggacatatcaaattgtatagtatattaattagtatttgtattaatttccataaattaactgaccaaaatagttagctatatggagatccctcaaggttgagaaatcaaatatccacatgtttacactaagagaaataaccaagcttatgcaacaattaggacatgaaaaccatgaggttcacgacacatatgcacatatattccgtgctctccttgtaatttccctcttcctttagttgattttacgcgtctgtgtactgtatatatagtatgtgaaacacacgttaacacgtctttgattcattggggaattttggttagattgattcaaacctcacatatattaagacccctttgatagtgttatggctttattagaccaaaggttttttaggtaaagctagagaatgcgtcattttcc

SEQ ID NO: 27514 - DNA, 11577 bp, Oryza sativa
ccacagcccccagacagcaaaccatgcagacgtgcacatatagctagctagctacttccatgataccactttaaatttgcccagttgcaatacaatccccaccctgagaccaaaagccttaagcctaattgaccacgttaactgaatgaacacatagtccacagtttaatttgttcccaagcaaatgatccatatatgcatgcatgtaacaggccaatgttaacgccatatgtgtaaaaaaaagtggtaacatatattattcttggagacgacagagcataaaagcaagcaaggtgtgtatatcatcatgcatgcataatgctttaaaggcattacgccatgcaattttatctcagcatctcttgattatatgtctgtgcgactgtgacctaattctaattctatatatctatcgtaacagaataatctctatctcgccgccactaccaacttccatttctattctcctgtaaggatagatagagcaccattgtccctgcttgcggctcgacttggacttcttcgacggattacaaaggcatagtgttatcgaacttacactcatcttctcaatgctagtagcattccttgaaatatatatgttgcctaagaaaatctaatctgaaacttacaaaaaaaaatgcttccaactactagttccttaattaatctcaaaatagaaaatcagtaactgtttttgaaaaactgtaacaatgccgaatggagcccaatatctatattttggtccatcgaaatatgttgccgggatatgcaccaaaaacaatggtgtggtttttatgtcgaaacattaatatacaactcgagtgatgaggcaagggactgcgtatcatgacagtgcaaggattgttgaatgagcaagccaaaaagaaaaacagaaagatgatcagttaatttctttgagctagacagctagtttcaagtgaagaaccactctcgcggatgacatacgcaacctggagtggatgagtggagaagttttgaaagatccttcattctctctctctctttccagatgttccacaatagatgaaagattttagttagccaaagcttctcctttgttctgagggccgttttggattagtgccaaaacggtgccctaccaatattatggtagtttgaacagtgcatatggtagttttggtttgaatccaaatcattggtattgccaatgtctagtttgatattttctatactctactcaaagcttgttctaaattggtctccaaccaaatacaactctaccctaccaaaatattggtagtgccaaaacttggcttttggcactaccaatattttggtagggtattaaaccaaacaaaccctgaatttttcattgcctctgctgaccaccattagttccattattgaatgaaaggaggtaaggtctgggaggttattgtattgaaaccatgtaattgttgtaacaatttttaaccaaggacatgagttctgacatttatttcaagaagaagagaaatgcattggaccacaaatagagaatgcaagacgacagggtggctccagatggaacaccaacaccaaagaaagaaacctataactgagttcctttcaagaaacacaacaaggtaggtgaggaggcgtcctcaattaaaatagtattgatgatgacgaccatgcatcatcatggcgacgtagaagctctgacttcaccatggcaaccttcatccgtcgcttggcataaacatcaccagcacgaacagccgtaattgttacaaagttaatgtataaatgtacgcattattatgttaagacttctatactgtatataatgtttgcatcttcccccaagacactctaaagtgtggacttggtttggcttgtggcactccaaaatggtggcaatcaatctgacacaaacctctattctacttctctaatatttattccaataccatgtaggatgatcttattaagtgtgaaattagacaaaaaaaatgtggggaatgatgaattcgtttgagagatcaccgttcgataagatcacttgagaggccaagtagtataaaatgttacaaagttgtgcctggcaatttggtggtgcttctaaggatgccacacataaagcagaagtatctcatttaggtccaattcagatttcagaatacgggagttctctcagtttcttgcagcaaactaggaatatattgacctttgttttaaaagtttatgtaaaattcttagtagttccaaaacataagaacgattagagtgacacttactggaactgactgcgctccaaaattttctaactcatattgactatattgagactggtggtcaaactcattttccggccggttgacttttttgtgttactctcattgatcgctttatcatatattctaatatgtcgatctaattgaacgacataaagaactgattctagcccacattatggtctgtttcgttacatactttacattattccctttttatctaaaaccacgagctctttttttctgcaaaagttgacagcaacagcgtggggtgtacagtaaaggcagggataaaagaactgcacaatcataagctctctctctccttttggattgtcttctagtttagagtcattattattatttgtatgaattttgtcttttatagcagaaaagatattaatacaaacaaatgcatggacattagatcaagacccaaaggacagaaaaaagtgaccaaaagatgacagaagcttgagtcaccttaccagcaggcacccacatggtatacttcgcgacagtgtagtatggtctgtgtacttgtttcacattttcagcttggtagtcatgaaatgaacttagaattaaactttctagtttatccttacagaagaactacatgtaccgaaagtgaacctatatgagttaagagtggctttagtttggtgggctggtgtggtgaccatgggttggacctatcctgtgctggaaacatcatttctagaaagaacaacgtgttgctgggcgcagccacaagtatgaaagtcggtgacgatggtggccagggtacttattcataagaatgaagaaaagagtagtgaaaccgaccccgacagaagtcggcacagccagacaaacactctctctctctctctctctctctctctctctctctctctctctctctctccatccatcccctgatcccctaagtgaagacgtgacatctcttgatgttgtcccagaaagcaatcaaggaaaggagataacctgtgggaggagctcgtccggagagaacaccgtccacctcctacacattccgtcgaacaggtggcgggcgcccacgcgacgggactgtagagaagcgagagacaccaaattacaccactgaaacacagagaagaaacaagagggcctccacgcatcggcgccgcctcacctcactcgccgtcgccggagaagatacgctccccgcaccgccgccgctggcacaccaccgtcgcgcgctgcggtgcgctgatctgatcgctgggctagagggtggatgtgactgaattaaattaactgggcttaaaatgaagcaactaactgaattgggcctggttacaaagcccgcacccacctgagcccatcctatttaggaataagttcaccgaaggtccctcaacttaacagcgagattttttgaagtccttaaccacaaaaccagaaatgtttacccctaaacttactaaaaccgttcactcaaggtcctacggcagtatatataggtggtttcgctgacgtggcatcctagtcagcaattttttttaaaaaaaaagtacatgggacccacatgacaactgcacattttttttcttctcttttcttctccttctcttctcttctctattcctcttcttcagtgaaagaggccggcggcaggcggagcggtgcgcgcggatgcgggtggcatagcagagggcgagcgcggcagcggagtgacggcgggccgagaagtggagcgcgagcgcggccacgggcaaagaagcggagggcgagcgcggcggcggagcgggcggagggcgagcgtggcaatggcacacgattaactgcatgatgcatgcacactgtgcagtatatatgaacatgaccgattgattctatctggtacgtgctgctgctgtcggtacgtgctgctgctatcggtgaagtagacgtcgccggtcctctggtcgacatcgaggccgttgaggaagttgaacggcacgccggcggtctccgtcgtcaccacctcggccagcccaccgcgcgccggcgccctcaggaggcccaggtactcgtcggccacgtacaggtcgccggaggcgtggtggaactgcagccccagcggccgcccgcacatgctctccggcaccaccagcttcttctccggcgagcaaatgccgacgctcctggtggtgaacaaatcgtcagtgcatgcgagatcatgcgcgcggcggcgcagctagatggatatggatagcttacttacgggcgccgacagcgtcatgacggcgagactcgggtctatggacttggtctcgtacgtcggctcgtcgctggcgccggcggacgtcgtcgccgccgccgccacaagaacaagaacattgcgtccccaccggcggcggagggagaggaggagaggaggcagccgtcgacggcgagctcaccttccgacacatcgcatacagcgcgacgagagcgtcggactggccgaggcgtatagaaggacgagtaggcgagggagggagagagggttgacggggagagcgcgccgctcgccggcagcggggccctaggtcgagcacccggcgcgttcgaacatctccgccgctaagcacgccgtcgcgccggacgccacttctcctcctctcccgccgccgccgtcccgctcagctgccggccaccgctctccccctctatcgcctcgcctgctcgagagaacccgaagagagaagataaaagaaaataaacagagagaaatgtgggacccacaccattttctcacttacacgtggacctcacataataattttaattacttttgccaactaggatgctacgtcagcgaaacccggcctatatactgtcttgggaccttttatgcacggttttacatagttcagaaatacacatttctgattttgtggttaacggaccttaaaaaaatctcggtgtaaagttgagggacagccgctgaacttattcctcctatttatagcccacaaagcattggcccagacagccaccaaatagtgaggcccagaagagagcggcccattcgacacggtcaggcccacgttgaagcccaacataaagtgggagtgtaaagctcacacaagagcggcccaatgggttcctcacgatgaggacacatgtaaatctcgtccaagaagagaaagttcccagtaaaagccggcaactagccgacacctaatggcagcagaaaagtccatttttacacccatgaacttttagatcaagtttcagtctcatcccttaaccacgaaaccggagatgtaacattctccaactatgaaaaccagagtgtgcacggtctctaacagcagcccaatttgaaaccgaaccaacaaacagcctggttaacacgtctagccatgaaaagctaggccccatacactagcttgattgttctgaatggattaatagatggtagattatatttgattttgtgatgataatcgatgtaaaagcgaaagagagttaactattacccgtataagttatattggcattattccatcttcaagtttaactttatatatacaaatacaaaacataataacagttataacacaaaacatatatcatatacaaatatactactccctctgttttagattataagtcgttttgactttggtaaaagtcaaattacttttagtttgaccaagtttatagaaaaacagtaacattttcaacccaacacaaatatattataaaagtatattcaattataaatttaatgaaactaatttagtgttataagtattatactatatttatccacaaacttgtttaaacttaaagtagattgactttaactaaagtcaaaacgacttataataatatgaaacggaaagagtattttatagtggatgaaactaatttagtcgtctagatcttagtacgtttcatcataaactaaaataacttacaatataaggaggatgaagtacacagttgagaagctatttaaatctaaacaaagtattacaagcaatttaatttaggtatagactacagttttgcgaaaattgaatcaaggccttcgagcaatataatcggtgaaaccgacgacgaggtgctgggccaacaaatatacaaaatattattgtgcatgtgtttgtctttaaaaaaaagttgagtactaaaaaccagtgcaatttgaaggagtggaaacagctataacagccagcgagagaaatgtatatcaacagaaaaaaaatattataatgtaaaaaggaaagacaatatcaaagtaaaaaatatagagtaattaaattgtatttatggtataacaactcgtggctgtgatttagtacaataatttgagaagtgaatattcaagtccaataacttgacaagtaggcacgtacattttagtataggaagttgacaatttatagtattttggtgtaataaataggtatatgttgttttggttaacaagtaccgggtgagttttatcacaatgtcaatatgtcatcatatagcaatcatgtggatatatataatcttgaatttaatccataagaattacactgctcattctatttacaccttagatttaatctataagatttacattgctcgattaatttgcatcattagtttggattttttttcaccttcctatatctcaaccaaaatataaaattttcaacgtagttaaatttatttgactttcaattactagaatgacaaaaattatgtatacttatacaaatctatgttatattgataaaataagttctaaaaactaaatgtgtcgacgtttgatgtcgcaattccggtatttgcatagtatggggatcgttggtaccaggatatatgcgagacatatgtaaaagagacggagacgaggatttttatacaggttcggacccctgaattgtcaggtaataaccctactcctgttggccgaagccggtcgttgctcttattcatcataatcacaccggtacaatatttggggtagcctatctaactgttgtcgacttggcggccataaaaccatcccgtaatcgacaacagagtagttttcctccttgaatccatgttcggcgagatcagagacatcgctagatccctcctaacggttgtcgtaggaactgtatggggactaactaggcttatctccgatgtcgatatccggcggcttgtcttggcgtatgttggcttatatgttgatcttgtgtcttgatctattgttctatgtcccctctcctctttgggggtcttgtatgtatacccataggtgtccccttgtccaagtagaactagggaaaccaatatggatacaatccgagtagtacttatcgcttccatatagaactctattcatcattccttatgcggaagtcctcctatatccgacagttgtttccatataagacatggtatgtggtgggtcttgccgagatttagtcaactactattaggtatgtggtatctataaccctgacaaaatgaatacagaaaaaaatgcttgaaataattaagttgttacaacgcttcaagttattgtagcaaaatcatacccaccttgtaagttgttgtaactatatgctcacttcttaagtccttgtactagcaaataacttggaatgcccctttgatccatcggttcaacaaggtttttctcaatgttgtgtgtgcttggaacattgatcacacctcagtctttgcatgcttttctcccatatttggcatacgaaggtgcggtccttgaacagatgatgtgttatttcgaggttgctagcaaaagtaattattgggccattgctagatttgcagccggtctgccgtctatatcttattttgtagttggagctattcaaaattttgcattataaaagtacccatgctttccatattagttttgtggccactggatctatcctcccattgaattgtgctatgtatgctgactttgcactatactttgcattgttcttccatcaccatctaatggtgtcatcaaccctttctgctaggattgttgacgaggacatcactagctcaaatatgaccatgtctaccttttgtattcatcaacaaaaggtgcttgcttgttatgtaggatttagtgttatatatttgaacaaagttactgcaccatgagttatgtgtcttcttgtttgtagaaatacttgcatgggtgaagaaaagtggagcaggcatacatagcacttggatgatcaatgaagtttattggggaccaaccggttgcctttcccaagtctattcacatgttaccgcgtcacttttgatccatagaagacaagaggtgaagttccccatgttttagattcaaattcgggccttttgacaagatccatttcaaacgaacatagcccttgatctagaaggattctcgggacccatgagtacttgctagaaagcttatggagtctaatttcatatggttttggtcccacgtcaaaatttctcaattgtcaggaatatgtaaaacaagccacgtacctcattcagtaattttattgtcgggtacgtgtaatgccccgattttcgttcgggattaaaaatcaataaataaatcatttctagaatttatattaaatggtaaagcaatttaatcaagtgaaatattgaggaaataaaaaatttcctttaaaaaatcatggccggaaatatttttgtaatactctttgtgtcctaatattctctctagattttttccgtgaattttcggagctcgagaagtaattttaacatcacaaagttcatttaatcaattaaattaattgaaaaaaaaattaaattctcctcctttcccttgggccaactccggcccaagtttccttccgctcgggccggcctccctcctctctcctcccttgcctctctcggccccggcctctatccgggccgcccgtgtgtccgcacacgtggccgcctcgtgcgcactacatggtgcacccactcatgcctccgtggacttggtccacggtgggccgaacccccttagtcaccgacaggtggggcccgcttgttggcgccaccctttttcccctcggtgacgtcataaatcaatattaattgcgcaataattcgagtttaattccggaaattcatttaaatggctcaaaagttctaaaattcatatctaattcatacgaacttcgaattgggccattcaacttgccaaattcatctaaaattgagctctacatgcttgtttactttttatgtacttttacttggtttttattagtgtttttcctcattttgcgtgccaatgtgtagattccgtcgtttcggaagatcgcgatcgcgaggaaaagtgttcagaagattgattgaggaagcaaggcaagtcacacattccccttgggcatattgagcctactttataatttttttaccgtttgcagataaatatgcatgttttgcttattacatgggaatagggtttacctatctactcgcttgtgccatgtttacttgacatccgttctttgttaaacttgggtgataattcgactagcttatgttacttatgttgacctagctagaactgtatgcttagccatgcttaattaattaccactagctcacataatgggataattacattattagacatctagtatcttgacgagctgcgtgcttgagacatccgaccatgtttcattagtcgtaactacccaactaaatacgacttaatggtgggctgtgggtgcatggttttgctagtcgcacccatggcaattaaggaccggttcacaggaaaccctcgaagacatacatcgcttaccacatgtgggagtgggtaactgcttgagctgtagtatagctcgaccctttcctaggcacccgtggcgagggtgggcgtgatggagttgggtcggctggggtgtccggttgtccaacttccggattcaccagtggcgcacgaggggactgcccactcctggttaggggtaggggtgaaaccttagcatggtgtggatggttaggggagggttatgcgaagggtcttgcattgtcacaatcactcgacatggtgatgtgtcaggcctggcacaatgacatgccggtggattgtgtcttgtggacacagttgtgcacctcttgccagagtaaaactattcgaatagccatgcccgcggttatgggcgatcgaccagattcagcgtgattagtctcacctttaataaattggcttaatgaactggttagttcaggtgggatggttaggcctattcaacgtggtgtagcgttgatcagtggagatttaatattaccttaattatcaactattttaccattttcaacaataaatgctttacaaccacctttttgcaaatagccacaaaccctccttgtctcccattgcacgtttgcatcattggtgtggcttgctgagtacggtggttgtactcagtattgctattatcccctcttttcagaagtgtagtgcttcttagctgaagatgaagttagacgacaagggcttagagcccagttgagttttgcctgtggagtgaagatgtagccccgctaggatcgcctttttccgttgctactgctttcttttctgtgtgaggactaagtgtctcttctgtaagtatttacgctttatttacgtttggatgtgtatattatttgtcgttttgtgtaccctggctgattcctggacagggatttaatacacaaaatagtctagaaatttgggcaaaatttctgggcgtgacagtatgcatcctagggctaaccctaggacatccctaatcatatttattcagtagccgtcatagtttcgagtcgggtttcacttagattaattctgtcgttacatttttgccgatggttcggtttgtggaaccccaacttcgagtctttaatcattcatctgcaaattgagttgcaatctacattgttcttgcttgtgtttttcgattcgcatgcagggattaaccttcttagtgaggtcaactggatagcacacgattgataaccaaaggagacttggatcctattgatcggaagccggatcatgtgtgtcaagtttccaccaaatctagagttatcagcatatcgaaagatctaagaccttagttcctaaacatctgtgttgttactccatatctaaagtagcatgtcaaagaattccttcaatagctagatcgatggtgagcctgtgccacttgtatccaccaatcatttgttagtgtttcatataccgatcgactcttctgctttgagtggttgtagagtcaattgctttgcttccatctcctatttatgtctctgttgctgatgttgcacattcggtacaagataaaatttcgattgttactcattc

SEQ ID NO: 27515 - DNA, 11523 bp, Oryza sativa
cccttaagacagcccttactactgctcctgttttggcattgccggatttcttgaaatagtttgaaattgaaactgatgcttcggctttcggtgtgggcgctgtcttgatgcaggagaatcatcctcttgccttccttagtaagtccttgggaccacgaaatcgtaggttgtcgacatatgagaaggagtgcttggctattcttcttgcggttgatcattggcgctcttaccttcaaggttctgagttcattatttgcacagaccagcggagtttgattcatttgggtgtccaaaaactcactacaccttggcaacagaaggcacttactaaacttatgggttcgcgttatcgtttggtttataagaaggggactaataatcgtgcaaccgatgctctctcccggcgcgctgctgacaattctgcagagttgtgttcagtctctgtttgtgttccgatgtggcttgaggaagtacaagctggttatgcttctgatgcccatgcctctcatcttattactcagctcacattgaaaaaggatgtagtacctcatttttcctttgatgctggtattttgcgctataaagggcgagtgtggattggcaataactttgccctacagtctcgtattcttcagtccttacatgctagtgcccctggtggtcactcaggagttcaagtgacttactctcgcatcaaaaatctttttgcttggactggtttgcggcgtattgtcaaagagtttgttgatgagtgtgctgtttgtaagcaggccaaggctgaatgggtacgttatcctgggttgcttcaaccgttgcctgtgccagagcatgcttggcaaatggtctctctcgacttcattgaaggattgccgcactcgtcgggatttgattgcattatggtagtggtggacaagttttcaaaatatgcccattttgtggctttggctcatcccttctcggcgtttgatgtggctcaagcttatctcaccaatatctataagctccatggctttcctcaatcactgatttctgatcgtgatcgcatctttacaagcacactctagacttctctgtttaaattggcggacacccagcttcggatgagttcggcttatcacccacagaccgacggccaaaccgagtgggttaatcagtgcttggaaacctttttgaggtgttttgtccatgcctgtcctaagaagtggtatcaatggctggcgcttgcgaagttttggtacaatacttctctttactcagctctggggacaacaccctttgaggtactttatgggcatcctcctcggcactttggtattgtggatattgcagcttgtgctgttccagatttgcaagcatggttctaggaccgtggggtggtccttactctgttgtgtcaacatctgcatcgcgctcaacaacgtatgaaggttcaagcggataagaagcggtccgagcgccaatttgctgtgagcgattgggtgtttttgaaggctcaaccttatgttcaatcattgtgtttttgaagattgggatcgcctgaaggagcgtgtcacgaccggaattgacccaacgggcgttccttacgtgcgtgtattattccttgtcccaggaggcaaggtacaccaaaagttgatacatttcagagtttatcaagcggaagcgtaaatagttaattcattacatgggcagcgaaggcccagcacacacaaagacaaacgagaaacagcggaagactagggcgacgaccacaggcgcttgacagcaggcacgagctagacaccaaagccttcatcttccagggactcctcttctgggtttggaaaaattgagcaagactgagtacaaccaccgtactcaacaagacacacccacaagtgcaggataaatgtaaaggagtacaaggggggttatgatataaagggttagggtttgcagtaacagcattaaaagacacttagttgctcaaagctattttgtaaacacgtttccagagctatacaatattattaatcaaggccgtgaacccacacgagcctgccttaacccaaggcctctgatgattcagaccgaactagcaacccgaccctgggtcccagctcgtcccaagccaacccaggccaaccattccacattttagttgataagcaggttttaagaattaaaacactaacttgggtacattgctcggcttgcccataaccgagggcgcggctattcgaatagattatactctgatcagaggtgtacatctttacccacaagacacatcttcctcacgtgtagccacgtgtcacataccaccacggtatacggacggaagacatgacatagtttccaacccatcctagccatagacaagagtaccgacccaaccccacctacggccggaacctccgggacaggtaggcaggactgagcccctagcagcaggacaccggccctgtgccatgacatctcgactaccgggccgcagctcgtgtagccttcatttgtcctagagatgtccatcgacccccgacttcgtccatctccatccgtgtacttttgtttataaccagactgagccacaaactaagccttacccactagacatgtggaagtacggtagtgctttgcaacaaaggcccgaagaccggtccttatatggccgaggtgctactatcaaaaccatgcaccccgagcccagcctaaaaccattttggagattttgaatagagggtgaggtgtgaatccaattccacaataatcaaaccattccatagtgtccaggtgatatgaatctcccaaagtctagagttgtaaaaccacctaatgttacctaattaattagcgaagcatctacctaaaattatactagtggtaccatgagtagagtgtctactagttggggttttgtttattctagggtgaacaaggaaataataacaataaaaataataaggtcataacaaaggtaaataggcatggctagataaaacagtgataacgcgggaatttaaataaagcgataatgcaataatttaaatcaaaataattttataaactgggatttaatatgttcaaggatgatgtgacttgccttgctcgctttcccaaacgtcggcttcaacttccacgaagagcggatcttccgaagctgcggcgtctacacgaccaacgaaaaaaagaaaaggcttttactctaataaactccatataacaagcaggaacaaagcacaaaaatgggttcttgacttattaaggaaaaattagagacttgaacggtccaattccgagttcaaatggccaagttatggccatttgaagtttatatgctctttaaatgaatatttgcgaatttcttcatttaaattttaattaaaaaaaaggtttattgcgtcagccgaggggaggggcgcgcggaccgggtccacgggagtggggcccacgcggcagccccacggtccacggtggaccgggcgcacccgggctcacaccggccggcgccgttggtcccacgcgtcagccgcacccgagggcgcgggcggctgacagccgggccccacgcggcagccgctcggtgcgcccgaaggcggccacgccggcgcagcgacgggaggcggcgcgcccgcgcccctatggtcgccggcggcggccataggcacggcggagcggcggccgagagaggggagggaaagggggaaacgaagcggcggtccacggctcaccccgggtcgacggcgacgacggaaacggcgaccggagcggaggaaggcggcggcgcggctcgggtggacggggtcgacggtgctccggcggtcggcgagcgaaacggaggggtggacgaggtcggcgaggatgcggtgaagccgaaggaggcggcgccgaggtgggagatggtccggggcgacgacggcggcggaccggagctcggcggtgacggcggagagagagagcgacggcgcgagctcgattccggcggggagagagggcggcgagaggcggaaacggacggaggaggtgcggggagggtttatatagggttgggagtgagagagggcggccggaggagggggaaatgggcgcgggagacccggccgccattaatggcgccggcgaggttaggggagaggtttccaaacgaatccgagggagagagggagggaaaattggggggaaagggggaggggatcccggggaataattccccccactttgttgcgcgcggggacggcgggaggcggcgggattcgcggcggcggcggcgctagggtgcgggcgaggcggcgggagcggcgggaggaaggggatgacgggtgggccccacccgtcagcgagggtggcgggcgggcccgcccgtcagcggcgcgcgcgcggggagaggccggatgggctgcggggagaggagagggagggggaggtagatgggccgagccggcccaagagggagagggagggaaaagggactttttagagcttttctttttataaaaccattttaactttgtttatttcttaataattattatttgtgctctgaaaattccactaaaatttatttacgcattttaggcttttaggaaatatacaaaaatcctccaagccttatttgacttttaactttgcacattttaattgctggaggctttcacacagattttaattattctaggcataatttagaggatgtattttagagtcgttttgggacgtgacagagcgttttcctgtagtctcggcttggggacaagccagttgcgaagaaggggagaatgttaccaaccctgttaagcttaggcccagtaggagtaagcggtccaatccacgcgtcagtgggccagagtgggtggcgtgagtgttcagcctgtgtatataaaggctatgctgtaatcgtgctggttatcgaattgaaaatagaaaaagctaatccccaacaacctctgcttcttccctctctccctctgttcatctctcttcctccccaagtgctcggtcaaattcttgacagaggttgtgacaaaaaacccctttgttttttaatttgttaagagatgcgctcatagcatagtggcaggggttgctgcatgcaccctatcggtccaggtttgattctcgtcgagtacacacaccaggttcgattctcgtcgactacgcacaccaggaatcgtcgagtacgcacaccagaaatatttacttttctttcttcttaaaaccattgacaccaaatcctttcttggtgtctaacctttttttaattgtttaaatccatcagttgatccaatgaacttggttattatacaacaatcagtagtcggcctcaccaaattggcgatttctcagtttcgatagaacatttttaacaatgaatcagcgagcataacagatgctgtcaacataacagagtagtttgacttgtttctggcatacttcacgtacagataattaagtagaaaaatatctctatactattcaaaatgttggtagctagcagtggtgttcattttcacaccacctctattactagcatttaggcttacaatctatactattacaccacattcaacaattcctctcttttattattggcttcaccatatttcaaaatcacaaatttgttcaataagaaaaattgtagtattacttagaataaatatatatttattacttgatttaataagctagaaactcaatttggttttcgtgacaacacaatcaattagtcctgaacaaacaaaattccaagagtatctacgttttgatgactagctgattggtcatcctacgagagtctcgaaccaaactgtatcgaacgtccttttgtttacgaggattgctatagcacgggatttcattccaacgcgatactttatgaatctaatcctgcacctcccgtttttcccatgttcaagctcccacattacaaagaaacaagtagcgtagctccttgctcccaccggtcacagcaacaacagaggaaggagggagctatcgttgagaggaaaagaaaagagaagatgagacaatgataggtgacttgccggtaagttagacgatgacaacgcgctcttttcccctacgccttgacccggtacttgataccattggtatcagacccgatatctaatacctgataccaggcatgataccccgagatatcagaccttggtatcaaccctctgatacctaaggtatcaactgtgacatacttgtacacacatcagtgagtacaagtgatgggttggcaagaagcagaagaaacccaattccaaggtcgccatctacgtcgagactagtcgcttccacccagcctcttcctatcgacgcctaggacctcatccccctcctccgccgcctccctttccttctggttgcacatgacaacccccaatctcacagccatagttggctcgctccttgactataacccccctgcccatgccaacctctactctttcacattcttcggatccagtgtagctagaaagggagaaaagatgataaggaatgtcgtcggtgttggagacgatggtgaaggagtcgaggagagtgaggaggaggatggccactggggtagaggagtggatggagggaggagaaaaacgaagcgctgctacttggtgggggagaaaaacgagtcagtggggaaacagatcttgaagatatgtaccgttcacacctattttatcacgtgtccttgtgcccccgatgggattccgtgtattagttttttctgtttgtttgtgggagtttagaattttaaggaataattggttggtagctagattctaataatcaagagaagttggatttcctattttttgacttttaattatttttgtagattttacacagcttctcagattttagactttgtattgtttacgagagcttctaattctgaaagaaactacagtcgctagaaacttccaaaacaagccctttgattggatgaaccagccgggattcgtttgtgcacggcccaacgtgtcacggagcccattcagtgacccggcccaggtaaccatgggccattgcccatgaggccacgcttagtcgcctggtcgtcgcagccgttgcatatgccatgcatgcgcgcgagcgaaactgcaacaaccgccacgccagagtccaccgcacgccacgctctccgcttcgatcggcggcggcgatccatcgatcccctcctcgctcccgcgcgcgggcgcgttgacgtaaccacctcgtcctcatcatcatcctctcccgcctcgccggctctcccatctcctataaattccgatgataataccatctcctgatcagttcaattttgtcataatcggctgcttcttcgcttcaattctgtgttggtagcaggcgacgctcggtgtcttagttcatggctcggagggatcagctggtctctttcctctgcttcttcctgatcgtctctgccgtcgccggcggcttgtgcgtctcggccaccgtgctcccgatgcgggtggggaagcagtacgtcgtcggcggccgtagcgggtggaggacgccgccgccggctagcgtcgacttgtacgccaagtgggccgccggcatccgcttctacgtcgccgactccattggtaaggcccccaagctagctataaaacaattcgaacatcgaagaatttgttcttgattcaattcatccatcgatttcatgctgcaaatcgaagagttcgtgtacaagaacgattccgtggtgaaggtggacaagttcgggtactaccactgcaacgcgacggcggcggcggccaacgacggcagcgtgctcttcctcctcgacgcccccggcttcgcctacttctccagcgccgacgccgatcactgcaagaagggccagcgcctcatgatcaacgtcgactccgccccgtcgccggcgcccgccccggcggcgtcgcccatcgcgaaacctcctgccgccgtgacggcggccacgccaccgccgccgccgccgccgccgtcgccatcgccttccccgagcccggcgccccaagaagccgcaacggcgagcgccgcaacgtcgtcgtcggcggcgacagcggctcacgcattgctcctggccgcgatggccatgatgggcttgattcttggagagtggtagtaacaacagagtttgcattgagctaggccatcagggtgttagttaattaggatggttaattacttcggtgcagtatggaacgtactggctggagcttaattaccgtcgctgaactgaataatttcgatgtgaattagacgattagttgttgatttgtcgctttagaatcgaagaagaaattaagatctctccattttcatgcaaatttctgatttgtgggaagagcttgttgtttcggttcattatacacaccacgtgtcatcaacatctgcaccgtgtgtagggtgaaaacgggcatctcctaggaaacgaagctcgatcgaccggtaattgattatatatatttattatttaaactacttagtgtcgacattaatatgatgcacaaaaaattagaaaaaacaaaatttataaatagataaaaaacgatatggtcggaaactgtactccatatacgaaaaaggcgttttggtcgatcaggaattttcgtgaccgctttcaccctactgtgcggtatgaaaatgccttacccgcatgcagtctatgctagtggtaccaactgatgactaaactaggtcccgatcttttcataggtattgataattctcgatttggaggaaacttgacacatacgatccgacttccgatcaacacttcaaaccctgcaagcgcagcaccacgtctattctagttatcaaccgtgtcaaaacccggttgacctcaccgagaagactaatgactgcatgtgaatcgaagaatacaagcaagaataaagtatagcaactcaattgcatataaataattaagaactcgaatttagggttccacaaaccaaacaagcggcaaaactgcaatggcagaaataatctaagcaaaacccaattctaaattatgacggctactaaataaatataatttaggacgtcgtagggttgctctaggatgcacgctcccttgggcttagcccacgacacaattgcaaagtccaagacccaaatcaaattcgaactggacgaggtacgtggcttgatttgtagattcctgacaagttggtgggaatcttgaagtgtgaccaaaaaccatctgaaagtagactccataagttttctaataaatactcatgggcccggagattccttctagatcagtggctagttccgtttgaagttgacgttgtcaggagtcccgaatccaaatctaaaacatgtagaaatttatctcttatcttatatggaccaaaagtgacgtgatgaggtagaagtggacttggagaaggtgttgatttggtcccaaattaactttttgatcatccatgcattccttatgattggtctcttttccttcacccatataagtacctctctaaacaaaaatatacgaaactcattgtgtagcaatgtttgttcaaatatataacaagtacatctactatagaccatatgtacccttagttgataaatacataaggtagccatgatcatatttgagctagttgtatcctcgtcaacttggacatgggcttgaatcaaaggtagaaacaactggaatggtgcacatataaaaagaacgcacaaatgtctatgttttctttaataatggaattaaatctggcctttgctttaatgaaaatacaaccaattattatagtattctcttaaaaaaagcaaacactcaagaaaaaaataacttaaataataaagccaacacataaggagtaaataattattgaaatctatttgtgaatctccatccgtagtgcagaagtgtctacgtgcactactcaaaacagctaatagcgggtagatagcagattattgttcatgtagtggtcggatcacagatagcgttcgctaagttccaataacaacatctagttaccactcataaatttctctctctgtctgtgtgtatcataaaatgttattacgtgtatcgatatcaacatggtatcgtaggtactagacacaataatcatatgtaccaggctttggtacctacgtaccatgatgatattaatatggtttcataggtaccggatttcgtaacgagagtatcaatcataccatgctgatatcatcatgatgtccagttattccgttgaaatgtatacttgtatgtagtatttgtgatatcataaataataactttctaacgaattaacaatggaacaaataaattagtgatagatcaatacacatataacttaagagtataaatagatatctagttgcatttaaggagttgatgtgtcgtccatcagttacatctaagactcagtcgatctgctattatggtctgctatgtcatattgcagccgctaagttccaacttgctatcatatatctgacccactagctacctcgtagcggtagaggtagggatactaccgatacaaagggcatcacatgatttttttttgaaacatagtacaaacactgacacccacaacgtgcgcacactcacctctatgaacgcgcctgcacacacaccctacccctacgagcacctctggaagactgagctggcatatctttagattgacgaagttaccacatgtgtctcgctgttgaaaggtacgtcgcctgctactaaaaaaataattaatcgtaaatatgatcactcttgtcaaatcttgaatttgaacctgggtgggctggttccaccacaaggaacttaagtagctgagctacgctcatttcacattaatttttttgttcgatggtaataagcgttgttaactcattaattgtacggcatttgcaggctatattaaatcgcccgattgaaatggtgcaactttgaagatgcatgtatggctattacaatagtgcttgattttgatgcaaaatactactagcatgagtagggtgttcgtgagaaagaaaatagatgaaaaaaatggcaaataataatgatagattaggttggtatcttgaccatgttttttcggagcatatggatagttggtgtcagggtatacgtgagattgaggtaaaagaaagacatgaatttttatacaggttcgtcctcccgcttactgataggtaataaccctattgttattggctgaagtctgtattgcctttatagatcaatatcacacgagtacaatatatgagatgacctagtttgtcgctgtcgacctagcatcatcgctgtcgacagtgtagtgatctttttccttgaatatgaactcaacgagattggagatgtttctagatctctcatgtcagcctctctggctcatacattgggtttgtctatatttgtattggcttgtcttttgacttggcatgtcccctgatttcctcctagggggtcttgtattcatactctgggtgtcccattatacaagtagaactagggaaacaagtatggatacgatccgagtagttcctgtagtgtccgaatagaactttgtttgt

SEQ ID NO: 27516 - DNA, 863 bp, Oryza sativa
cctgactagaataagaggaagaacattatcagaatgtaccataaatagccatgatgcattttacagttccttaacaacaatgtcaaatttctaaaatgtgccacacaaaaaatcacaaaggtgtatgacattgcacctgatccaaagctcgtttcatggctaaggtagcacctctaccatcattttgtggctgagttatgtggtgtgcgtcacctgaaagagtcattcacaatgaaaggcatcctaacgacagaataaacaaaactctttgtggaataggaggataccagacattccatagcctctcacttctgcataaatttttgccccacgttcttttgcatgatcaagtgcctacagaagagtatatggttaaccctcttaaggtcaaataagatgaactaaatgacactttccagacatagaaaaaaatgcatacacgatagagaaaaagaattagaatattaagggatcaataagtggatatgtgagtcaaactgatcataagacagatcaaagtattaaatggctgatattaaactacactcaaccagaaacttcagaacgaaggtgtaaaataccaacatttttctgaactcacctccaacaccataactccacaaccttcaccaatcctattaattattttgaaacaaagataagaatagccacacatgaaaaaggaaaaaaagaaagggggtatgatttgataaaggatgacatacacaaatccatctctaccacaatcaaatggcctggaagccgcttgaggaagagagttatattttgtagacaatgctcttaatctgaaaaacaaataacatcacaatgaaataagataaggttggccacactaatcagag

SEQ ID NO: 27517 - DNA, 5773 bp, Oryza sativa
atccctccaccgattgagactccctgatacaactccaatcagacaccgcaattcagaaacacataaaaaaaatatatagttcataccaacagcagtttgtaccgttctttccttcttctcatcttctgaaggcaaccaatttgcatctcttaaagcctcatcagctgcacatagagcataggctataaatccggatatagatttattgtcctggaaacaagaaggtcaatcaacagttcaaacatcaaagcatgatacagagtttaaccatatgagctattcagcaccgccattacatgtttacagccatgcaaacaacattctgtcagaatattttggctcctagtaggagaaggaaaaaaatggcagaagtaattctatctacacattttgttccaaactaggacgtgcatatttctataagtatgcaatgaaaatatgagtgggagcacaaattaacaaaaaaaaaaaaggaaaggaaaacattgagaaatcaagacacttgtcactcctggtggcactcaagataaggtcattgccattgtacagcctaccaggaacaacattagtttttgtattatgatgatctatcacattactagcagaaaaatcgtgttggataaagaattatagataacctcaaataggaaaagtggtgctagaggtagtatgggcaatcaatatctatgtacatattggccatgaaatgcggttaaacttatcatcgccacaaaatggggtgaaattatgatgtaaggacagagcaaaagttgcattcctatatatttgcaagacctaaacgttctccaattttagcatccaacaaggcctgaacaaatcactccactcctcagtgcttgaatcccaatgcagcacagaaagcaatctactgcaccaatccaatctcgcattaacaactagtagaagcacattaacaaagcattggaattattagggctaatgaagcaacggtgagtatgataagcaaccttagtccaagcctcctcgtcgaactcggcgtcgcccttcccgcgcggcacgggggcggcgaccctggacgggagctgctccagcgtcctccccgcgtcggctccccccgggaggcgcaggtcctcggcggcgagcgcgcgcaccgcgcagccgccggccacgaggcggtcccaggtgggccccacgccgcggccgagaggggtgacggccccgagccccgtgaccaccacgcggcgccccgcggaggggcgcggcggggggagctcagcctgctccgcggccgccggagccgccgaggaggaggagagcccacggcgtaggccgaggcggagcgcgcggcggaggcagcccatcgcggcggcgccgtcgcaaagccgccggagttcgaagcaaaggcgaagagtggagatgagtcctctcgactgttttccgtttcgagcagtttacagccgctggatgcgtgcatcgaacggctaggatctattgatgtactgcctttcttttattatttttttccctttttcttctttaaatttaaatattgttggggctgaaccaaattacttcactgtgcaaactataatttaccaaccggcaaacatattttacacaatcaaccctcatcttgctataaactttgaggacagtttcaactagcaaatcagcagtggaacaacaatagacacatgcacacaagacacggtgatttacgtggaaaacctcttcggtatgaggagtaaaaaaccatgggaccaacgatgcactccaagcttctgttataaacaataatgggcacaaatggagtcttcactagaacatctaaatgcacatcgcaacatcagctataacatcaagttacacacttgacatcatcaacatcaaccaccaaaactaacaagaggtatatcaacaaacaagcagagaaatagcagatcctttttggttctcaactgagatctcccaaaccacatatgcaaattgcacgaaacttggtacaaatgatggcctatgagtcatttccaagctgtccaaaaaacaacacaattgaacaccatttgacccttcaaactgacattccaccaaatgttgcataatgtaactgtagcaactcgagctgataaaccactactcaaatcaggtactctactcaaccaatccttgcataaactagccagattaaagtgctcaaagtaaggaacaaactcaccaagtttggtgccaattcaatcacgtttgaacctccaatcgctgacttgatgaagatcggataagagctaccaagctgaacaaactgtaacttttcttctctactctccgctctctctctctcttgtgttttgctggttttcttctcgtcctcaatggttgttgttatctcaactctctccatgaaagctagggtttttcttcctatcacaaaggatgtggtaatcttcaccattgatcaaggatatgaatcaatggctcatatttgttagattttcgggctgcaatgggctgagagcaaatgcttatggaggaaaatttggcccaacaaatactagacttacttttttttaagaggaaagtactccctctgttgcaaaatgtttgacaccgttgactttttagcacatgtttgaccgttcgttttattcgaaaaaatttgtgaaatatgtaaaactatatgtgcacatgaaagtatatttaacaatgaatcaaatgatatgaaaagaataaataattacttaaaattttttgaataaaacaaattgtcaaacacgtactaaaaagtcaacggtgtcaaatattttgaaacagagggagtactagacttactagtactgttttttaccactatttctgaacaccgtttggcgcatccaaccattatcataatttcaatttatggcagtaaagacataaacatcttgcctcttcttgatcatattagaatatgagaaagttgagagtttaactcatgaacctatgaacctatgtctcgaatcttaactcatgaaccatcattgtcgacaggtgatgcccgtagaccggatatagagggtattggggtactttggtacaaggatctacgtagtacgacatcaagcgaacaaaagacaagaattatactggttcaggccccttgataggtaatagccctaatccagttgatgtgggattatatggtagaaaacacaggttacaaagggaacaatgaacttgtcgaatccggcgaaatcgtagtcgagttgattcgactagatctcgatggcttggctccttgcaggctccggcttcgtaggttatgtgggttgtgtcggctctgagattcgatcctttaagccctcaccaggggtcccttttatatcacagatctggaggtctccaagtagaactcggagatatcagaccctattcgatacgtcaacgacccaatcttgtccgagtaggattcttcccatccgtagattccgtgaagtatttccatagaatatataggaagtatctgtatgcgcgtgggtataccataccgatatgtaacatatatcgaagggtaaagggtatgcctaacccgtaaccctgacagtagcccccgacttctgcttaaaatgggctcgtgtaaccattcacgacttcgggtgtcgagattgttgtcgttcccggtgcgaggatcgcggagacaggccgtagtcgagcacgccattcaaagcccaacggtcacgagcgaattttaaactgaagtccagaaaaccgccgcgcgtaacggacccagaaatttccggcgggcatctctctctgtccttggaattcgcaccgtcggtagtgcgcctatttaaaggaattttggagatccattttgaagtccgccaaccgtgttgaaaacattccacctgtaagcgctcttcgccttcttcgccgtcacaagaaaccctagttcatcaacctaggccctttctccggcgatcttgaatcagcaatggacctcagcaagtcatcttccaccagtgcgtcgctgaagaagcttcaggaagacggcgtccttcctggccgtggaaccatggagagagaagcaggaggtactaatccccagcccatcttgggtcgcatggttgcgatcgaagattatgttctctgcggtcttctccctccaccttccgagtttcttctcttggttttgaatttctatggtctttctcttctccatttgaaccccaattccattgcctttcttagcatctttgccccatctttgcgaggcctacattggggtagagccttttcttgatctctttcgctcttactatgaactgtgttggatggaatccaacagggtatctggttgcgtcgggttccgacttcaggatggcctgaagtcgcgttatatccccttccagtgcccttcttctcgcagcaaatagcggaataggtggttctaccttgagatcaaagattcgaaccctgtcttcgttgttcccaaagaacaaccggacaagatttcgtcttggaccgcaaagccccccttgaccccttctcttcagccgtttatcgacatcatcgatgatctccgagtacggggcttgtcggggtatgaagtcattgcagacttcgttggtaggcggatccagccactccaggctcgggcctatccagcttataattattccggaccggaggacgcgacccgggtttctcctcggggtatctttctcgcatttatcctgacatgcttatgttcgcgttcctattgactcatcgaaatctggttctcgatttacaggtctgaacagtgaggccgtggagcgccgtgtcggccaggtgatgatcagcggtccgacaacggcgagcaacatccccacgcctctttgtgaaaagggggcggccgagcgtgatgacgctatcaacgtaagtgcacccgataagcatcacgcatttttccttcgagatcaccttatgacttgattaagcgtaggctcttcctctgactgacatcatcgggccactcacagaccatcaggtggcggcgtctctgaaagagaaggtcgccaaggaggcgtatgatgctgctgctgccaccactagcggtggcaatgttgcgacaaaggggaggaagttctcctctgtaagcggacatcgtcgcaagacgccgacaccctcggtaatttatcctgtcgtcagatcgtgcagccagaaggattttgccttactttgcgttgattgtctttcaggcctcggacgcgtcacccccacctccacgacgacaacgtattgtgacgatcggcgagaagtaagtagatgaatttttagatttccgtgattctattcaagcgttgtctgacccatggtcgtcctgtagggaggcgcgggcaaaggctgcgcaagccaagtccggagggacttccagtgcgtcgcctgccgcggcttcgacggatgtcgtgcccgcagccgggagctggaaggcgacgcctagcggcccagtcagcgatcccgcggtaggtcgtgatccaccagctgccgtcctcacctgggaggagctctaagtcaagatggggcgcctcctcgaagcgggtgctcgcggtattggccgcgagattgcggaggcgaggtcggaagcagcgctggcgaacgcacgtgctgaccggctggtgcgcgagttggctggagctcgtgaagacctcacgaagatgagggaattggtggccggcaacgagcgacaacggaagaggctcgaggaccgcatgtcggaactcgggaacaacctatcggagatccagggctcgttgcggtcacctacactggcctg

SEQ ID NO: 27518 - DNA, 1780 bp, Oryza sativa
ttcgtctctacaggatctgacaaggccttatcggctctgggcgtccccagccgaagatcccttaggttcctcagaggccttttcaagacggcgtaaagggacataaggacaggtttcaacgcgaggtgtcatcagggtaagggatcatcaggcgaaaacactttgattgtaatatgggcctaaaaataggcttcattgatactgtaaggtgtcttacaggtatggatggtattgactcatacatagaatttacgtagttggtcaatgttccaagaatttgctaactcgcgaccgtcgccgtctgcgattttgaatgcgcctggccacaagacttgtgtgatcgtgtaaggtccttcccattttggtgagagtttgtttcgccctgcttggctttgaactcgttggaggacgtagtcgccgatcgaaggtatgcgtgctcggatgcgcttctcgtggtaacggcgaagggcctgttgatagctggctgctcggacggcaacctgttcacgatgctcctcaagaagatttacatcgatgtcccgctgttcctcctggtcctcatcgcagtgcttctgtactcgtgtactctgatgtcgtagctcgccgggaagcatagcctcagagccgtacacaaggaagaagggtgtttccttgttagacgttgtcggtgtggtgcgtacggcccatagtactgatgggagttcttcaacccattttttgtcgtgtgacatgagtctgtcgtagacgcgggtttttatcccttgtagtactatgccgtttgccctctcgacttgtccgttgctttgagggtgagagaccgaggcgaagcatattttgacccctagcccgatgcagtaatcctggaaatcgacgctgatgaactgggagccgttgtcagttatgatgcggtgcggtagtccgtatctgcaaaatatccctttgatgaatttgatggcgttgtcggccttgatttcccccgtgggtactgcttcgatccatttagtgaacttgtcgatcgccacgaataggaatctgtagccgccctgccctcgtgggaatggcccaagtatatctagcccctagcacgagaacggccaagttagagggatagtctggagcgcttgcgcgggtagctttgtgtgtttactgtggaattgacaggcttcgcatcgctagaccatgtcgcatgcatctttaagggcggttggccagaaaaagccttgtcgaaaagctttcccgaccaatgtccgaccggcggcatgtaacccacatatgccttcatgtataccgaggagaaggtgtctgccgtcgtcggtcgagacgcatttgagaagtaccccgtttggcgctttcttgtatagatcgttgccgaccatacagtagatctttgctttacgggttattttctcggcctctgtatcgtcctcaggcaactccttgctgttgacgaatttgattagtgggatgcgccagtcgtctgtggtctcgatgtcggcgacggcacgttctaccttggtgacctctgagctaatgtcgggggtgtccgagctaacttcgccgctaacctctttcactgatggcttcgtcaggatgtcgagaaaagtgccaggctcgagcgattctcgtctggacgcacgtcgtgctaggtcgtctggctcaatgttgtccttgcggtagacatgtcggacctcgatcccatcgaaccttttctctagcttcctgacttctgcgagatacttggataactcggggttagagcatttataatctttgtgcacct

SEQ ID NO: 27519 - DNA, 5597 bp, Oryza sativa
ctgggacttgatggctgttcgtggcaccaagtggacatcaaactggctcagctcgactacccatttcgcaatgcggccgacaacatctttgtttctcacaacttcgccaagagggaaagaggagacaactgtgactctgtgagcttgaaagtagtggcgtagcttccttgatgtcatgatgaccgcgtaaagtagcttttggatctgtgggtatcttgtctttgcgtcgtggagagcttcgctgacgtaatagactggtcgttgtactttctctctctcgacaacaatgacggtgctaacggaatacggtgtggtggcaatatagaggaataattcttcattaggttggggagcaacaagtacaggggggtttgataggtagcgcttgagtgcaacaaatgcctcttcggcttcctgtgtccatacaaatttgtcttgtttctttagcagagcgaagaaggttgcctcgttctcccatcctagcgatgaacctgctcagtgccgtcatgcatccggttagcttttgtacctccttgagtcttgtgggcgacttcatgttcttgattgccttgatcttctcggggtttgcttctcattcctttgctagaaacgaggaatccgagcagcttgcccaacggtactccgaacatgcacttctctggattgagcatgaggcgatatcgtcggaggttgtcgaacgtttgccgcagatcggcaatcaatgagtcgcctgtcttggttttgacaacgatgtcgtcgacgtatgcctcgacattgttgccaagctggtcgctaagtgcgccctggaccgtgcgctggaagatattccctgcggttattagtccgaacggcatcttaacgtagcaaaataccctgaacggtgtgatgaatgctgtcttctcttcgtcctcttttgccatgctgatttggtggtagccagagtaagcgtcaaggaagctcaacaactcgcaaccggctgttgaatccaccagttgatctattcgagggagagggaagtgatccttggggcatgccttattgaggtcggtgaagtcaacacacattctccattttccgttggccttccgcaccatgactagattggctagccactctggatgaagtacttctctgatgaagccagctttgagaagtttgtcgagctcttctcgtatggcttgttttcggtctggtgcaaatctccgcagtctttgctttactggcttggcatcgggtcgcaccatgagtttgtgctcaatcacctccctggggacccccggcatgtcggacggctgccaagcgaacacgtcagcattatcggggaggaaggtgatgagcgcgagttcctatttctcgtttagtgtcgccccgatcttgacggtcttgtcagggttggcactggagagtggaacgatcttgatggtgccgtccggtttcggcgtcttgtttgtcttgctcactttcttgggtggctcagtcatggcgggtgggctgggcgtttgctcgaccatgtcgaggctccgcttgtcacactgcactgccagctttgcgttcccttgaatagtgattgttcccttcggtcccggcatcttgagcacttgatacgcgtagtgagatgcggccatgaacttcgcaagtgcagttctcccgatgatggcgttgtaagctgtgtcgaattcagcgacatcaaaggtgatctgctctatttggaagttgttggcttggccgaaagtcacgggcaacgtaatcttgcccaatggttttggggagtaattccgtggaagggttgatcggttggtgtcaactcgctttacggaattcccattgcgtccaaagtgctggcgaaaggaagattgattgagctgccaccgtcgatgaggactcgcgctaccttgatgttccgaatagtgggttcgaccacgatcggatatcgtcctgggatgacggcggtcttggggtggtcttcttccgagaactctatcttctgctcagaccacttcatcttgggtgcagcccgctgccatgtcgaacagacgtcacgttccactttcttgtattctcgctttgaggagtacgttgtggaaccgccgaagatgtgtgaaacgtggaggtcggagtctggatacgctggatccgattcgtgaggaacctcctcctcgttcttctcgaccacgcgtactcgcttgcctttttcaaatgcgatgtgcttctcgagcgattttttgaaaacaaggcaatcttccagagaatgtttgtccgtcttgtgaatggggcaccatgctttctttgtgttgctactttgtgggtctgggcgcttgggagggttcacgtattctgctgcaagaacttccacttgagctttccttttcccatttttgcgatttttctttttgcttgactcagatgcgtccgtggctggtttcttgtctcccccggtcttcggcttatcgttcttgcgtcttagcgcatcatctgcgtgggcgcatcgctcaacaatctcgaacaatctccgagtggttgtgatgcgtcttgtcgccaactcctgtgtagtgtagcgatctctgacaccggatttgaaggcgcgaattacagaagtgtcggtgatttcggggattgtatttctgcactcgttgaagcgccgaacatattccctcagtgattcacccgagttctgagtcaacacgtgtaagtcgtcttcgatcgcgtggcgcttgtatgttccttggaaattggcgacgaactgttgccataggtctgcccacgaagagattgagtagggaggaagatgcatcagccatgaacgtgcaaaacctttcaacgcagttggtaaataatttgccaacgcgttgtcgtctgctccggcagcgtagagtactgtggagtagacttgaaggaactcctctgggccggtgctcccatcatacttttctattgctccaggttggaatctctcaggccatcggacatcacgcagggaacgaccgaaagccctacacccagcgttgggggcggtgggttgtcggcggtcgtgtgtccttcgtggatgtctgtctgatgatgaggaggacgaggatgatgacgatgacgacgggtcgcttggttccggcgtacgattacgaggatgtcggcctggatctcgggaatcctgtcgtcgtctcccactgttgtctcggcgccgatctctgtcatcgtcttcgttatggcgatggcctcgacctgtattgtctggcacccgtcgttcgcgatcgttgtgatcgtggtggttgtcctggtctcggtcctcgtttgagcggtctctttgatttccgttatcatggcgccgtgaagagacatgacgccgagaacgattcacattgtcttgtgtacgtcgtgcctctcggcggccgttgatgtgatctcggagatcgccagtgccgcgaggtggaggggtagctcgttggggtgattcccttcgttctgggtcttcaccattgacatcgccagttggtggctgctccgagtgcgctgcggtagcggcttcttcaaacgcgttgctgaggttggtcactgattcccgtagtcattctgtccaacgctcgaggtcatcgttcagaacgggatcgtagggagtttccctcagtatagcttgaacggccctaatgtgctgggctggagtagtcaattgtcctcccgcttctgcgttggcatgcgctgacgtgccaacgtcatcgatagccaatacctcccgcggcgcactcgttatcgatgacccatagtcttcgagaaggtgtaagactgatgattcgtgaggatcgatatcgattaccccaacaaatcgatctgaagttgaagtcgctccttgttccttgtcgttatccctgatggggacgtatgacttcggagacggagctttcatggcgccaagaaagaccttgcagcttgagaggtcgtgattctttgtcttgtgaataggacaatagacatcacgagttggagaaacacgctgaattccacgctctttgcaggcgcgaatttcagcgcggacgttgaggaaaacctagcaggcttacaaagtgtgtttcctggttttgtggataggacaccaggaccttgtggcttcggaagtcatctttgtcagctcgcgattcatgtcggaagaacaaggtttggccgcatcagaatccttctcgagctcggatgtcgtcgatgctccgttctccgtctcagcgggaggatttttcgacatgaagtcgtcttggtttgtagacactgcgttctcgtttccggtcattgggggaccggttgagatcggcgttgtggtgtaaaccgggaagacgatttcgctgacttgagtccataccagcatcgttaaagcagggtgtacttggctgaggttggtgttgacgccgttgtcgacgaagctggatgacatagtagtagaaccttgagtaccaagtgcccctacctggcgcgccactgtcgataggtgatgcccgtagaccggatatagagggtattggggtacgttggtacaaggatctacgtagtacgacatcaagcgaacaaaagacaagaattatactggttcaggccccttgataggtaatagccctaatccagttgatgtgggattatatggtggaaaacacatgttacaaagggaacaatggaacttgtcgaatccggcgaaatcgtagtcgagttgattcgactagatctcgatggcttggctccttgcaggctccggcttcgtaggctacgtgggttgtgtcggctctgagattcgatcctttaagccctcaccggggggtcccttttatatcacagatctggaggtctccaagtagaacttggagatatcagaccctattcgatacgtcaacgacccaatcttgtccgagtaggattcttcccatccgtagattccgtgaaggatttccatagaatatacaagaagtatctgtatgcgcgtgggtataccatactgatatgtaacatatatcgaagggtaaagggtatgcctaacccgtaaccctgacaatcatcattttttttacccactatattttcttttaaaaaagatttctgaacttgaacaagagctatataagaaaataagctcacacccaccaagttcataatacttattgttttagataagtaaacggtctcgaaaaacaattttgaccactttcctccatcataatataaatagaaatattgtaataatataatttcattgatgtactttttaagactaatatatacatatagtcttcatattttaaaacaaataattttaaaatatttatagttaaaaagtttaaaagggtgtgtttatttcacgccaaattaaattggaagtttgattaaaattggaacgatatgatggaaaagttcgaagtttatgtgtgtagaaaagttttgatgtgatgaaaaagttggaagtttgaagaaaaagttgggagctaatctaggccaaagtttgacattagccaattccaaacgacgagtattatctatgtaaagaaagtagctaattataccagtatatgttaaatggtattgtcattttttctttaacggtaaatgatattgtcgttatccatgatatggat

SEQ ID NO: 27520 - DNA, 613 bp, Oryza sativa
gacgtgccggacgcggagcagatgttgttggggcagtacttctggtcgatgatgatcgggtagctcacgttgtccatggtgatgccgtcgtacaggaacttggtcgccctcagctgcgacttggagtcctcgtacgacttgatccggaggccgttcgtggtgccctttatcgtgcagttggtgacgatgatgtcctccacgtccttctcgtccttgtacctgcagagatggccaaccacacacaacagaagttaatattatcgggttctatacatacaaattatctactaagtagttattaactatctctggttttttaatagatgatgtcattgacttttagacacatattgatcatttgttttattaaaaaaattatgcaattgcataagatgcttaaagtactattttagtgataaaacaacttagaacaaaataaatatgaattacgtattttttaataagacgaatagttaaatagatattcaaaatactacgaatgatgctacagtaacccacatgtgctaatgacagattaattaggctcagaagattcgtctcgcggtttccaggcgagttatgaaattagttttttcattcgtatccggtcaaa

SEQ ID NO: 27521 - DNA, 1236 bp, Oryza sativa
attttcacatgattttagagcagaaagtttttgattggaaaagactatacctactacgtttttcttactgaactcttattagcattgatgtgtcatgctattaatatatcctagattttttataatcccatatagttaaatcaatcggttgagataattgagggttgagatcattgagggtaagagtttagtaagaaaattttaattggtgtagcagtgctcttttgaatttattgtttgaaatagcgcgtatcgacgaacatattcctacaaatttgagatgaaatgttataggattttcagaggattcagttcggtttccgcaagataagcatgcagtgttccaaaggataactaaagagtagattacttttgcaatgagtttacagttcaactagttactaactagtccaatgctacaacgtcgcaatggtcacttgccagaaaatacaacaactgttctccactgtttaaacacaatttcacatctatatatcactggatagcaattaagctccccaaattattattgaatcaatcagaagtacccaaaaaaaaacagagaatcccaaaacatgactactgtacagaaatcagtcaggagggccactgcaaacaaggcgtttgcttcatgctcagtttcagtcagcacagcaagaccgacgcttcttcagtcttcacaccaaatccgggtcattcttgggtccagcagccacctcctcgacgtgcaatggcttcttgtagagctggagcagcagcgacgagcagacgacgctcaccgacgaggccgccatgcaagctccggcgagccatggcggcagccggatgccggtgaacgggaacaggacgcccgcggcgaccggcatgcccaggacgttgtagcccagagcccagacgtagttgagccggattcttgagagggtcttcctggagagatcgatggcagtgatcacatcctcgaggctgctcctcatcaggacaatgtcggcagcttcgatggcgacgtcggttccagccccaatcgccaggcctacgtctgcagcggctagagccggcgagtcgtttatcccgtcgccgaccatggccaccgtcaaccctttcatctgtgaacaaatgatgtgatgtaagttggaataatggtggtaaaatctgtgatctattccaactttgtttttgctgcaaggagaaaagattgcacctgccagtccttgatcttttcggctttaccacctggat

SEQ ID NO: 27522 - DNA, 3371 bp, Oryza sativa
gcctgctcctccttcatgatcatctccttgtggcacttggagcacatgttcatggtcgccgcgctgccaaagaagccgcagttattgatgcaaaggattgggccctcgggctgctggcagccagcctccttgtgttccatcgcaactgtgatctgttcatcaaacaaacaatgcaaaactcaataccgaaatgcgtataagaaacaaatttaaaatttaacatacggataaatcaactagtgtccaattaaatcgggcggtaagataatccaagaagcacctagtgctacaattttcctatcgaaatttccatataattgtgacttttaaaataacctataacccactgcggcgagcttacactttatgaaacaagatcctaatttctatgaggcgcaacgaaatcgccatcacaaaagtggattcctcatcttatcaaccaaacgcgcctatccatttcgacgaaatcaaattcaaacaccgtaaatctgctgtaacacgttttacccactcacatttaccccgagtaatgattaatcgcccacggttctacaacaaatcaaccccaaaaaaagatcaggaaactcacgcgaatctaatcatttcaacctgaaagatcacatagcctaatacacaaccgaaaaaaaaaatcaaacataaacgctttcccctcgagcccaataaccaataaccaaccacatcaaataccaaatcaaacaacgaccccccacatcagatccccgcaccaacccaaaaccgatcccccctccccaacaccagcaccacgcggatcgatcgatcgaatcgaatcgaccccaagaaaaaaacaaaaaaaagaaaaagaagcccacagatcaaacgggtcacccacaaactcaagggggggggtggaatcaggcagggggagcaagagggcaaaccctaaccctggtcgcggcggcggcggaggccgaggcggcggtggcggaggaggcgtgcggggattggaatcgcgagctcggtgcgcgtggtggcgtctcctctctctctctctctctctctctcactctctctcttcaggggaaggtgggggtggggggagagagagacactgataaaaaagaaagcccccgatggcgacggggaaattaccggtttgcccctcgcctcgacgtgtatttacgccacgtggtggggttgtgggccgttggatcgtggttggacggatgggaatcggagggagggtgtggggttttgcggttgggtccctgggagatgtggggttataaaaagtaggggctttttctttcttgctggggaagaagatggaggagagggagagcgtgtcccttttccttctctttattgttggtgtgatacttgtgtttaattattaaatcctttcttattatagtgctggaatttagtttttttctattgcagtaatactgtgaaataatatgaaccggtataaaataaaaagataacgtgttcatatgataatcgtataaattgttgctaacttttgtagatgaaaagaacaacatgttcataaccattccctataaaatcatattgccttataaatgaaacatataggttgtcctagatataaaacaatttttgcctgcttgacactcttgtgttcatgaaaattattttttttaatacacaaaagagttgcgcacctatgtattaagaacaataaaatttataagcggagccaaataaaaagaagaagagagccacatgtggagtagatgaaaaactagaggaccataaacctattctcatggtaagcaagagacgacctattgtgacatagcactctaccttattgcgtcatgtatataccttatcatgtacaaaacaataaaaataaagaatatggtcagaccaacttgcttttaactatggatgattggtagtattgatataggggtaagaatacatttttaggatttagttcaatcataagggtttggattaagtcgttgatttcgtaccagctaattaggtatgctaggtataaacatttggcatagcatacatgcacttagtaatataggtgctcaatgaaaagagaaaattgacatttagccatcgtcaggatggggtttcgccagaatgccactcccaaaagtggtttcgttaaaatgccatcctcaaacaggggcaacatgttgtaatgccattttatccatttcttctcaatttaatgatttttgtagtgttttttcttgctgagatgactaaaataccctttatcctatctcatctctctcttcttcctctccgttgcatatacacagcacggctcgatggcgtggctgtggacggggacgacgccagctaagctggggacggggacggggaaggggacgacgccggcgtgggtggggaaggctgcccccaacctccggcgcgtgcgccagccaccgcgatcgaagacggcgacggcggcgagcctgacctggacctccatggtaccaacgcccccgcccttgagcggcgcggcgtcgtcgggacccacgtatgcgccatccacctcgaggcggaaggcgagcgtggtgatgttccgcggcggctgcgcgaagggcgggagcgtggcgacggcgatgggggaggacggggcgagggagacggaggcgagcggggagaagcgatgggggaggacggggcgagggagacggaggcgagcggggagaagtaggtgacagtgagcttggagtttgggttgtcggcgaggagggaggcgtcgatccgtccccagccgcgccggtgccagggcagggatccatctcctccacgcaagtcaactaaatggtcacaggggcaattttgtcacaccacggtggaaatcatttgcaaatcagctaatttggtcgaaatggcaaagtagcaatgtggcgtcgttcgaaaatggcattataacgaagccacaatccggagtggcattctggcgaaaccccatcctgacgatggctaaatgtcaattttctccaatgaaaagggatcatctgacttaactgttgtgtaattgagccactgacacatggaaagagactcacatgtcagcatatgtactttctccttgtctttttcttaaccaacgcttgtaagatcttgtattgtactccctccgtcccataatataagtgattttgagtttttacttatacggtttgaccactcgtcttattaaaaaaaattggaatcattatttacttttttgtgacttactttattatccaaaatactttacacataacttttcgttttttatatttgcataaattatttgaataagacgagtggtcaaacactacaagcaaaaactcaaaatcccttatattatgggacggagagagtagtattcatcaaaacgttag

SEQ ID NO: 27523 - DNA, 5166 bp, Oryza sativa
ccacatgtcagcctgaagtaccgcacatgctctgcaggggatctcaattgagcagatgatattgatctcttaggtctaaatttcataagtaaactatttataaggtattgtttgagttgttgataaaacctaactaacaagctttaatacgtagagaaaaagaagattcctacaacattgtactccctccgtccctaatataaggattttaactttttgcctgtactgtttgaccattcgtcttatttaaaaaaatttagaattattatttattttatttgtgacttactttattatccaaagtattttaagtataacttttcgtttttatatttgcacaattttttttaaataagacgagtggttgaacagtgcacacaaaatatcaaaatcccttatattatgggatggagggagtactgtcttaaccaaattcctcatgttatttcccatcttcgtctactgtggaggagctctaactcattactcatccgttataattatcattttctttaggacaaaactcggtttagtatgtaacatttgatatactacccggtcgaaccgtaccaagctttcttgtaacatatatgatggtgttggagatctctagccaatcttatgccacatcgcatatatttcttttaactatgtatgtgccctaaataaacttagacatttattcgagccctagttttaaagacaaattctatctacccaaattgtaccgattctacccagcacacatgctaaaggaattttgcaaaattatgtatgctcgtgtggctgatctctcctctctactacacatccattgtataaaaacgagatttgaagggagagatacccctctaaacttttttttgtaaaatgaattgataaacatgtcaaaaattaaacacgagattttaaaatggaaaccacacgctctttacaactgcaccgtgaagtgatctctcacctccggtgtacaagcattttccatcgaaccctccatccccatggcgggtggttcattcgacgagacgccgccaacgccaaatcccggcgcgaaccaaaaagcgcgggaaaaatttccccgcacccgcgccatctccacctataaagatctcgccgccgcagccgccttctcctctacactactagtcctcttcaccccgccgcttccaccagatgggccgcaagaggagggctagggtttcccgcgacggcgacggcgaggaggaggaggagcccgcgccggtcgccgcagagagcaagagcctctacgaggtaaatccccaactccaaaccctaggtctatggcttacgaggtgttacccgtacgggtagcggttgattttgcggcggggtggtgttggtctgatcgaatcgtgtgctggatgcctggatcgatgtttttttgttctttttcttttttttccgggattcgagggtgaggagcgcatctgattgttcgatgcgatagcgggatagctttcgttttcttgtttatccggtgtcgcgtcaggttccgcccgttggggaatttcgtggttcgctgcgcggattgatcgtgtgttagtactagtgtacaagtataacccatatttgcataccagattacctcgaattgaagcaactgtgtgtaccatttcaatgtgcaaaaacaattgggcaagattatgctactgatgaacccaaagtacgaagtgcgtacttatgcaataggaaaaacattttgtatcccaaacatggaggcagttgcttgaaggctcacatttcacttgtgaagccttatgactgatatgggagagtgcttattggtttggccttaactttcagctctagttttgggcttcgcagtagtagtacctctccaaggattttatagtgacttaatcttctttaaatcttgctggccttcctgccaattgctctttgatggtatggcattcttgcctttgagctatacctgttcctcttaagtattactgccacagaatttatgaaggtcaactgatgtttaaatctaatttttatcatgttctggaatctggagtaaatgtcaaacaatcaaacagttacgtggctgggtgtgatagggcctctaactctctactatgcacatacattgaggacatagttcaatccttgctagcttgtctcgttaaaaatttatattgtcaaataaaaagggtttctcatatcatctgatcaatcagaaaacaccaatgactgggtaaagtgtgcaagagccaagaggtacaagaggttgtgattggcggttgatctcaagctataccactattagttttaaaagcaagtacaatagcattaccttacttgcataacttaattcaataaaccttatatatgtcccagctgttcagacatcagtattttttttttgtcttgatctgtgctgaaaaattgtaattaattggcgcacactactagactgtttagcgcgttttaaaaaaattctagactgaaggaaatgttgctgaaacctaagcttaatgaagtgccaaagaagagctgaaagagttcatggaaattcatgtaattgactttaaaaaggccacaaatcataagattgcaaccagaaacagtggctcctataggctgagctagctgcaagcctgcaacttaagagccccatcggttggcctaataagccaaagcaaaagccaaaatttgaattttcgaacttgattttaagatattttcaatgtagtttcttttagtgttggattttaagttgctatgaacaaatatataaaagttttacctataaattaatttttatatggcttattagagaatatgggcaaccaatgagacttattgtgctgctacctccctagcagtgacccctagcaaagggcattgctggcttcctgcagcagttgtctgtggtgcaggtgcagctagctcagtggaatcggcctaaattatttatttttaagcgaagctgtagaaaggaacctaaagtacatatgcaatcagaaacaattgttatgcttcagttttgtctttctttataacacaagtaactcatttgatgtttcctttcttcattctgaagatcttaggggttgagaggacagcttcacagcaggaaataaagaaggcttatcacaagttggccttacgtcttcatccagacaagaatcctggagatgaggtaggatcttgtttccaaattttttccatggattaagtgccatttgtctcaattgagctgttatgtgatgtcaggaagccaaggagaaatttcagcagcttcagaaggtgatatctattcttggggatgaggagaaaagggcattatatgatgagactggaattgctgatgatgatgtgagcacctgattccaagtagtgtgatttccaacctttcactcccagtagattttctgaagttttgtcttttcctgtaggcactggttggagaagctgcagacaatcttcaagagtacttcaaagctgtttacaaaaaggtatctttttggtccatatcaacaaaaaaacttgtgctatctgttcacctatacaatgatcggtgatgacctacacttctgcaggttactgaggctgatattgaagaatttgaagctaagtacagagggtcagattctgaaaaaaaggacttgaaggatctatatacaaaatttaaaggcaacatgaacaggtggcttacaaaatttagtgttgattaattttctatacagaaggcaatgaattgcaagtgaataattgggttccatttctattttaatttggtgcccttgtatgcaggcttttttgttcaatgatttgctcagatccaaagcttgattcccatcgctttaaagatataattgatgaggcaattgctgaaggtaaatgattatatgctgttgccatataattttatcatataatattgaatacctttttctattccttttctacaatgaagcgctggcaaagtgtttagcttatcatgctaactcaatctattccctgaaacttctctaatggttaaactcctttccatttccttcccttttgtaggtgagctgaagtcaacaaaagcatatgataaatgggccaagaagatctccgagattgaacctcccacaaacccattagagagaagagtgaagtaagctctcattctcttatctcccaagtaatccgccttccgagatgttgtctaccatcagttgctcactactgcatttgcctcaaacctcgtcacaggaagaacaagaagaagagcgaggagaacgatctgatcctcgcgatctcacagcgcagggcgcagcggaaggaccggttcgactcggtgctctcatccatcatgtccaaatgtgacccaaaggggagcagcagctcggagcccacggaagaggagtttgagcaagctcgtcagaggctcgagaaaaagcgttccaagaaccgcaaatgattcgccttgcagcctcccttgtggcttgtgcaattctgtttcatcgagtttgttaaccaggcctatctttgacagatcagattgtctgatattctgatccctagtatctatgtgagattggctgcttctgttgtggtgcaagttcaggctggaatctgaacttcctgctcttttgctgaaactggggccgatctttagcatcactgcatatgtgtataatcaaaatcttaaatgtttcctggatgtgaacttgtgatctagtttctgtataagttaatccagtagctgtcttgagtttttacgcctgtaaacgatataaacaagaatgcatcatcaacagggacgagaggcgggtttgcaatctcgttttggggttgaattgtgaggcacagcactattttcactaaattctgatgaaatttcaaacggaactattcataaaactgaatggtttgggaagctcgaataaaattcgcatgaacaatcttgataaaaactggttggtttttgcgaaattttctgtgatttcgagataggctagaaatcatatttttgagaaggggggggggggggggtccaatggtatttgaaaattttagggtttaaacagcaaaattcgattgaaatttggcaaacgccttagattacaactccatcgagcaatcacctccactaatcaccaccacccctatcttggcaaacccactaatcaccacccccatttttgg

SEQ ID NO: 27524 - DNA, 2836 bp, Oryza sativa
aggagagagagagtgaaagagagggtgtctctcgtgggagaaggcggcgcggttggtttatttgtgtttttttttaaaaatatatgatctaattcgttggctaatttgattgtttttggtttatattttaaatatacgtgtttgtgaattgtggttgaatatatatatatatatatatatatatatatatatatatatatatatatatatatatatatatatatatatatatatatatatatatatcatgttgcttaatttgttttctgacgttgtacctgctcaaatccacacttgtaagcttgtaaccgttattttatggcaatttaaatatagcatatgaattgatttgttcctttttaattgttttttttgtttaaaatacattcagatcgttatagatttatcgaaaacggtaaacatctttaacacaagtcgttttgtggcatggagaaccatctgccgctcaagcttatagaatggacgcaggagtaggtgggtggatggcatgattcatgtggctggctattgtattagcccaactacattgtttcagttagcttttatgaaactgataaataatattgatattactactccctccgagttgataatatttgtcgttttaaaaatatagtctaagaaacatatttgaccactattttctattataatatatatagaaatatcacaaatatataattttattgaagtacatttttaaaactaatatatacatatagttttcatatttctaagataaatattttataaattatttatagtcaaagatttgaaggtttgactttactctgcttcaaaatgataagtattaccagttcgaatggagtatagtacattgtttctccttaaaaaatctacatcatgttatccgcgtcacattactaaaatcataaagagatgtgacacttcataatactacgaatctagactaagagacggttcagattcgtaatactagaaaatatattcctccagaatcgcttatattatgggacggacgtaacatatagaagttgatttagaatattaaaactcaactaatcaatcacatggtaatgactttttcttttgtttttggtggcttaacttcatctcaaccaaatctaaattcgacctgctatatctgctcatccagttagatctcgaccgtcgaatctgcacgatccacgatatcaaattcgcgatatatatatttttttaaaaaatacaaaattccaagaacacaagttgccaatatgccctgacaaagacaacaaaaaaaagaacagaagaaaaaaaaaattaccaagacaaaattcccctatctattgactaacccaaacccaaagcacataagcatgtgattagcaaaagacgccgtactctctctctcatcaaactgctgacgtacgcacgccgtgagacgccgccgcagcaaaagcttcccttcccccatctccctctcctctcctctcctccccgcctccccccgcctcgataccctgcaagccctagctctctctcgccgccaatggagtcgcaggtgctggtggcgctcgccctctcgctcgtcggcggcctcagcacgtccatcggtatggccccgccccctcgcgcctcttcccctctcaacagtttcgtttcgggggtttggatgctgctctgcctgcggtcgggcgcggtttcctagggttccgcgggtggatttaaggccgttttgtgtagcttgcgggctcgctgcttgaaggaatcgccaagtggctgagcatctcgcaatctcgcgttcctgggaatttctgtgtttctggtgagtttcaggtgtcgatagcgaattctgtcttgctaccgctcgtataggtgacttccatgcgaattcagatgcatcctttattagcaaatcgaaaattagtgtttaggatttttgttaagaaagagagttcagaatccagtgagtatctcccttttgtaccattttggcttgtgagtgatgaatgttttgctatttaggcctctgaatatgaaaattaattgatcacaatgattcatcagatttttttgttttaaggtcagcaatggggtgttgtaatttgtaaataagtggcataactggacaggtttagtggcagggtgtggttttctcttatgtgtactatgtataacaggataagtaataaatgtcgttgcatggtcaaaaacttttaacccctagggttcaacattgtacttccttatgtttggttaacaatttgcgaccgtgaatgatctcaggacattgagcgatgagtactctcttttaaaactgtccctaatactatgtggagggtttccagcaaggcttctttgtgccattttcccactttagaagctccaattttctgtttttcaggtgcgctgtttgtgattttgaatccgacgcctaatcttaagatgcttgggcttctacaggtgataagctttgttctctatagtaatggagcaacttcactatcttttaagcaagttctggttttgctattggttcttggtagattgatctcttgctgttactgaatacagggttttgccgctggacttatgttgagcatttcctttctagatttggcacacaatgcattgaattctattggtttcttgaagggcaacctttgggtcagtcatgctttgcctatacttatagtatccatgccaatgtaatgccgatctatctcatacaataagcagcaaccattgttaactaataataatattttgcagttttttgctggagttcttttctttggtttggttgtcaagtttattccagagccaactgttgtgccaacagctgatgcag

SEQ ID NO: 27525 - DNA, 2591 bp, Oryza sativa
ttcctgcagcccctactctgtggcagagcagacgatgatccgcatgtccggatgccgcccacgctgacgcccacgacatgctcggctcatcaccagctcgcgatcgaggcggcggcgacgacgccgaggcctccgagcagccgcagccgcagccgcagccgccattgtcgccgcgcgcggggggcggcgaggcgagggggctcgtgctcgcgtgcgccgacctcgtccaccggggggacctcgacggggcgcgccgcgtcgccgaagccgtgctcgccgccgccgacccacgcggcgaggctggcgaccgcctcgcccaccacttcgcccgcgcgctcctcgctctccgcggaggaggcaagggtggtcatggcggcggcggcggtggcgtggtgccgtcgtcggcggcgtacctggcgtacatcaagatcgcgccgttcctgcggttcgcgcacctgacggcgaaccaggcgatcctggaggcggcggcggcggacgccggcggcgcgcaccggcgcgtgctgcacatcgtcgacctcgacgcggcgcacggcgtgcagtggccgccgctcctgcaggccatcgccgaccgcgccgaccccgccgtcggcccgccgcccgaggtgaggctcaccggcgccggcaccgaccgcgacgtgctcctccgcaccggcgaccgcctccgcgccttctcgagctccctcaacctccccttccgcttccaccccctcatactcccctgcaccgccgagctcgccgccgacccgaccgccgccctggagttgcacccggacgagacgctggccgtcaactgcgtgctgttccttcacaagctcggcggcgacggtgagctcgccgccttcctcaggtgggtcaagtccatgaaccccgccgtggtgaccatcgccgagagagaaggagtcctcggaggtgacgtcgacgacgacaacgtcccggacgagctgccgcggcgggtggcggcggcgatggactactactcgtcggtgttcgacgcgctggaggccacggtgccgccggcgagcgcggaccggctggcggtggagcaggagatcctcagccgggagatcgacgcggcggtggcggcgcccggcgccggcggcggcgggcgcgctcgcgacttcgacgcgtgggcgtccgccgcgcgcgccgcgggcctcgcgccgcgaccgctgagcgcgttcgctgcgtcgcaggcgcggctgctgctgcggctgcactacccgtcggaggggtacaaggccgacgacgacggcggccgcggcgcctgcttcctccggtggcagcagcggccgctcatgtcggtgtcgtcgtggcagccgcagccatagcaatggccaagctcacaagtgatcaaccatggtgttcgacggttcgacctcgagagctccatcaatggcgtctagcttgctctcaagctaaaggtaccccactccatccatcgatcgcattggcaaaaaaaagattggatcttacgaaggatgaactgatcatagtctcagtgcttcatgtatcgatgatctagcattctagctagggatcaagcaatgatcctagctagctaagctaagctacctgccatttttcatggcaactcgagcttggatttgtgatggacacgttgcatgagaaggcgccattgttgggagaagaaaaagaggatcttttgggcattcaacttggtgagccagcttccttctaccactagctctagcaccaaattcttttcattttttttttgcttggcaaatcttgatttttttttcctttagttactcctacttttgtttagctttgatacccaaatctgatattggtggagttgttatagattgttggttttgacactactactactacataatatctagatttctagatctgtgttaattactatgttaaaagggtttgtgcatgcatgcacgctcttgcaaaattaggtcatgttgcatatacaattggtttctttgatctcaaataatgaagatgatctccctattgtggctcaatggattgggctcatttttaaattttatccttgcatttcacttcctctctctgctgtttgatgcgcttgtttgtattataactaatcatgctttggccaccactagctataaactaatgcaatttggttggtctttgttttacttaggggggtaatgaacaatgatcactcttgtgtgctgcgaaaggccagtgcattcttgcacactgtagctagtaattaattactatatttataccactcttgtgtagctaagctagctagtataattctcaaatgtgtgctagctaagctatagctgctgcattaagagaacaaaaaatagtagaatcatgtctcctgctgcctaattaaggagaattttattgtgttcttgtcctgtgtcagtgtgtctatgccccagatatgctgggaagctgtccttgggagagcatggaggaaatggcatgatcccatgcatcaatggcaaccctaattcctgccccctgtcccctctaacaaaatcatgggatttctcaagcccaagtacccccttttggtggcacaccctgcaatccttaaatct

SEQ ID NO: 27526 - DNA, 5690 bp, Oryza sativa
tatgaaagattgagatattttcttttgtcaaaggatttcaaaattggaaaagttgacaccaccctttttacaaaaatcattgatgatgatttctttgtgtgccaaatttatgttgatgacatcatattcggttctactaatgaggtattttgcaagaaatttggtgatatgatgtcgagggaatttgagatgtccatgattggagagttgagcttcttccttggacttcaaatcaagcaactcaaggatgggacgttcgtgagccaaaccaagtacatcaaggatctactcaagaggtttggcttggaggatgcgaagcccatcaagacacctatggcaaccaacgggcatctcgaccttgatgagggaggtaaaccggtagatttaaagctttatcgttctatgattggtagcttgctttaccttaccgcatctaggccggatatcatgtttagtgtttgcacgtgtgcacggtttcaagccgctcctaaagagtgtcacttagtggccgtgaaaaggattctaagatatttaaagtattcctctactattggcttgtggtacccaaaaggtgctaaatttaagcttgctggctattccgattcggattatgccggttgcaaagtggatagaaagagcacatccggtagttgccaaatgcttggtagatcccttgtgtcatggtcatccaagaaacaaaactccgtagccctctccaccgccgaggcggaatatgtttcggcaggtagttgttgtgcccaattgctttggatgaaacaaaccttgttggactatggcatatctttcaccaaaacctcactcctatgtgacaatgatagtgccataaagatagccaataacccagtctaacattctagaaccaagcatattgacatacgccatcacttcttaagagatcatgttgccaagtgtgacatagtcattagccacataagaaccgaggatcaactagccgacatttttaccaagcctcttgatgaaacccgcttttgcaagttgaggaatgagttaaatgtcatagacttctctaatatggcttgagatggtgcaccatggttgcttcttttgcatattgtatatttgctcctatttgttcttatgctttggatttattgtcatttggttcttcattgcgaaatggagcatgtcacattaaggaggagtcttgcactcttgcatgtgttccacttccttttatatgtgagcaaatcaactaaaagtgctagtagtgttttcaaaatgaccaagtcaacataagtcaaaacttctgcaaaatcgatgcattttgaaaactatctcttggaaaatgttttaaaaggttccctatatgttttccaagcctcacattgcaagaaaaatgatttttgaatgaaaatgccattttggccctcttttgaagaaactagattcttagttttggataaaatgagatttatccccaaaatgagattgagaaggaatttgaggaaagtttcaaaacaaagttggtagaggagaagttttgaaatgtttttggtgttcaaacctatttcaaaaaccaaatcattcaaaagttatttgaaaatcaaattcgcccaaaaacccctatagaccataaaaggtcacctcctagcgctcaagtgagttttgttgcaaatcttcataattttcaaatgttatgaatggttggcaatattttaactcacacatttcaaaattgctccaaaaatcaatttttttattgaattttattgtgtgggggtagccgaactgtgcaagggctatgcacagtcggctgggggccaggcggtctgaccggtgctatatgcacggtctgatcggcctgatggcggcggtctgaccggccacttgggcccggtctgaccggccgcacccttgaggtctgaccggccgataatagccggtctgaccggccagggatagtgggcccaggaatctttctttttcttctctcttcttcccctacctgactccatctcctcccattcagctttcttcttccccaactcgaaaaaacacctcctctctcttttcccaaaccctagtcacctccctctaccaaattccctcggtctgaccgtggatttctctccggttacaccgtaagtgattctcctccgcttcctctctctattccatggattggtttgtgtttttgttgaagtttttgatccatggcatggaaccctaggtgaagcacgaggtgttcttcgatttgcaccaatagtgggtagtttcttggtgtgattcaactccttcaaccggtaaatcactctccctcttgcgcattatctcaaatcggtctatttcaatctctagggttttgggtagtttcccccattattccaatcttgatgaaataggccataccctttgatgttcaagttccaaacttgtgcaatattgttctagcaatattttagactcatttgtgtgattgttggaaggatttggttgtgctcctgtcagtggcggtctgatcggcaggcggtctgaccggcaccaaagcggcggtctgaccggcctagggcaggcggtctgaccggctaggggccgtcggtttgactgacttgacgccggcggtctgacagtccctggcccccggtctgaccgcccctgacaggcagcacccccattccttcctcttcactatgtggcttctaaaattgttgcttatccatcctttgctccttgtttttcagctatgcctccccgcactcgccatggtcgtcgtgagcccatgcccaatcccgtcaatgagaatgaggaatcaagcggagatgagtatgttcaaagtgatgatgacaatatggaaaatgttgagggtgatgagatggaagtaagtgatgatggtgatgacaatgggagtggcaatggtgaagatgatgaggcaagtgatgatgggagtcctctcgattccaccatccaatttgtgtttaatttgaggaatgctcaacaatacactatcctccgtcatcatgatcaattccggaggcctaacgattgtaatgatccaagatttcatacccagttccaaaagtccgtgtatgaacaagtgtatgccaacaaagccttcgccgaacacaagtggatttcttggaggcacattggtgagacaccggagtttgaagatttgcaagagatgttctggaccgttgggattgatagaattgtcaccatgaagcaatcttttgatgaagatctcatccggcaattctatgccaccgtatgggtgtccggcgattgtgatgcaatgaagtggatgtcggggacccttcaatgctctatcaaccgccgtgaattcaaggagctcttgcacattcgcttcaacaatggggatgaccttcatgatgagcacacccacaaccccttccccattgatcacttttctcagatttatgaagacgggggaaggcacacatatggaaaggtggcgggttagagggctctcccaagtgtgatcaaccacatagtaagggccaccatcctcccaagatgcggcaacaatgatgacatacgcggagttgcttggcatgtcattgatgccattttggatggtcgtcggtttgatgttatcaaccttatgatgaaggagattgccatctcaaaggggactattggacaaggaatctattatgctccctacataatgaggttgattcaaagcaagttgggacaaattggtcacaatttaaaagaacataaggagtacaagcctcgtctccaactctcctcccctaaagctcctcgtgtgcgccaaccaacatttgatcaaggtgcaagctcaagtgcagccccccctcctcctcatgggtctgatccaagtgcttttttccatccacaatatgcctactttggaatgcaacccaatgaattcttcaacccggtccttggggctattaataccctaagtgaaagcattcaacgcttatccaccgggcatgaagcattgcatgaagatgttcgtggcttgcgcaccgatgttggcaacttgaatacttcggtgggaagattgcatactagggtgggtgtattggattcttgagtccaaaccttggagagtacccaagcttttggctatcatcgtcgccgtgatgcttctcatccttccacttcggcgcgtcctccttctcctccgcaagagtgaagacctttttggtgcttgatgccaaaagggggagaaaagtgtgttttatgttttgtgggttgggactagtagtagtgaggttagtcacctcatatttaataggttaaggaggtttggactatattttgtatgggtatgggctattactctatattgtgtgttctttgtcgttttgttaaactctctatgtcatttggacccttcatggtcttgtaatagcctacatttatttgtgagcactttatgtggtcttgatgtgaacttgtgctatgatggatggttggtgtgacattgatatacttgtgaccatcttatgcattcggttgattcatatgtgaagttcacattataatttgcatatgtgttgtgctatgttgaattgtgaaattgaaatgtgcattggctccatatttgctatttgtgtttgttatccatatgtttagggggagcttttgcttgtcaatgcaatatatgtccatgtgctctatgtttgattatatatatttgtggtgttcgtcatcaattaccaaaaagggggagattgaagcatctaggcccccggtgttaattttggtaattaatgacaagcgctaattgtggactaaccgttgtctttgagctatacattttaagtcaggtccacgttatatgtgcgcatggatgattatcgatggattaaaattgacggcgcaaagcaaagagaaagaagacggtaaaactagtgctttaatttagaattgatcgaggtgtagggcgatcaaaattgctagtttattttctagtttcgcagtactattaagaggggtaattacctagcaaagagatgattgaattaccacattatgtcattgcattttcatttgtgctctctttttcatcacacgcacattcacttgcaaattcactgggttcggcctgaccagggggcggtcataccgcccacttgggccacttggccggtctgaccggcgtgccctggccggactgaccgaccccaagcgggcggtctgaccggcgcataaggccggtctgaccggcggcacttgcccgatcagaccggccccctggaggccgagatgatgctgctcgggatggccgaaacagagccgacggagccgtagtcggtctgaccgagccgaggccggtctgactgcccactcaactccggtctgaccggccaggccgatggggccctctgacagcacttcaacggctagttttctagccattgcagagtagcacggtctgaccggccacatacctccggtcaaacaggcagagcacaaagttgggggatttcgcccccaacagctagttttggcgggtgggagtataaatactcccccaccagcagcaaggggactctcttggcacccaattcaattgcatacatcccttgcacgtctctcacacccacttgagctttgtgttcatccatctagtgtgttaaagggttgattagccaagagtcaagtgcattgcttccatttgtagacctagtgtggcacttgattgatcatct

SEQ ID NO: 27527 - DNA, 772 bp, Oryza sativa
ccagatccccttccctctgccgcggggccgtcgccgtcgagggtcatcgccatcggagtggcggcggggtggccagtccggcatgggctttccggatctagcctcgggcagcaacggcggtggcttgctggcgaggtcagcgcccggtcgccctcctcccgctcccctctctccctccagccgtcgccgtcgccaaccccagactccgccgccccgtgccgcctcacaggtcacctcgccgatgactccgccgccctcggcacccccgcccagcgccgcctcgcgggtcgcctcgccgatgtctggctcgcccttctcctcttcaaggccgccgagctcctcctcgccgtcacgatggcggctggtggagcggatcgacgagcgggcggcgccgtgggagagaggcaagggtaggagggggatttggggggagcggcgaggagacaggagcctgcagtgggtctcctcccagggacgagggttgtgtctctgcgaaaagtggtcgctccttgcaaagacccgcgttcctctgcttggcgccacgttcctagcctgggagacgactcacgctgaaaaggggatgggaggcaaacggccgtttgcgagggcacgggtcgagggtagggatggcaacgggtgcgtacccattgggttcacccaccccatacccacacccattgaaatgaaatacgcccgctccaatacccacacccgctcacgggtgaaaaattcccccatacccacacccgcatgggtgacgggctgcaggaat

SEQ ID NO: 27528 - DNA, 1180 bp, Oryza sativa
ataagtcttgatcaaaccaaatttagagctcttttcgtctaaaacaaatatctttgaagattccatgctctatcttgatgccatccatctacatgtttttacagggtgaaggctacaatgtcggattcggaacctgcactgggaaggttctgcctgcacttccatgatccaacatatagaggatagcctgctttcatctcatcagtgtgtcaataatctctgaagaaagcatgcaatgaggcaatgtatctagctagttacatctatattttagtgcttagtgatggtaaaaatactaataaggtatgcttccctgagctttacagaagggatgtaattaatgttctccagttacaataagaacttatttgaagtcgtcattgtctcagtgattttggcatgcaatgctggatgtgaaaatcgatgtaatgttggtcgcatgatcgaacggttcagaacgttgaggccaaaattttggtttggattttggaggtgagctggtgaaaccactcgtgcatgctgcatgtattgcagggctatgctagtacgtggtagcaagctatctggtaaaagcaaaagtaaaaacacaacaaaatgttttactgggtgcaaatcagggttcgacttaccgtcggtaaccgcgcggttactaggtttaccgcgggtgtatggtaatataaataccgcggtaaccttcttaaattcaaataaatttaaaaaataatttgaatttttgataaattttgcatggtttttcacggttaactgtggttaccgcgcggtaaccccggccccggcggtttgggaaaccctggtgcaaatcaccttttgtacgcacgaatctcatagcaattcctcttgtttgccgattgaagaaagccttgtatggtctcaaacaagcaccgagaacgttgatttgcaaaattcaagatggccatgatgaattaagctagatttagacagagctcatgtgatcattctttgtttgttccttatacggcttatggtatggttatttttatattttgtacgaatcagatcagtttccatccgaatcagaatcagaaaaagaaaaacatatattccaaacaaataagaatcaaacaaaaaaataattgaactgaagagattaaactacgacaactaaacggataacaattaattaattaatcaattaacg

SEQ ID NO: 27529 - DNA, 1348 bp, Oryza sativa
cgacgtgatggtcaccttgtcgatcaccacgttcttgctctcgtatatgttgaggtggaagaacttgctgttcttcagcgttatccccctcactgtcacgttcgtcgagtagtcgatcaccaagctctgcatccatccattgttttaattaattgcccattattagtcatacagagaagcaagaagataacaatacaaattactatcacagcattggttattttgcccatgtcaattaattataaatggactgtgatactcaatagtgtttgctggttaaaagaccagcttaggctatattcagatgtggaggttggaaactccaccttcccaaaggcaaaatggagtgatctattagcatttgattaattaaacgttagctaaaataaactttaaaaatatattaatataatttttttaaaaaaacaactattttatattttttataaaaaaacacaacgtttaacagtttgtaaagcgtgcgcatgaaaaacgagagagtataagatttattcgaaactaattaattcgatgttataggtgttacttttttgtatatacaaatttagctgaatttaaataagtttgaatagaaaaatagaactactttatgatatgaaacggaggaggaggtagctatagagagagacgatgggggtgtgggttgcttacattggggaggatcttgcagttgtagttcttgttgcactggttgtgggtccagacgagggggccctggccgtcgatgatgccgtggccgttgatggcgaagttgtcgacgtgctccacctcgatccagttggtcttgtaggcgttgaggtcgccggtgccgaggaggttgccgtcgaggcggaggatgatgctgctggtgcacggccccttgaggttgagcgcgccggtgaggtagttccccggcgggatcacgatcttctgcgtccccgtcgcgttgcacgcgttcttccacgcctgcagcacgaacgccgtgctgtcgctcgtcccgtcgcccttcgcccccagctgcgcgatgtccagcggccccgccggcaccgacggcgccgcccccgccgcccccggcgtggccggcgtgtacggcgccgccggcgtcgcccccgccgccgcacccgccgctgcagcccccggcgctgccggcgtggccggcgtgtactgcgctgtggcgaacgccacggacaccatcagcgccgccgccgccgccgcgatggcggcggcggtggtggcggatagagacgaggtcgtccttctcgtggaggaaaccatgttgatatcttagtaggtacggcgctgtcgaggaggggcgcgccgccggattatatatacggcgggaggggga

SEQ ID NO: 27530 - DNA, 1644 bp, Oryza sativa
ctgttcgcctgacaaagttagaaaaaagttaaggttagatgacatgagacagcaaactaggaacatcacacgacattcaacaaaaattattagcatttgcatctaagaagccaacctctgcaccagcagccaaatcacacagctctagtagcggtatcttggagaacacctttgtttgaacaacagaaggtttaccgacagtcagcgttccagttttatcaaatatgatagctttaacctgcacataaagaaatacaaggaatagtttagtgtcacaatataaaaaaaatagaatacatttgatgtgagaaaaaataatacatgacatagaaatcatctcagttaccttgtgagctttctcaagtgcattgccacccttaataagaacaccttgagaagcaccttttccagtggcaaccataacagcagtcggggtagccagtccaagagcacacgggcatgcaacaacaagaacagatattccaaactgcagagcaagctcaaagctatccattgcctttggaatccattctcgagggtatatgtcgaattgcccagctacgaaccagccaagccatgtaagaaatgcagccaccacaaccttaaaatgagagggaccaatatgagatgaagaaagagacgatctcacagaaagtatgcatgagaagcatcaaaagtagttaggaaacatttgcaagtatcaatcagggtaacatttctcataagtaaccagctgtttacagaggaggtgaacttggtaaggagtagagttaaaactgctactccactaaattgaatataatttgctctacgattctacagtagaagctggggtaggttcaagaaagtttccagatgaatgctgactaagtctagggtagaaataccaagaaattattagtgcgataactagtgaccagtacaggtaaagtttccagtgcagttgactatgtgtctactgtctaggataaatacctcgattacctgcgtagccagttgttattaaccagtagctaggcaggtagaatatagcaatgttgcaattttgtaaacgctggtgggaaatagcacgaagggaatttgcaggagaaaacaagcgaacctaccgttgggacaaaaaaccgtgaaatcctatctgccaacttctgaactggagcccttgcaagttgagcagcttcaactaactgaactatctgtgacaaagctgtttctgacccaacatgagtgaccttaacaattatacaaccattgtcatttacagtaccaccaataacctgttaaaaacaagtcaattgaaccatcaggatactagttcataacaagagcaaatacaatcaggatccaaaaaataccaaccttgtctcctggtttctttgcaatgggccttgcttcaccagttatcatactttcattcacatgactttggcctttgatgacaacaccatcaacagggactttttccccagggacaatcttaatgacatcatttctctgaagtaactgagtgctgatctccgtttctgaaatggcatttccatctttgtccaaagtaagaagacaagctgtttctggtgcaagttcagtcaacttcgacaaagcatctgatgtctttcctttggccaccacctccagatatttccccag

SEQ ID NO: 27531 - DNA, 4588 bp, Oryza sativa
aaaacttcttaaaagtttgactaaggttataaaaaaatagaagcactttatagtactaaattagttttattacatctaatatagaaacaattttctttgttctgttaaaattaatattatatttttcttaaatttagttaaacctaaaaacttttgacttagaaaaaaatgaaaccctttattgtatgaaacggaggttgtactactcaattaatcattcgttaatgatttatttgtttcacgtgtagctaaaaggctacccctccgttgtagaataagtcttgggatgaaaatgttattattttttcctacaaacttagtcaaacttgaagcagagtcaaaacgttttataacccgaaacaaaggcagtagcaattgtgaaagcagggaacaaatgcacttggactctaagagtagataaagttgagaatagttgtattgggttttaataaagtagggtattatggttgttttcctttgagtaagttgggaatccttttcctcgaccttaaaatggagcggtagattagtacgtgaataattaagtattagcttaaaaacttaacaatggattaatataatttataaaattattttttcaatatttttttaagaaaacatgctatcatctagtgttttgtaaaatatgtgcatgaaaaataagagagtagaagttactaagggaaaaaagaaaacactatttcagaatggaggtgcaacaaaaacggggcacagtaagtgatggagctagaaagatttttgagtgcggacaaaactacattataactaattaaatttctataacaatatataagtaatttgttatagaaatttcatcataaatttatttataacaatatagaagtttaatgaaattttcgtcggtgagccgcccggggtagccgagcagtggctccttcctgggtgcggtgcaggaggagtaggaccgcgcgcgtgcgcgggtgtggccgtgtgggggaactgacgatgatcgtgcagttgcagtagcgcgagcgcgagcgcgacgttttcctccggtgttttggtccccgctccgctccgctcgccgcgggcgcccgcccatgccatgagtcccgcggctccagcgaaaagggggagtacccccccgctgtggtttttctgtcgctttgcatgcactgcacgggcagtcgggcacggcgatgtgcgcgccaccaaaaaccccaaaaggcggcgcgcctcccgatgcccaccgcaaagcaaagcagagcagagcatattcggacggatcgatggatccccctgctgcttgctcgctcgctcgctcaccctgctgaccatatgcgtgaatgtgatgaaaaaaagggttcatcccaggaactcgcgctgcaacatgtgaatcttgaggattagagtaataacattagtatagctaactattagccctaaataatctctagtcaacttaataatcaatttatacaatagttacatgttacactattaatacatggtcccacctgtcatacacacactgtatcttagagtccgtgctacagctgttctctctcgtctatcatcttcttaaaatatgtttatagctgatttataacctgctattgtacctgatcttactatttcatctgttctaaaatgtaaacatttttaaaatagacacgtatatgaaaaaagtagatacaaatgattagagaagggttgtgattgataaagaagagaaagtaggtgaagagaacggttgtgattggttgagagaaaatggtaggtaaaaaaatagcttcattttggaacaagtcactgtgctaaaatagctatattttaggacggaggtaatatttggttacgaagaattttagtcaacgtaaatagacaaaaaaatagaaatcagggttaaaaaaggtttgaaaagtttttttcgagaacgcgtaaaaatattgcacatcagtagaagaaatagacttctaggtgaaaaaaacggtttggaaagtctccgcctgtcagaacttttctagaaatggaaatcatcggtcggaattttcttgaaaattatgacctttacagcatttgtgtactttgttaggttatgttatcttcacatgtatggtcgtgtttaaagtatacgaacacatatttgaagtattaaatatagactaataacaaaataaattgcagattccgcctataaactacgagatgaatttattaagcctaactaatccgtcattagtaaatgtttactgtagcattacatcgtcaaatcattacgtaattaggctaaaaagattcgtctcgcaatttacatgcaaactgtacaattgtttttttttccatatttaatattttatgcatgtgtctaaatatttgatgtgacgtaacttttggaagtttaaagggaactaaacgctgtctatgttaatatgtacgtgcagaaactcgaccaaacatttgaacttgtgatcgtgaacacatgtatgtacagcaaaggccaccaaacaatctccatcaacataggcacgagggtttgatttatgtcttctcaaggaaaggccatcaagaactgtcaggctttcatgctgaagtgtcctccacagtttgcaataaacagtatcaaagggatcattttcagcaaacaacttccaagcactagggtcataattcctagtcatactccactgaactatttgctttctttttcccttcacctttatccatggctttataggataggggcaaaaccaacaaagctgaagcaaaagccccaatgtcatatccccatcatatgcaaagctgttggcttaactgatcctgaggccatccacaatgggtgccctcgactagggatagcaacggggacccataacccgcgacccgataggtttttactctattaggagtcaaatgtattccaaatattgcacccatgggtctcttatcgggctaaaacgtcacccatcgggtgggccgggtcctggaacgttctccatccacccgaacccattaacccgtgggttaaaaatacccatatgcctcagcccagaaaatacaagcagcccaaggcccaacaacaaatctaagcatctaagtctaagtgtctaaccctagatataaaaacccatttcctctccctcttactgattcacttctcctccctccccggtactgtgttgctgtaggtggccgccgccacaaaccctagggctatggcgcctctcgcccgcgccagccgcgccgtcgcacgccacgccgcccgcgccgcgctgcagcacgccaccaccgcgctcgccgccgccgcacgcccgcaccgcgccgccgcacgccaccaccgtgctcgccacacggcatcctcgcctgctcgccgccgtacgccaccaccgcacgccgcacgcagtacaggcctgcgccgtcgcgcgtactgcacgcagcatggcggcggtctccggctctggcaatgacgacggccggtgatcttcttccctctttattaactgttgcagctatatctaattgtcaggctctactgctatagcatctactgacccctcgccgtccgaagggacgccatctccattgaccagatgcggtggataaggaagacaacaccggcaaaggagtgccggctactcctttaaccatttttctaccaccttcttccactgaaacagcggaacccctatccggcgtcattgtctctgatccgaaggcaaaggcaaagccaagtgcttctccggctaacgttgttggtgcaggttcgaagcgtcgccccccccccctccaaggctaagaccactgcagctgcggctgtcaagagcagaaagcctccagtttctcctacaactactgcagctgcaggagaccgcaacattctactttcttttgggtaagcaacacaagaactcagatcttaatttaaacttcgcattggcatggttgtaatgtatttttgtgaatatgttgtgagtaaggaatagaagaacctagacatgtatttggggctgagatgctactcattgcatatttttttacatatgtttggcatattaatggatgtttgactagacgtgtaatatgtttgatgtagatttaaaaagatgtccgtagctagtgggagtggaagctatcaacgtcaatctccattatctcaagcatcacaaccaaaatcagagtctcttccactctccacatctccacaacctgaatctatcaatgactcagaacctattgaagttgatggtgacgaagatgaggccgaacaagaaagaattcaagagagtgaagtatataggcacagtcaaagcaaaatgtattcattgcatccaacaagttatcaggatgccacaaagtaatgggacttgcatgcttcatgaccattttaagataggcaaaattggttatatagcattgaaagttcatcgtttttggttttatagctccgaaagtgactggttcactttaagagcatccatagttcaccctgttcccatttttagcacttccgtcaattttttccgtccgtcttgatcgcgagtgatccagccacacacatgatatgacatctacccctcattgacatgcattatacttgtacttgtga

SEQ ID NO: 27532 - DNA, 589 bp, Oryza sativa
tagtgcttctggaggtcatgtagagggaaacttttcgcctcatgaagcatttgcaattggtgggacaaatagtgtaagaggatatgaagaaggtgctgttggttctggccgctcatatgctgttggtagtggagaagtctcttgccgcatggtaggctttgtcactttttatggaatgttctgtctttagtagaaggggcttaacctgaatcatcagtacagtaaaatatatacttacatacacaactacttgttttcccccataaatacctagttgataacatggatatgcatacataaaagaaaactaaaaatagtagtatttgagattaaaattattttgcaacttaagatgaagttatatttgttggactggatgtatttaagaatatagttaacttggtgaggacactatgtgatgcacaaaatggcaaatagttgtatctataccaaatatttcatgagttgtatcactctaataatatttttttcctttgctttagacgggtatggagaacagtatattaatttctataccaaaattgctctgtcatgatgacaagtgcatattatgacctgatgcatgatg

SEQ ID NO: 27533 - DNA, 1059 bp, Oryza sativa
tcttcatgcaccctagctactaccttagctcgcattgatccatccatccatccatccatggaggactacgcccaaaccaacctgatctcgagaggccatggccatcatcatcaacccgagctcatgaaggaattccctttcctcagcctcatttcatctacctcttcttgcatcagcagcagtggtcagcagcagcagcagcagcaagatgatgatggccatggcggccatgatcgtcatcagctgctccggtacggttgctgcagctgcaacaaacagcaggaggaagaggaggaggaggtcacggttgccttgcgcataggcctaccggccgtctcgtcggcgtcggcgtcgccgtcgccggcgatggcgaaccatggggctagtgcttctagtacaggagttgctggagatgatggcggcggcggcgccatggccggcgtgggtgtggaggtggagagcgtgcggaggagcggcggcggtggcggcggcgggcagtactggatcccgacggcggcgcagatcctcgccggcgccacccagttctcctgccccgtctgccgcaagaccttcaacagatacaacaacctccaggtatttatacgtgcaaaaaacacatatatacttaaataatggagtatatgacaagtgtgttttaaattcctactccgatccccatttgatctatatggtcataaaaagatataccaataaatttctagcaattgagcatatttatgagttatgatcagctatcttatgaaactcccaacaatcgatgaagtttatcattagtcattataatgtgtcttagtgaatgtgcatgctcttgcttacgtcgtggtgtgtttgtgtaattaatgcttgtcatagtggagagtgaattttaaactcgagagacgtcccctcgttgcacttaaatagttataaaaaaataagatgatatattaacatgtgatatatcacttcataaatatgtaacttaaaatttaacttgtacgtgtaaaaaaaaattaactgagaatatatgttaactagctataatttaatttgattttt

SEQ ID NO: 27534 - DNA, 2342 bp, Oryza sativa
gggtcgcagtaccggcgaggcgggacggcggcgctgcgcggggcgcagccgacggcgatgctccggctgccgtgctactgctgcgcggcggggtgccgcaaccacatcgaccacccgcgggcgcggccgctcaaggacttccgcaccctgcagacgcactaccgccgccgccacggcgcccgcgacttcgcctgccgccgctgcgccaagcgcttcgccgtccgcggcgactggcgcacccacgagaagaactgcggccgcctctggcgctgcgcctgcggcgcccacttccgacacaagcgctccctcaacgaccacgcacgggccttcggcgccgcccacgcccacgccggcgccggcgccggcgccgaagacgacggccgcgccgccgccgccgccgccggtgtgctgcgatgaccttaatttatatatatgtgagtgcgaaattaattagctgattattggttagtttcaggttatttttttagtagaaaattaatttgtttgtgatcgatcatatatatatgtggaggactctcttaattgtttttttgtttggtttgatttgatttgatgtgtattgcatgcaatttgcagtttgggtgtgagatcttaattatattaattaaacactatatatatacagtgtgcttatggtaaatgcatgggttttgaactgaggttagatttattaattcgaactatgtttgacattgctatgactatagtgattattgcatattgcgaaatattcaaacttagctaattaaagttgagatgctttttttgaagttttagatccacaagaaataatagcattgcgaaattttatttagcttatggtagacatcggtagctagtcgtgcaaactttggaatattggttgtaagtaaacgccggaattaatcaatgaattccattacctcgaatttgcttctctgtaacaattcgttccatttgttatggcttgtatatattcaatagtacttaataactcgcaagacacttgttaaataaaataacaacactagctggttcttggttttgcataatttctagaaaattactgaggagatgtgaaaaagggacttgtagaatgtaccgttatcacgattcatgtctaacaaaataatccactaggccataaaacattttttaatcgaacacaacaaccaagcttaccagcgagggacgtcaatggtaggaacataaaaatccaaatttttttaataagaaaatatcctaaaacccgaagaagttgctccggtcaaactgcccgttgagcgtcgttctgaccacctgatactgttggtttgaccgacggtatgccaccggtgaccagtctaaccgcctccctatcgtctgcctgatctcctattgttgtttcctcttgacttgatgccattggtccaaccaccaagatgccttcggtcacaccgtcgtggtctgactgtcgttcctctactggcctgaccatcataatagagagaacataaatcagaaaaattctttgaatgtagatcaactttattgcttctaattgtgtttataaagtgcaacaaaaacgctcctctctcaactttcgactaaactcaaatctaggttaaaccctaacttttctcatgacaattctctatttatatcctgagatgactgcacaaaagccacaaatccaacatgagtaagtagtcctaatccattcggaaactcacctgtacaagtatccaactcaatatcctttacaaatttaaacttcaaacttttcaaacttggactccattcaaaattaactatgctttccatatgcatacaacacctcttgtatgacatacaaaatcttcatcaccacatgcattgtcctctaggattagtaccccacaagatctcctgatcatctagacaaaacttctctcaagttgactccctatccatcatcggcaatactctcctgagatctcaagacacacttacatatgaataaataagaaaccatattcaagcattagttcttttccaacttgactcaatattatcacacaacagtatatataacatacgtatagaaatcatctggaagccataagcaagaagcaatcattgttaatcaaaaaatcaactccaaaccaactccaaacaggagctagtcaatcaaaccgtctggttggccggtttgaccgccaccatgcctacagtttgaccggtgcctactgtctggtcccatacagagacaaaatcacttcgccaataaatcaccatatatcaaaaccaatacaaataaaatctcatgtcaattgttcatcacaataacaatcaaaacattgattttaccgttttggatgtgt

SEQ ID NO: 27535 - DNA, 687 bp, Oryza sativa
ctcaaacttcacatctttcaagcccacaactagatcacgttttgaaagtttgctcaattgattcatgccaacatgggctagccttctatgccaaaggcaacccaaagaagtttttgcaactaaacaagttttcaaatttgcttcactagaattgaaatcaaccaaataaagatttccatatctaaaacctttgaacacacaagacttgtcaagaaggctagaaacaataacttcttgcgggaagaaagcacatgacaagccaagatcacaaatttgagcaaccgaaagcaaattaaaatttagagatttacaaagagagacattgtcaattgacaaatcattggagatagcaattttacctaacctaattacctttcctttgctattgtctccaaatgtcactttctcttgttcattccctcctacttcaaatgtggtgaacatagccctatcaccagtcatgtgttgagtgcatccactatcaagcacccaatggctcccaccggtgtggtagttcacctacaaaagaagatcaagctcttttaggtacccaaacttgtttgggtccttgaaggttagagaccaaagctttgggcacccaaatggcattctttttaccaccgagtataggggaacccacatatctagcaacaatgctaccatcatgagccttcctaatcatataat

SEQ ID NO: 27536 - DNA, 706 bp, Oryza sativa
ggcaatatcatgacgaaacactgatgtgtcttgtactaggacaatgcatactgtctgcatagttattgcagaaattctgtgtctcaaatacaaatttcaacttactttagctatattctaatacagccgattttgttcatacatgatttcagatctcattcttgaagcagttttatgattctgttggtaaacctgattatcaagtacttagatcagcttttgttcaggtcagatgcatctctgagtaacttcagctcaatcataagtgtcattgtactatttttgaagctaataggacataattttttccccagaggcactacccaaaccgtcctgattttgatttccacaagtacatggttcgtgctcttgagcatgattttaaagaagtagttggaatcaggttagtatcttggttaaaatactaactttacttgattaaaaactacatcatctttactgtatctaatgctatgcaattacatgcagctggtacctatggcttttcgttattgtcttcctgctactgaatataaatggtaactcccataaacctaaaaacaagtgccctcatgtaattgtttggataactgaattccatcacactgatatctacttaaattttcttttctttcttttttttcttttttttttgctgggagatatccacttaagttaccatacgacttattctatttctagtacc

SEQ ID NO: 27537 - DNA, 1595 bp, Oryza sativa
gccgctgccgccgacgattgatcgcgcgagctgcgccgccgctccgttcgccgtgcgggccgcagcctccgagtccagtgaccgacaagtgggacccacctcccggaaacctatttgggattgacggtttgttgggctgggcccaagagctgacgacaaatggcccaattatagcccaaagcataataagcccattttcgatgcgatcgagcctaaatgagcctagattaggccattagggagcagcacggcttcattagcaatgttgaattaggtcctctttggcatagcccggatccaagatttcttaaagctaaatatttgtaacttcacatgtccatggatttaaatctataattatgttgataacatttgaacaaatcattttgtttccattttttgtgaaatttaatattttaaaccacggtacaaaattcaaatcttttgagctatgccaaacaggaccttacactcagcttcaaccctccgcagcaaaatgaaataattattagtgtatggttaattaagcattagataaaataaacttttaaaaatagattaatatgttttttaaaaaaaaaagttgttttctatatatattttttttaaaaaaaacgtaccgtttagccgcatgaaacgagcgagtagaagttgaaaagatgtggtaaagaacacatccttacgctctttgttcacttcaaactctgtgcacttccacatggaattcaataattcaaacagaatgaaaatttcaccaagattttgccggaggatattgttcaccacacaaaacttattacaaggagttttgagttttcaaagacctcaaatcccagggaatagggtaagctttggcatagaacataagtaccgagtctacaactacagatggaagaaaatgaacttttcacacacaaagatgctctataagaggaggtttgagaatgcacactggcactggcgtctgactagcttttgctatcttcattctgttaactctttcaaggggaatgtgatgtcaaactagctggaagaaacacatctgaatttcatggttccaagcatatcgagtaacatcgcctgtttgttttaaagatcgtatccagtagatggacaatgacaacctctccactgacaacggcaagaatcaaaggactttcggtggtgaagaaaaccccagcctactcagcaaccaatagaagagtatggtccatcccagcagcaacctgtgaaacctctgctccttccagggtatcgatgaggaaaggctcaggctcatccatcgagcttcccaaacctagcctgccgtttcggccagatccccatgcccaaacctctccctttgatgtgagagcaaccgaatgaactcgaccagccgaggccgacactggcctctctccattcagaccgtcgactagtgcaggcacgtcttctttgccaggtcgtccaagctgggagctgcagttccatccccatgagaggacgccggtctcggcatggtcatcgccttcagttgatatgatgcatgttgcaagagagtggccaacacttgctgacacagagaatggactgtggctaatgtcgacaggaagaaa

SEQ ID NO: 27538 - DNA, 4581 bp, Oryza sativa
aaatgccatatatacaagtatgcaacaatgaaccatggcttactaacagtactactgcaagatgtatgagacagaaaattgtccataggaagtgcacacaaaaaagaggttcagtttgtagttaaaagaagtaaagaagactcacagcagagaaccagagaatgatcgagcccacatgacacatcagacacctcaacatgacacacttcatgaacaagcgaaggttcccagatgatgggcatattgtcttcactccttattttttcctcaaccatcttttcaacggcctctagcattgagctagagtacttgtcaactgtttttccaagtaattctttggcagaagaagcctgagtaatatggccaatttctcctaaccttccgttttctgaatatccccagccaagtaaccctccatcctttgtcaatgccatagcatgtccccaaccaaatgatacctagcatcattccttcaattaacaacttttttctcacaagggagcaaacatccgactacttaatttcagggagaaagttagaaccttgacaatatcataattagcaagtgcttccactctagaaggtactgcagcctctacaatgtcctttccaagcccaagttggccacgctttgatctcccccaaacccataaagagccatcacacccaattgctgctgaaacaaccccacaagcagatacagctcggacttgaacattttccaatcctctcactttttcaggcttgctccaagtattcctgtcagtcagcaaaatggtgcatcagcctcccaaaagaagtttattttctcagaattaaaacatttgcaaatatttgttaagtaaccatgtgcaagaaaaaaaaactaattgtttcgagctataggttaactcatgccatcattggcttattgttcattcaaatctagcatggaaaacgaaaacacgattgtttcatacatatattatcagtattggaggtttgaattccaaccaataagaatcagatatacgatataccatgtcctgatttcaatctactcacatatcaaactgaaaccagcaaaggacgcttgtacatctactcacatatcaaactgaaaccagcaaaggacgcatgtgcaaacgccaggtagtgggcaggtaattacacccatcttataccacttcttcatttactccattgttactaaataagcacatatcatggtttctgatttgtttggtccattgttactaaataagcacagatcatggtttctgatttgtttggtctaggaaagccactttgctgctgatctgaggctaaacaatccaccgccgtgccttataatgtctccactccactatagaatacgagaattttcctaccccaaagaggatcaaactgttcgaacgctgggaatacttgtgcgtggatgagaaatcgagaatcgaggatatgagctagatcgatcatcacctcggggcgtggtgcccgcggccgagctgaccttcatcgttgcggccccacgcccagacctccccttcggcggaaaccgcgagggagtggtagtgcccggcggcgacggcggcgacggacgtcgggagggagggcacgggcgtggggacgtagacgtcggcggccggcgccggctgccccgccgcgccgtggctgttgtccccgaaggcgtacacggccccgacgcgcgggagtggcgcgccgttcccggcgagctcggagaggaggcggcggcggaggaagccggaggcggaggcggccgtgcggcggagaggacgcatttggaactcgagagaggaggaggggaatgggtgggtttgtttcatgtggacctcaaaaatgggccttgtgggttgtggcccatgtccaaatcatgtaattttgggccagcctagtaaagcatctctcaggccttcatcactattccaatccaaacggtccacaagattttatatttctatttcttttggaataccagatttttttttctagacaagattattttatgtggtgcaattaaatctcctctagttttcttccggaaaaatttttttcctctttactgtcagggataaacatacttctaagaaacatcttacatagcgtagcatgtggatgacaataatttaaaaacggagaaaataaaatacacgggacactcctagttctaccgcctaataaaagggagatatttaactatttaccacgtttataagtgttaattaaaaatttatcactggaactttgagtgacaaacttttaatcaacaaaagtagtaaatagttatatgcccaacaaaagagagacaagctagcaaatcgatccatgcgaccatgcgtgcaaatcagttggagcacaaatttacatgttacacccacaccctacacccatgcataataatacatcgtatatacgtacgtacatacatacccctctcgatcacacgcaccatcgatcgtacaaagttgcgtacatacatacgtacacacatatacgcatacgcacgtacatacatacataattaaaaactcgtaattaattaaatacgtagttgatggcatctctaatggaacttgaggctggtgaggatgttgttgtggacgggatcagcgaggtgatcaagcaggttctgcacggggccaaccccggtgaagagcgcctggacggagaagccgaggaaggcgagcatggcgagcctgccattcttgatctccttgagcttgagctccttcatctccgcctcgctcttggtcccgaagccgagcgggttgaagagcgggccgccggggtaggccggctcgccggagccggcgaggtacttctcgaggccgaggaagtactgcttccccatggagcccggcgtgtaccagtcctggaagcggcggtgctcggcgaagccgacgagggcgagctcgaagacgaagagagtgtaagggtcggcccagtaggtgtaggtgcccgcgggggggatcacgccggtctggaaccacgggatcgccgtctcggcggggacgaggcccagcttgccgaggagctccggggcgaccatgccgacgacgcccatcatcgccgtccggccgttgaacacctcgccgtaggccagccaccgtggctcgatgaacccaccggtcccctccgggtccgatagccccagcgggtcgaacccgaagtctcccggaagcctgcatccatccatgattccatgcacgcacgatcaatattatggaagccatggcatatttacaaacgagatataatttgtgaataaaaactttagaagcaaaggctgaaaaataaacttcgataaaaaaaacatgaaaattagctctaaatttaagattaaaaatttaaagtttcgctgataaggataagcataaacgaaaagatgaggtccgtagacgataaatcatgcggttatgtgccacaggtcatctttgaccataaaagtaaaggttctctgaaatttactctttatttatttatttatttggaaggtctattgattattgtttcctatgaaaagtttgatcattttgattgtactactgtactatgaaattcagttggatacggctagttcctaccatcttaattaagctcctttttttttttttgaaacgcatgaattttacggttgattcctataaaaattcttcgaaaatcgtttcaaatgaggccttaacgcctcttttattgcaacatgaataaattttaccacatgaaaacttacgtgccatccaggtagctcagggactgcttggatgcgaaccacagctgcctgtcagcaccttgctgaaaccaaaccaaaccaaacataaatttaaccagatcagcataatatctttcaattttgaattgaggaagagtagaaatcaatcagcatatataccttggcagggggagtggcctctgccctgaccatgaagggtgccttcctggaggaagaagacctggagactgaagattgcaatggcctccccagcagctgcctcccagagagaagagcctgagccgccattgttgtctctctccaagctcaagctcctcctcctcttcccaagctagcagtggtgagctgaaatgtgtgctccaaattaaacttggtgagtgctagaaaagggggatgaggggaacacaaggttgcaggggtgctgtgcttgtggccatggaaaaggggtgggcccggggaaatctaattctggtgtgaggtggcatcttagcagatgagggcatcagtggacccagtaggagtgtgccacgtggcaggggggcaggtgagataagggagctgcctctcagtggcttaccagctgccagcacagcatgcagctgaggtttgcatttcctgcatctgtgcatggtgtgttcttggattgttggcatttgctgagatttttttgtttaggctttgtggatagcacagattggtgttgtttctatcctgcatttgtgatggaactagtgccagttattcagccaaaaaaattgacaaaatgatatgacatgagatattaatcaatcttaaaaccaaaaaaagaaaagaaaaaaggaaacaatatatcatggaggggctgcaggaat

SEQ ID NO: 27539 - DNA, 860 bp, Oryza sativa
acaggaagctgaactcagcaacttactaaagaatttattgggttcccatctgctgaggtttctataccaggttgaatcaactcctttagtactcctgtagagaattgtgaaaatggttatatagatctttgggcagtgcacattgtacattcattaatgcagtgctaaaacgagctgagaagtataatgggaaacgcaatggtcatcatttaaagccatgccattttcctgtttagctagatgtaatggttccgtcctgattttcctttcattttttttggggcatgtaacagataatttaaattattagaagtattcttatgcaaaaaaatgtaatttgaaagctattgttcctacagtacagatttacaatctacattacggaaaaagtagtacaagtgaaaacttgaaggggcaaatatttaactaaagcaatcaaactcattatacctctacattgctgctaaagtgatttcatttcacatcaccagatttaggaaagaaaatcgttattggtcaaggataggtaaaacaagatgatactagatactcatgaagaagcatgtatgggatatgtttgtgatcacaccttcaatgtcatagagaattagataattaatcccaatagttgagaaccagcgtaaaagttgcttgaccttcaaagcattctttgcctctctgctatctactacaacacccaagtatgcaagtctctcaagatgtagatttcggtacttgggcaacaacttgaatgaaatgagatagcattctagatcattcttcagatgtgacaatgaaccaaagaagctgatcaccaagtggacaaggcaccacagcaaccctaagatgagctttaaaat

SEQ ID NO: 27540 - DNA, 1028 bp, Oryza sativa
gtaagatctggtcatgtaagtgttctctccctcgggtattaaccaacgcgtaaaatcggaaatcaactttccaacttcacggttgggggctaggatcagagcttatttaaccaaggcgggtcaaaggtccaagagccttatcctccgagaaaatttctccgacaacaaggctgggggctagggagagtgtacgactcaaacggctgactaaagtcgttaactgagaacgcactcttacacacgacattcagagtaagagacatttgttaaagatagatttctttactatttcacacaatacttgttacagtttttacacaaatctttcgctacattacatctttttcctaagatatttgtcacagggtacgaaaactaccaagaaggccaacgctagtccatagactggaagatcttctcggccaatggcgacatcgacctcgctagatggtctatctccgccggagtcctccgagaacaagcaaaaccctcacggagaaattcgaggtccaagctcgggcgatgacctcgtaggcaagccaacacgtgccctccggcgtatcggctcgatcgacgacactcctgcttcaaggcctcgtcgatacgcttgccgatgccatcgagttgggcacaggccccgttcagccacgagatgtacccggccgccgactcctcaggatctccgcggaccactcgaagttctttacagactctggctatggatgtgcagcaactctttaagtacgagttaaaccacacctcacgacctcggagcgtttccacagcctgctctttcttcacggccagcatggttctctcgagttccgccacttcaaacttcatcttccagtattggatatgacgatcttggctagcaagggcaccctcgagatctgcataatgtgataaccactaagtcaagctgtacgcctctttcgagaacatggctgatctagtcgggatggcatcaaggggtgaagggactactaacctgaggaagtcgtcgttatccctgtctccgtatcaag

SEQ ID NO: 27541 - DNA, 770 bp, Oryza sativa
acccctatacgattaggcttatccagatttgtagtactaggtggtgcctaatcatgtactagtatttggggatggagggagtaattagttttctgcagagcctggctgattatgctgggtgttatatgtaattgcctccatcccaaaaagaccttattgtgcatagcaagaaatgaagtctttctgggaaggaggtagtaatacttagaaatcctctattagtgaactgttgattattgaactttgcgatctgaagtgctcttagttgcagtaattttaaatgcttgctcgctcctacaattgtggctgactttgtgttctcttgttcttaaacagttcgctcccaagacgtttattcctgcattgtttggtcatgcttcaaatgacatgttcattcagcctcaccactgtgatcgtattcaccaggcgtatggggtaatgcataatgtagtttgttttattaatgccactcaaaatcaaataaataatacataaatcgctaattgactgttcctggcttcctgctgaagaatacattattatttgtttaaaattaaatcatgtttattgtacagggggataaaagtataataaaatttgagggtgatcacaactccccaagacctcaatcatattatgattcagtttcaatgtgcttctataatactttgcatcctcctcaattgcctgtgaaatgctccaataatctaggtgctttcaaagttggcacggtgaccaatgaggtaaagcttcttaaaatacgttacaaa

SEQ ID NO: 27542 - DNA, 1258 bp, Oryza sativa
tgtgctctattgtaagcctattttcatcatcacaagtttagacagataatacagtatcactcttatcagagaattagtctgtattttcattagcaaaatacttctgcttcagattgcatgactacccctttctttctttctttccttttttttgcagaatacagaatttgtgcaaaattatatgtataggcaaatattatacataaatgttcaaagaatttaatgagtacactctaacatcggtataaaaattaagttttgtaattatggcatttgcattgcaatttcagaagcacaccaaagcaatgcttcaatgcctagtgcacagttcagtatgaaatggaaatggttcttgaagtcatatctcatgaaaactcgtatgttctagatataactgatatgaatatttgtgaatatcatcaacagtgacatagtgcttttaaagtaggtatgaaatggaactagttcttaaaatcatatcacaagaaaacttctacattgagaacacaactgatgtgaaatttgtaaatatcattgtagtggaatagtgttcctaaagtaggtaaacacaaatggagaaaagtgatttcaatgatctgacctgacccttcttggtggtaaggtgacggagtattgtctctggttgcgtcttcccaacagttggttcaccactggtgatggagagaaatagaaagaggtggaagataagaaagatcagaatatcgcatagaaataaaacagtaacaagtgaagcgaatctcaataaatcaggctatggttctcacgttcttctatccagaaagcgaatattgatattattaacctcagcttcagaaacttgtagcctcagaattcctccagaaagaatctcagcatatgaaacctgataccaaatcaaggggctttattgatttatcagtagtaaacaaaataccttgtttttcttgttaaaactgtaaaagtctgatgtgttttgccctacaataatgaatgccagagctcaacttatcgataggttgctaacttcagcattaaccacacatcatatttctaatcctgttaggactaagaatttaacaaataacagaggattaccatggtgtatgcccacctatttgacatcagcaatatatatgcaaatagtgcaggttagacaatctggatagcaacaaatcgactgctgttgttgtatgcatctaaaagtttgtagttacaaagaatgtactgtaaatcaaatgggcaccagaagcctgattac

SEQ ID NO: 27543 - DNA, 6633 bp, Oryza sativa
ccacctaaaccaagcccaaaatgtgcaataatcagttccaaggttagctgacgaagagaaaatggggaacgagcaaataataataataataataataataatcctgacctcaaagacgagacgaatgccgtcacgggtgtcgacggcgacgggcatgcaggagcggaagaggccgctctcgacgacgcggtgcacgtcctcctgcacctcccgcaccgtgagcgccgcgttggggcggcacgcccggagcgccgccgccgcggccgcctccagctcgggccgctccaggggctccccgtccttccccctcaccgccacctcgctgatcagcacccgctcctctccccctccaccccctccgccgtccttctgcctccgcggcagcgcgatgggcgccgccgccgcccccgcccccgtctcggccctcgccacgggtagcctgggcagcgacctggccacgtggcgcaccacgccatcgatggcgcggccgatgcgcgcgaacgggagcgccgcggagagcagcgtcggcgctggcgctggcgccggagccgcgtcggcgcaggggagcttcacaccggaggagacgaagcgcacgtctcggcgcgtccccatggcggcggcggcggcgctggaatcgagctagggtttagggtttccgcggcgacgaggagagggtttcccccgccatgggcgatgcggaggaggaggaggcggcggcggaagagggagaagggaatggtggtgacgtcatccgcgttggcctctcgtcctcctctcggatgatgagggccgccggatcgtctcgaatttcgttctgatggcggatacgtggatctgatccgttggatggtttcggggattacatccaacggcgagtattagaggtagagatgagaagtaccctctcacgctgtcacgccatgatccacgtggggaataaggtcattgtttagttcgtgaaaagaaaatttctgcgtgtcacatcagatgtttgagaagatatcgaaaagggtttttagacacgaatgaaaattttaattttataactcgcctggaaaccgcgagacgaatcttttgtgcctaattaatccgtcattagcagagtgggttactgtagcacttatgactaattaggtacaaaagactcgtctcgtgattttctccccaactgtgcaactagtttttttaatctatatttaatgctccatacatgtgtttaaagattcgatgtgatgtctttagaaaaaaaatttggggaaactaaaccaggcgttaatttgacactaaatcttattttcgtccttaaaccgaaaaaccaaatacaataggttcccaacttacaaaagcagtacaaacaaggtccctcggtagtattgtccccggtttttggctaacgtagcacatacgtggctaatttgactagtcttcgtcccacgtgggattgacgtggcgcttatgtggcaatttgatttggaaaataataaaattcgtgagcccacatatcagctacacaaaaaaaataaataaataatggtgagacctaggtgaatctcacatgtcattctcactcccctcctcttctctctcatctgtccccatcttctcttcatctctcttgaagacctaggtgtcgcacgactggaggacaagcgcggcggcggcaacggtggtcgtggaatcatcgggcagggacacagacgagggcctggcgatgtccgcgtcgaagagcgccagggtccaacgtgggtcacactctgcgcggaccaggcggtggaggtggtcggtggtgagggtcttgggccatcttgtcgacgagaggatggtcgatgacattgggtggcggcggcagaatgggcaagcctgcgagtacaagacatagtctgaactctgaagaccgagtctatgccacgtcatgtgcatgtaccgagtcaaattagtcacgtagacaccacgtaagctaaaaccaccatccaaaccatcgtgggatctatattgcaccggttttaacagttgagggatttgttgtatctggtattgcggttaaagggtgacaatcgaattcgctgtcaagttaagggatctaaagtgaacttattcctccacatcgccgtacgcttccgaaattgcaattttgcaaggtttcggcccaaaaaggaatgaaattctcaaatctcaactgaagcccaatacagatagaagttacggagaattttaggcccaaataatgggatgaagcccatattgtactatcgggattccttcagaatttgggtaccgctctaacttttttggttttgtttttcaggacatggaaaaaaaatcaactgcatttgatttttttaaaaaaattactgcgtttgaattttgaacccatagtggccagcatgatattagaacttgcacggtaccgtttttctttttcttcataaattaaccctttgtccatatcattccattgtccctttctgtctttcatgatgcatgctagcttttggggaaaaatattgaccgtcatagagtactgttttctttttcttcacaaattgcaaagattatacttttctgaaaggaatgcaaagattatacttgctctcaatcttcggtattggtatatagtattttcccaatgtagacattcgcacaaattacaagttaaaacatgtcaaattcaccgtggttgttacggcacgaacgacaaagagccacggcgaattcaaagcttgtgtttggactggtatgtgttgatttgacaaaaagtttttgaacgaatcgtgttggtttgacaataggaaaaatgactgcatgacatatcgacaacgatttgaagcatatttgcgtcaaaagctaggaaaaagtaggaaattcgtttgtgcaaccacagtatcatattctcatgtgaatggttttcctagaacccttcatttttgacacaaatcctcgtaaaattacacggtttgaaatgcctcgaacatggtacatgggaattggttttcctttcacaaaataagagaactttcagatgggatcagtcagggcatccacaatgtgagacactcctagagtgtcctcactaactgaggacactcgtagagaaacttggttcgcaatggagggtgcccctggatgaactccttaaaatctgaagcaacccggtgagggtactacatcccacagtgggtgtcctggcccaaggtagcccagtacaaaaatttcacccatacccctcatcagcccactagcccagcaacctcttcctctcctctttctagcattttctcgtctcctccgcccaccgtctcctcctcttccgatctctccctctctctctcttggtcgaacgaggcgcgaacggcggtggcgaacggcgagcgccgcgcgaggtggaagacggcgacgggcgtgtgcggtggccgacggcgatgggcgtgcggggtgtgaagcatctagacccccggtgttaattttggtaattaatgacaagcgctaattgtggactaaccgttgtctttgagctatacattttaagttaggtccacgtcatatgtgcgcatggatgattatcaatggattaacattgacggcgcaaagcaaagagaaagaagacggtaaaactagtgctttaatttagaattgatcgaggtgtagggcgatcaaaattgctagtttattttctagtttcgccgtactattaagaggggtaatgacctagcaaagagatgattgaattaccacattaggtcattgcattttcatttgtgctctatttttcatcacacgcacattcacttgcaaattcactgggttcggcctgaccagggggcggcaagaccggccacatagtggcggcctgaccggcgtgcccctggccggctgactggccccaagcaggcggtctgaccggcggcacttgtccgatcagaccggccctctggatgccgagatgatgctgctcgggatggccgaaacagagccgacggagccgtagtcggtctgaccgagccgaggccggtctgaccgcccactcaactctggtctgaccggccaggccgatggggccctctgacagcacttcaacggctagttttctagccgttgcagagtagcacggtctgaccggccacatacctccggtcagaccagcaaagcacaaagttgggagatttcgcccccaacagctagttttggcgggtgggagtataaatactcccccaccagcagcaaggggactctcttggcacccaattcaattgcatacatcccttgcacctctctcacacccacttgagctttgtgttcatccatctagtgtgttaaagggttgattagccaagagtcaagtgcattgcttccatttgtagagctagtgtggcacttgattgatcatctccacgccgggtcattgcttgttactcttggaggttgccgcctcctatacggcttgtggaggagttgccctgtgacctttccgagaagattgtagaggaagcccggcgccggtttgtgagtggtttggaattcaccaccttcggagtgaagaaagaactaccctagtgatcgaggcttgggtagtcctctccgtgggccagctcccgccttgcccaccccttgatgaagggggtgtgcggtggcttcgtggttgagcggtggagttgagctcgcctcaacggggagtaggaaaccggcgagtttccgaacctcggtgaaaaatctcgtctccttgtctcatttgatcgtcgcatttacatttgtgcaaatttacttttctagaaacaaactagatatcatatcaccctaggattgctaaacattgacataggagtgtgatttactttcttagagatatagttgagccacaatcaccctaggtttgcaaaacataacttagttgcttagttagagttgaccctcaccaagcctagcgacttaggttagttttgattaggtgtcatttagttttaaatcgcctattcaccacactctagtcgacatctcgatcctacaagttgtatcagagcttggtctctcttgattgggcttcaccgcctagagagaagatgtcgaacgaggtgaaccatgtagggaaggctcccatgtttaatggcacaaactattccacttggaaaattaaaatgtctactcacctcaaagctatgagcttccatatttggagtattgttgatgtaggttttgctatcaccggcaagcccttgacggagattgatcaccgcaacctccaactcaatgcccaagccatgaatgctttgttcaactctttgagccaagaggagtttgatagagtgagcaaccttgagaccgcatatgagatttggaacaagttggcggagatccatgagggcacgagtgagtataaggatgccaagcttcatttcctcaagatccaatatgagacattctccatgttgcctcatgagagtgtgaatgacatgtatggaaggctcaatgtcattgtgaatgatctcaaggggcttgggacaaactacacgatcttgaggttgcccaaaagatgcttagggctctaccggagaagtatgagacccttgtcaccatgctcatcaactccgacatgtcaatgatgacacccgcaagcctcttggggaagatcaacaccaatgacatgtacaagttgaagaagaaggagatggaggaagcctcaccttccaagaagtgcattgctctccaagccgaagttgaagataagggcaagggcaaggtgaatgaagccaatgaggacttggaggaagagattgcccttcttgctagaaggttcaatgatctcttgggaaggagaaaggagagaggaaggggctccaactccaataggagaagaaatagaagacccaacaagactctctccaacttgaggtgctttgagtgtggtgagaagggacactttgcttccaagtgcccttccaaggatgatgatggagacaagtcatgcaagaagaagagtggaggctacaagctcatgaagaagctcaagaaggaaggcaagaagattgaggccttcatcggggaatgggactcaaatgaggagagctccgcctcatccgggtccgaggaagaaggtggtgatgatgcaagctccaaaaagaagaagatggccgttgttgccatcaaggaggctctatcactcttcgctccactttgtctcatggcaaagggctcctctaaggtaacatctcttagtgataatgagagtgatgatgattgtgatgatgtttcctatgatgagcttgtgagtatgtttgaggagctccatgcttatagtgagaaggagattgtcaagttcaaggccctaaagaaggatcatgcttctttggaggtcttgtatgaggagctaaagacttctcatgagagactcaccatttctcatgagaagcttaaggaagctcatgacaacctcctttccactactcaacatggagctctcattgatgttggcatatcttgtgatttgcttgatgatagtgctacttgccatattgctcatgttgcatcatctagcatttctatctcttgtgatgatcttgtggatatgtctagctctagctcttgtatttctatctgtgatgcctcacttgttgttgagaacaatgagcttaaggagcaagt

SEQ ID NO: 27544 - DNA, 1893 bp, Oryza sativa
cctgcagcccctataatgataaaaggtgatggtttgatttgaaccacaattaggtgatgctgtagaggctaatgcagtcaaatctgtctttggtgaccatgcaacatcaggtggtcttgcattgtcctcaacaaaggtatagcccccacactcatgtgcaactaattcatcacaattccttcgtctcccattcacgacaaatggcacaacattcttcagggagcaattggtcatctgcttggggcagctgggtcagtggaagcaatcttcaccgtattagccatccaccatgtatgttgtctacagttactgaccaccaacagtttgagttcaggagttctctgcataacattttatcttcgattttcagggcatcgctccaccgacacttaatctagaaaaaccagacacgctgtttgaaggcgcgttcatgcctctatcttccccaaagaagatgcctatccgagctgccatctcgaattcctttgggtttggtggaaccaacacgtcgctgctgttctcgtgccctccttagttgtttctaacagcaccctgtctgttttgcctgaagagctgtagctgaacatccacagagattttttttttccctgcacaaacaccgggaggcaccatccgcgtgcactgagcagaagctgagatttcagtcattttttcaccctgtgtgcggcatgccccattgttcttgtgtttgctaattttgtgactcggaggagtatctttttttttttgttttcaattttatcttaagttaaatcataaattcatatattgtctcgctggattgtgaattacctcgtacatagagatgatgtatttgtaattttgttttacatgtgaggctgaaaatgcctgagactgattttgcaacaggcagactggatgacagaagtgtttaagggctagattgatgcaaaataaactttttcaaaatttggcaatgacaaaatttttgtaagttaacattatcaaatttcagtagaatagattaaatgtgttattgtcaaaattctgtaggcattaccaacgtttggtaacaaactaaatacatccatatatttgtcattttttttgaaaaaatgatatggttcaaaacgacgtccatcttacttcctccgtttcacaatgtaagtcattctagcatttcccacattatgacttatgttgtgcaacggaggaagtaacaggctataagttgaagttggctatagagcgtgccttgccaaccatacaagactagatcagagtttgttgctggggctcgtttggttaagggcccttttgaaacgcaggataggaaaaacacagaaataggaaaaacgtaggaattgaagtggcgtgttttcctaatcctacaggaatggaaaacacaggaaatatgaagagggtccctttgatagcaccataggaaacaaacaaagcaaaggatagttttcaagaggttgaacctcttgcttattttcctatgaaattgagctatatgaatacaatcctaaggaaaatttcctatactttcctatgaatcaaagggtttcataggaaaaaattcttagaaaattaaatcctccaaaatttctatgcaaatcctccaattgaagggagccctaaaaggaaattttggtttggtttgttgtgtggatgatgatatcttctagaagaatctggacacgtaggctggctggctggatggatggatggatcggatcgccggtgcgtgtggtgccgggcggttggcaacctggcacgtcactcattcgtgctgagccctcacatgtagccgcgatttctctctccaagcatgggagaagaaattgtttttcttttccttctaaaacagttcatgatgacccctttttaaacgaaaaggttttacaa

SEQ ID NO: 27545 - DNA, 2268 bp, Oryza sativa
gcccataggaaaatcctttgtttacaacggctctacatgacactgtgtaaatttatcgaagttaaattaaaattcaaaagtttagagacggttaaattaagcttcataatccttggatagttttgagttttgacaccacaaaaatccacacaaacgttttagataaaccagaaaaaaaaatcctacaagaccatgtctctatttagaccctcgtcatgccttcatcgaaacataaccatgtaggctaactctatttgtggcaccaaatataattaattcttttacggtacaaattatatgtatttacactatagttacatgtaaattttaatacttatattatacttatattatagttagtcttgtaaaaaccaatcaattatgtgctcgaaagagaagataggagagtttcaaaacatacataaaagtgatcacacgggggaaaccaagctgaaatcaaattaaagaatatggtgctatatttttaccgtgactatatccaaaagcatttaaatctattactactccctccatccaaaagttttatacatattctatttgtttagtttttctaaataaaatagacatatttatagactttaagtacataagactgaaatgaagagattgtcttttctttttacaatactagattaaattgttgatcggaacccaagcaacatttttaatgcccattggttacatacatagtatagctcttgatctttgttagagcaaggataatagtgggctatataaaccaactataagctaatgtgaaagaggtaaagaaaaatgatgggtgttggctctaatgcaaaagctagttctacacatgctccaaaatatcacattaaaattatagcgagagaaaaaaataaagtgaaacttatagttaatctattatgcatgatagctctaatatgaactaataaccaatagttagctttacttacaatcccattgtttcgcttattcatatgcttattcgaatcacttatttgcaaatataaatcatttatgagtaaaagttttatttgtgtgttcttaacaattcaaaaccaaatgttgtaaaataaactacgatgagaaaacaaaaagatcaaattcaaaatcaagttctaaaattaaaattttggcttataaccataagtataagcataacctaaacaataagtcccttattaaacttgctcttatatgcatgataactttttttcttagtcttaatgaatggcaatagaaatacttaagttctaaacttttggatggagagagtaagagcttcatcggttgatctaataagctaaagaaaaaaaccaaagtttgaattttcgaacttaattttaaagttgatcttaaaatattttcaacgtaattcctttttagctacaaacaaatatatcaaagtttcacctatgaattaatttgtatttctcaataaaccgtttaaaattattagagaaaatgtggataatcgatgaggctttaggctgcgttcggaacggagcagcgattagcacgtgattaattaagtatttgctaatttttttcaaaaatagattaatatgattttttaagcaactttcgtatagaaattttttgtaaaaaaatataccgtttagtagtttaaaaagggtgcgagtgtgggggcgcagccttaatactttatagagtccatagaaagagacctgatcgtacatggctccttttttttttttggataaatcacgcagctaatttttctttttcttttttaccagtagtaggagtgtaggacacttcatatcgttgtgctagtatccggcgccgcttccgttcatctgcgcctatttattgcggcctcttcttcctcctctcctcgcctcgcctcgctcttccactgttcatctgcgccacgacacgacacgacacgacacgagacgagagaggagtcggcaatggcggaggggtcgcggtcgccgctgaggtcgttcgtggaggtggcgccggggtcgcacttccccatccagaacctccccttcggggtcttccgccgcaggggctcgccggagccggagccgccgcgcccggccgtcgccatcggggacttcgcgctcgacctcgccgccgtctccgacgcgggcctcttccacgggcccctcctctccgcctccccctgcttccgccaggtccgcaccctgcctaccttacctaccttaccttacctactcgtcttgtgttgcggttgatctgctggtggtgagctaagcttagcagcaatttgcg

SEQ ID NO: 27546 - DNA, 1196 bp, Oryza sativa
ttagtaatgcacgatgagtagcgcggcttctgccccccaaattctgatgctgatgagtaattctacctgtagttgtgttgttagtactatgttgtgccaatgtatcatgatgcaagaaagtatcgattaaccgcctatgttcaaaactgaaagtatcgattaaccgcctatgttcaaaactatccaagaattatgagatcctgaggtagacttacacttttttttaatgggttctctaatctttgcagctgatgagccggttttgcgtgacaacgaggccttgaagaagaagtgccttgttcccatggtgagcttgatcaactactcttttctttgttacgagaaacaggatgaccatttatgaaatcactaacttctctgtttttatcatttagagcgacacagagatgcttctgccaatcacggtaggagactacaccgacttcttttgttctgtgcaccatgcaaggaattgtgggttcatcttccgtgggccacagaccccagtcaacccaaattggtaatgtattttcttgaccatgccttgtgctgagacttgagacttgggttttgacataaacactaatctgcaatgtatgtttgcttcatcaggtttcagcttccagtaggttatcatggtcgtgcatcctctgtgattgtatctggaacagacatcattcgacccaagtacgcatcccatagattcggatagttatcaaattcctgtcagattacgagatagttttattactattgtttgaatgattgaatatattagtgttattggatagcgggtagctgtttctagttttacataacctctgaagtctgaagtgtctattttgcttaattattgctctcaatgccctctttcaaataattcactatattcgatgatgtttgctgcattcaactttttgttgcatgcagtgatgtattgtagatggatacatatgtgtagtatattacattttatttttgtcataatatccaattgatatgtcaataatgtcctctttctctgccttttagagggcaaggccatccaacaggagattctcgaccttattttggtccttctaagaagcttgattttgaacttgagatggttagtttcttacaaacctcttgactcacagtatttggtattcttgaactgttattgacatacctgttgcatgtttgttaaatttgag

SEQ ID NO: 27547 - DNA, 6895 bp, Oryza sativa
gcacgttctttgagattgatcgagaggtttagcaacaacaataagacagtggaaggcaactcgatcaaaatggtggcatagggtgggtgtgctgaacaaagcgcctgatcatctcatgcctcctacgaagttcacttcgtgaaatgaagtgaagaagaagaagaagaagaagaagaagaagaagaagaagaagaagaagaagaagaaaggcttcaagctagctggagacctgcagttttgtgcacaacggttggtcatattgggagatggacttttgaaacagatactgctcattccgttttatattataaagcgttttgattttttttaaaatttaaacttttttaagtttgattaaattcgtaaaaaaaatatagtaacaaacctaaagaattttgatttaaaaaatcaaaacaaattgtaatatgagatggatggagagcatatgacatttcttcgccgatctagaaaagaaacaatgccccatctcatcatagggccccgttctcaagaagcactcgcattggcctggccagaattagcatgacatcactattatgtttttgcattgcaccaccattgctgtgtaaagttcactcaactttttgttgttttgacggaggaaaaaaaaaggatattgcaggctgtatgatattctgaaaagcaggtgttatttctgaatttacagtctaacgagttactgttaaattcatatgtttatatatggttacctcatttagcatagccgacatggggtacccacgctagcgttaaggatcatactattgctctattcgcacttcttaaagatatcaaagtctagtcttcatcataatttttctcttgcaccattggagttgaactcctactgatggatagtagttcattcattaatgtgtgttacacattaattgatttccttgcccagaaaaaaactaatatatacactagattttcagttggttttagactgatggggtaaaaagaaattcctagagctgccaggttatattcataagcgcgtatctgaccaatttttattcccgttcaatgatggggatttgaggtaaacaaggttacaaattgacacatgcacatcttcaattgaatttcctgaaaatgttttcgtaaaggttaagatgatgcattgaaaatgagaactgtcatgtgctttgcatgtgtttttaaactatatatgaatgaatgtaccatatctgaatatttgatttagatgacgaaaggtatcgcaaaatcaatatccaggacaccacattagtgccgcttcgtaagggccatcactgtcagttttggaacagtgctaccaataatgttgagaaatctagtaacaccaacaagatttggctattacataaccaaatatcggtagaaaagttcatcgtcaaaacacacacataaactatttttggtcttgctcaggttagcattacacaaatttgtttagttttgttacggaacaaaacaaacacacccttaagcctcaaaccaacaaatgtcattctttccatctaatataactgaagatatgccaaaatttcgacaaaggccatcatttcaaggtgaaagaacaggcttccaagattgttatctggtgccaatcttcatagagtgactgtatttagtactttacttgtcaagcttcatgcattatgcgtttggtatctggaagctcaatcccagggctccaagcagcatttcttctatgaggtttcatggtacgtcaaaatgaactcacataaagactgactgccagcgtcatttccttctctgaggatcccgagtaaggccgtgctttttcaaagttgtgatatagcttcgcatcagaccaaacttgttagaacctaggtggtgcaagtaatcccatgtaaagatccctgtcttgtgcagatcatcaaacaatatcctgcaatacaaatactaggtcatattatagacatactgtattcttgcggaaaatcaaacaagaagtgcatataaaaagccacaaagaattgcttactatttttttttacgaaacaggatcaattgacattatgtgggggaaaacctccacgaatttgataatgcaagaaacatgaccctcaccgtactccgtaatttcctactgattcagctgacattattccaacatgtcgccgcccaaatataacctgatcaaagaaatgcagattggcataatttccaccgtaaaaacttagtagaccgaaattttctagggcaccgaagcgatgccaatattaaagatacagagttaaggtctctgtccggctgctcagctttccaaggctaataatctacaaacgttcaaatttattcataatagaaagtgtagccctttagaaactataaaatgcacgacagctccactgtgaatggatataacgagtgaatgggctgatctgatacaacaagtgaatgagtaaaaatgcaccacattggccatccaacaagctcagaagaccatgtgtgccactgagtacagaaagtgcatggtgcattaccttctcaccagctactgatctgattttgctatcagctgctgggctgtacactctaagaaactcagcaggcagatggaatgagctgccatcctcaaattcaacttctacctgacaaaaaccagtagcacatagctcatgtcaaaagacacacaaacccataccctaatcaacactcatatgaacaattcgagaagaataatggtttaatgataagttgagaaatgagagttgaacattttttctacaaccaattgtctgtttaattgttcctaaaaaaaactaatcatgggatcactacccataacatttcaaaatttaggcatgtaacattagaacacattagaattacatggtacatacgaacaagaggagtacacatattgcacttgaacacaatattacaacctatgctgctcagctaataaaattggttttctcatgagaaattttttacttgcttcaatcatgcctgatggcaacaaagttcttatgcatccttaagcaatcaagtacaaagattgtcatataccctcgtaatctcgttcaccagcaagtcgccgcgacgttgaacaagggattggaacagtgcaactgcttttgggaggggaaggaactcacgaatttgggcgcgcgaagcgcgagcttcgtcagccgcgggggctgcgcctgcgcttgcgccgcgtggagccgccggaccaccgccgcgcccatcgctgcagccatggacggccagccggtgaagcggccggacctagcgggaggaggggcgatgtcgcgaggggcggaggaaggtagggagaggggcggcgacgcggccgcggcgtcgatgcggctacggtggccggcgggcagcggatgcggcggcgaggcgaggcgaggcgaggcgaggggcgcccggagattcgggagggagaggggtagcgatggtgacgtggcgagagaataattggagtattgatttggaattttggattaaaatcataacgggaaacgctacacgagaacttttatttttcttacaaactcttactccctcctttttgttttatatattatattatttgttttgattttttttcatagttaaacatatttagctttgatcaaacttttagaaaaaaaaataacatcatttacaacatagtttcattaaatgtaacatcggatatattttgatactatgtttgtgtgatgaaaatgcagctatgtttttctataaacttagttaaaattttaaaaaattaactagagaaaatttagagcgacttttaatatgaaacggaggggtatcaatgttgatgtgttttcttgggagcaaatctattcgtctagctaaattaaatgattatttaaaaatttgtttcttaaaagttttataaaattttagtagtaataaatcataatcgtgtttattttccttttaaaaaatacactttgatttaacatgtctcgatttaataaataaattgaattttaacatgcttcatgtaaaattttgtttaaattctataggaagtggggacatatttacgcatttcaaaaaaaacattctcaactttagtggtgtaaatcatctctcctctaccaaaattatacatgtgtcatttgtcttttaccatcttttaccttgataaccattgtattatcttgtttttaacatttcatatattttatgtagcattttagatctctatggatttcttttatccttttctcgaatgttgtttttgatgtttgttatagtgttgttttttaaagtgctatcacactaaaatgcgttgttttagcgtcacaactattgtgacactaaaatagaagccattcaaatttcctattatagatatctaagaataataggttatctagtgctagtcatgcatggttacaatggtttacatatattatgttcttacattcatcaattcacaggcacattttaagtgaacttttttttctaccatgttatcatcatcacacggttcttaataaaaaggcaacgataaggcataatgcatagtgaattccaaattgagcgaaggcggtcactttgcgatattgtgccaattccagttttgaacgaccgcatacttgtttcatagctttcaactgagcggtagacccgacacaactgacggataagcggattgagcgcaaaagcgcatccgttttcttgctccttggcttcaagcaatcgattgaatctggattcctttgcttatcctttctggctataatctctcttgttccgttttcgcaatgtgttcgctataaatatcatataactattacgaataaacaacatcaattggtttgccaaaatttaaaagcctccatcaacaaataagcgtagtaatgcataatgtttatatcgtctcaactgactagggaatttggagatgcattgagacgtctatttttcattaatttttagtgaattttgacaaatttcaaataaaaccgttagagatgcacattttaaaatttgaacgtgaaactcgtacgcaattcgtttaggctgtgagaatcgtacctatgcgtaatacttctacaacttgtgtcaacacggttaaacatgcttcaaattaaattatactcaatacacaagtttgaatctgattcgaatataaattaaaaaatatcccacgtgtaaagcacgacaaaacgttttaaacttgccccgacaaattttgttttgttcaagagacaaaaaaaaaaaagaaaaagaaaaagaaaagagaaagctattcccagtttcccaccgattacctcggcttcgttaacgttctcgtttcccacggctattgcctcctccttccctctcctctcctcctctcgtctcgccctcctcctccccacctccacaacccaaccccacccccacccccacctcctcgcggagatccccctcctcgccgcgctccccgccggaatccgcggcgagcggcgagcgtcccgagccccggatcgccgggaaccgcgccggatcccgcgggggctcggccgccgcgagcgagctctccccggcggcgtttccccggcagatccgatccgaggaatcctatcgcgagggcgttggcgctgttgggcggggtggggggaaaaacttctgcagaggaggaggaggaggaattggggggaggccgtggcgacgcctaggtcccttgcgccgtggacgccatgattgagcagttcgtcaatttcgtcatccggccgccccggtacccacattccgtcgcccttgtttgcttgtggtgtgaatttggcatggttggtacattggcatgtggccgtacgtactgttgtgaattgggagatttgcatgattaatgcgagcctcacgtacatgcagcttgggttcctcgattgctagtagattaggtagaatctaggttgttttgagtttatgttttattcgagcaaaggggaaccacgggcattatttattgaaaccagtcattagttcgtacagaaccatggaagcaagatgagcattcaagctactaggatatgctggaagcgccaagttctagctcgaaattcgatacattatgcctccgtaatccatgctagagaaaagaagcaaagaaaccaataatgtgcttgaaagtagcccaaagttactttgacatgtttcagtaaaatttctgtagaaaagatacaaaggaaacaaaaaggtgcttgaaactagcccaaagttacattgtctggtttcagtacaacttttgtcaatgcaatatgctggctctgaagcctccaccctgagcagtttgtgagggaggctgaaccggtcatgctaatcttaccaatgattcatttcaaaagtttgcatgtcaagtgtgagaacgaggatttgtacctaaggatagtcatcttggatatgatggtacattggcccttgattttctttagagcacagtaacctgcttactgttaacagaaacctgataggagtacatgggctcttgatgttgtagatcggtaccatgtgccataaaagctagagttaggtacaatggaatggtcattgcagttggcattgtgtgggtagttgtgcatgtatgggcatgctctataatgcctataacatataccattaagaagtagctttagtgtggcacgataatctagcccatgctcacatgacaaatgtgggcaacctgctgagtggagggataacgagaaaactgttagcagttgaccttcttaggtgtcggattttttcattctggttgcgaatattatggatatgtctttttcaaacttatctttgtttaaggggaggtgttttttgcattgagttttgaattggaacatctgcacatggaaatgttttctcttcactgcatttcaaagctgaaaaatctcataataggtgt

SEQ ID NO: 27548 - DNA, 1365 bp, Oryza sativa
aagtttgactgcaattatggacatctttgttgatagccttattctgcctttaccagcttacgaatgcaagaggccttacaataaaatgcagccactatgttcctgctttcattccagagaatacttctcttccatgtgtgatttactgccatggaaataggtatttaccttgtgtgctcagtgctagcatattagtctgagtcgtgttttctttaacattcagattagtgtattttgatatattaatatgtgctcctaagcctttggaaaccaaattaatattaagttagtagcacacgttatgagctagcatttcctcttaactgatgagattcatctcaagcaatcaccgatatcttttggaatctttaacaggcttttgctttgactcaatgcagtggatgccgggcagatgcaaatgaagctgctgttatactgcttcctgcaaatatcactgtttttacacttgatttttccgggtcaggtctatcaggtggagattatgtaagccttggttggcatgaggtatataatcagtatcacttttgttcttctacatttatatcatggataattacattattctgaaattttctagaaagaggacctaaaatgtgtggtgtcatacctacggaccactaagcaagtttcctgtataggcctttgggggcgatcgatgggtgctgttacaaggtaccttttagtttggatatactgcatgctccttttacttggtggtggagatttatttatttcacttcacgtgacttgattgatatgttacaccaaacagagatcaacattgaacaaaattatctgtacttaagtggcctctgattctcccgttttgctctttgataatgtgctttagaaggtttttaggctttgagttcatgtcatgtataagatgtcttaaatatgtgatctttgcgtaacggatccatcccaattcattcgttgttttgtgaactaatgtaatacagcctactctatggagcagaagattcctcgattgctggaatggtattggatagtgctttcactaacttatatggcttgatgatggagcttgtggatgtctacaaaatccgggttcctaaattcacggtatgcacatattctgtataaagttgcttttgttccataacaaaatgacatggaatgctgcaatattgcattggcataatttgtagggtatcatggcttataatagctatgattctttcttgtttctttttgggaaatcagattgttctattgtggcttaatagctcaatatttgcccatcgaaaccatggttttactattcagcactcagtcacttagctcttagttgcaattgttattttttgagcaattattcaa

SEQ ID NO: 27549 - DNA, 7981 bp, Oryza sativa
ctaactagtaatcctcagggaaaactgagcatttgaccacaacttcaaagtggggatacggtatgaatgaacaccaaggataaaaactgtgatgtacccttttactctcatccatatcagccttgttgccaaccaaaattttgttgacattatcagaggcatgttgctcaatattccgaatccagttccgaatgtctgtattgtcaaataaaacagcagtgacaaaatagttcaaaatggaataattaaggaaggtatatatgtaaggagacagtactgttgaaagatgactcgtcggtgacatcataaacaagcaggatacccatggctccacggtagtacgctgaggtaaaatgagatttacttgatcaaaaggttctcatttaacttcacagggttagtatgctgaatggaacaataattataccagtggtaattgtccggaaacgttcttggccagctgtgtcccaaatttgtagcttaatacgcttcccgtccagctctattgttctaattttgaagtcaatactgcacaaacacaaatactgcaatcagcgtggagaagataataaattgaaaagcttgcgggcaggagccatagagcggtcttcccaacatcagagaacatacccaattgtggtaataaagcttgtagtgaaggaaccatcagaaaaccgcaggagaaggcaactcttgccaacacctagaaatggaaaaatgagaaaaaagaattcttataagaaaattggccagcacaaaacttgcctgaggaactgccattagctactaaataattagttcaacagaatacactaacaaaagtgaatttgtaaatattatggactttaaaacagtacaactgctagagaaatagcatgctaccaaaggttatgcctagaaaatttgaactaatagacttacattggatactagaaagaaccaaaaacaatttgtaaaagactaaatcatagatagtcataattaaaaacaagtagtcatcactgagcaaaagaatccaagatcaagacctattagagcacgagctttatgttacagacaatcatgaataatctggcaattgtcatgaaaacaatcacttatttgatcctatcaatgaataagtctcgacaaggaatatagtggaagctctacgggtagtggctcaaagcgagagcacaaaatgcccctggttgatttgagctattggtataaaaatataaatttctgctatgaacttttaaacaattacgctatttcatatagctgtaatgtttgacccattagtttcacccctcactccaactttcttccaacagctacacatttggagcatacaccctcacgagcaaggaactatctagttccactctcaacaacatgtagcacaaattccatggcatgcactaacgaatgaaaattatagaggaaagaatagcacataacatactctctttaactctatctcctattgcatgattgagtgccaaaaaagaaagcattgcttcatgcttatgtgcaacgtttctcagatggccttgcacactgtcgaaataaccttagtatcagcttaatcagaaaagcctgcaattccagttgaccatttccaaggttcttccatccaaggaaaaacttactgaaccacgaaattcatttttttttctcctcgccattttcataactcctaactttgcttcttcttcttctttttcttttttttttacataaagcacagtagtggtagttcctgcctgtatgtactaggcaagtaggcattatgtatattgtaggttgaacagaaaccaaattcacatgaaagacagatcatgcacacaagcgcacaccaaaggcaaatcctttgcaggatcctagttgctcgcgtggcccaatccacctgcgatccaaccaacaccgaggcgcgggaaaacccacacgacatcactcgccgtggaatggaaatgggaaggcaagatctaagctcgaggtggtgtcaccaaccgctgtccccgatgaggaggagcttgatgaggtagtcgtagtccgcccgagccctcgccggcggcgcagccatctcgtcgctccgcttcacaccctcctcctcctcctccccctactccacagcccacccggcgcgcctcctccaccaatccccgacctgcagcgaacggaaaaaaaaaaaaacagacaccgtgagaatggcagcacgacggcggcggcggatcccgcgcgggtggcggccggatcggagaccgcaccggtaggcgcggcggaggatcgcgcggcggcggcggtggcggtgcggatctggagaacggggaggagggagttggttttttttttctctccttttttcccttcgcttttttagtttgctggttgattcgtcgccggccgcatgagcgagcgagcgactgatcagcgcgtgcaagatcagagctgggttttgtaatttgttcggtttttttatggggtccggttcggtcggtcagggtcaggtcactcgcttgcgctgatcgctttcttttttcggtttttcccgacgcgcgcggccaccgaccggtgaggcttttgcgggcactggttggtgggccagctgcggagtggggcccaattgtctgtcaatggaagatgggtacgcgcgtgggggttccattccaagttgcaaaatgcgtggtttccgtcagattgattgattgggtcgagggggagacaacagaagaggtcacacagctcaaacacaagttcagtgggagataattaactattttgccatctatgcgtatggtgtttaataatttatcactggatacacgtattatagacatgtaataaatatatgagaatccacgtatcattgatatatgagtggtaaacggctaaacgtcaaatctaaaaatgacaaatagttaaatgcttcattcattaggttattaagaaagtatgtagaattaaataagaagaggcttgattggttgaaaagttgagatactctctctataaaaaaaagaatctaaaactgaatgtgatacattctaatacaatgtgtccagattcatggtacgaatgtgttacatccaattcttagttgatttttatgagacgaaggaagtaggttggaaaaataaatggttgagtgttgtgattggttgataagggaatatcggtggtggagttgttatattatgggatggagggggtatcatttaaagtagtatagatgtactccctccgttcaaaaaaaatgcattcctattataccaaggtggaattaatggagatggagaataactaaaatatccttaatcattgaaaaaagtagtaagagtgataggtaggtaaagagtatcgaagggataaaactttcgttttacatgctgagggtaggtaggatggtagacgttagttcttagtgtgacacaatttaaactctagaagataagttttttttggcaggagggagtactccctctgtccaaaaaaaaaagacaaaccctggttgccgtgtccaacatttgaccatccgtcttatttaaaaaaattatgaaaaaaattaaaagataagtcacgcataaaatattaatcatgtcttatcatatcacaacaacgaaaatacgaattataaaaaaaattcatataaaacggcacttgcacggcacatttgacgtgtaacgataccgatttgtactgcttggacagttggaacaatcacccaaccattcgttcatgtgcgaaccaaccgtttgcttgcttccaactccacaatgccctttgtgtgcctacacggcttccgtgctacaaaactctccactcggcagctgctttttttcatgcagttacagcacgcaaagagttgctttcagtccaggggattggcaacaaggaacaccaattgcatgtggtgcttgctgctgccacaggcatgctttgccttagagcaagtttaatagtataggccattactagctccaaataatctatagccgatgtaatagccaattcatacaatagttgcttactatactattaatatctgatcccacctgtcatacacacattacgtcttggagtccgtgctgcagctggctatagatctgtagcccgctgctcttctctctcttcctttatttctttaaaatatgtttatagctggtttatagcctgctattgtacctgctcttaaggcaatgttcagaaatcgatattagtgtatgatcgccgttaacttgatcattatgtggtgaggtgatcaattgggttccagtttagttgatgttgagaagtggcaattcggatttcaatggaaaatcaagaagagcagatctatcgtcggtgcccagaaatggacaaattgaggccacgttcatcctccctagtgcatagtaggacacaagatccaaaatattttctccaaagcatgttcttcattaatccgtataactagaatattaagtgtgtactaatatatatgtataagatacagggtaattttcattctaatttcaccttagtgatagaagtgcatcctaaaataatcacaccaaccgtgctggtcaaactacacttaaatcaaacaaaattatactagcagccaagactaggggattacctatacatttgtcaacaaattctttttaaagaaaggaacatttgcaaatttgccactgttttttttcaattttgcaaagataccactcgaataacagtttcagtggcatttttgcaattttctagtgacagttttgcaataacgattcaaaacagtagtaaatttgcaattgcccctttaaagaaagtttaacagatataattacagtgcaatcgtaattacatgcaagtttttaagagagaatttatcgaaaatatatagcaaaattgatccaaacatgtatccgaaacgcttcgactggtatcgatcctgttggacccatcatttgcagcccacttatactctacgactaataaagatggcccatgtggaagcgtggagccatcgataatttggagtgaaaattcagcctgaaggcaagcacaacaggaaaaaaaaaaacccagcgcagcgccgtgcgttgtgcgaggcgtggccatagcagctggagagcagatcgaccgaggcgccggtgaacgtgttcgatagagtcgccgacaacaggtcaccgctgaagcccagcatccagccgccggcgaggccgtgccaaggaggaaaaggactcggcgcctggagctggaccctcgtgagtaaagtagcagcagtggaacagactcgtcaccgggcggagggcgatccccacgacgggcaggtcggcgtgctcggcgatcgtggtcatgctcaggcggcaggtcggacacaacattacgagctcagcccccatgaacattacgagctcaacacaagaaacattccaggatcacaattgagccaatttctcagtgacagaagtaaaaattgtacaaaaacacgcacatactccatcaattaagagggattgctagaagcattgaaataccactcatgaacttccgaatcaaaaaaaaagagaggataaataataacatgggattataccccttgtaaacaaatgatcaggtgcaaattacaaattatcacgagtaatatcaaaatcagagatgtattattatgagaacactaaatacagtgccctcgtttaataactacacgagcattcatataaacaaggtcaagcaaatcagctcgttatcttactcttttttttcctaccaaatgtatttgaaaattaaaaacggatttccaagtgactgttccagaattccaaacaactccaaggttccaaccccatcgaacaaatcgaatgcaaaagtacaacataagtgcataactgtcaagcaacaaattggagcatacgaacatttttttctcgaatgcgcaaaagaattgaacgtcaatatatacaaacatgcctctgtttttaccaaactactttagaaaaatcaaatacaaatatcatcagaagttatacctactgacttttcatctttaaagcacaacaattcacataccatgtgaccaaattcaggtaaatttagaatttcatatcctacctacttaacaagtagctactagcactaacattcacatttcggacacaacagataatagcgcatattagctaggtgcaagttggccaatcacaaacattacaatgatcaatcaacaaacagaacaagatgcaaccgaatcaacaatcaccagacttaacgtcaccacatttaagctcctgtccattttaaactacaataaatcataagacagtaaaatggcattatcgcaacttgacacttatgcaagtatcagcaaataagtaatagtattatcacaactaactaaacacttatgcaagtagacaacaaataggtgataaatttatgataactaactaaatacttatgcaagtaaacaaaaatgtgttataacattatcataactaaactcatttgcaagaacacaaattaggaagacattaacaaaaagcaccaactgtaaacattaactactagtgaacatcgcactaccacagcatataaatcagtcctattgcaagcaaggaggcatggcattgcatatgttcctataaccacaattccctctgttgcacctgctgcaagctgcttatctaattacattcttacgttgatgtcacaatttccgcttacgacatacatacctttccatattccagcaaactccacaatgttgggatgcaattcatgaatacaatctcataatgtatgtaaagcaatcacattacatgatatcaagctaaaaagtgccactacataacatgagaaacagcatttccccaaccacccaagcaccccaaatggcaatgctattttcaataattacccaaacacaaacgaagaaccaaataacccaccaggaggcatatatgtgcatccactaccaaacacagatcaattgttcgaaattatccaaatcttaacaatattattacaggcagcatctaacaattcacagttcccccatccctctgcccagaccacactcctcgaccctacaccggtgttaacctacacgggtacaaactgattggcttgactgtccatctattcagaaaacaccacaaattacgtacaaacaaccgaaccgattcacgacaaatgatatagcatgcaacgaagacgatgatgatgacgattgacaacagataggagcgtttcagttcagacaagagggagagggaagcgggggacaccaccaccaagccggcattgcgtgtgccctaagcggccgccgccttctttggcgacttggtggtggccttcttgggcgacttgggggtcttaccctccttggcctccttggccgcggcggagccggtcttcttggggagcagcaccgggttgatgttgggcagcaccccgccgtgcgcgatggtgacgccggccagcagcttcccgagctcctcgtcgttgcggatcgccagcagcacgtgccgcgggatgatccggttcttcttgttgtcccgcgccgcgttccccgcaagctcgagcacctaaaaaaaaatccaattcaggccggctaccgcgtcgagggtacggggctgtgcgcatgcgcgggcgcggccaaacctcggcggcgaggtactcgaggacggcggcgaggtagacgggggcgccggtgccgatgcgctgggagtagcggccttgcttgaggtagcggccgatacggccgacggggaactggagcccggccttgacggagcgggacaccggcttcttcttcggcccgccgccgccgcggcggccgccggcgccggccttcttgggcaccttcgctcccacctccatcgatcgcgacgagctcctcctccccaagctttctccctcttctgttttgttcgatttttttttcttcctattttttttccttttgggggaggagtgcgtgtgcgtttgtgttttcgttgtgtgtggtcacgggggg

SEQ ID NO: 27550 - DNA, 20499 bp, Oryza sativa
tatttagacggagccttagtcacttaatggcaataccgcaatagcgtacagaatctcatactctgcgcgtatgcgtagctggttgtcactattcgcaggcagcaaaacgcatctcaacttatcgctccagcgtgcgatgcgacgtgtcgacacggtgggcatcttctgggacgctgtaaaaaccaatagcaaaagcacacctagctttcgttttattcgacagaggcctcgtttagttcccaaaataaaaaattatcatatatcatattaaatgttcggacacatgtatgatatattaaatgtgaaaaaaactaattacataatttacgtttaaatatgcgagacgaatcttttaagtctaattgaaccatgatttgataatgtggtgctacagtaaatatttgctaataacgaattaattaggcttaataaattcgtctcgcagtttcctagcggaatctgtaatttgttttgttattagactacgtttaatactttaaatatgtgtccgaatattcgatgtgacaaccaaatctaaaagttttccctaactaagcaaggccagaatactcaagataaactcaggttacgatttttttcctaggaagtaattcaggattgtaaaaaatcaatcctaagaacatgttcatatgtgtacaggtttaagatttgatgttctatgacactccataaccagacagttatgcatgcatgtggccatgtcccagacgacaccgagctgagaaagcctgaaaccgaaatgacaaagatgccggttgctctgagattcgctcgcggaacacgagcatatgcatgccgatcatcttcgcgtcttcacccccgttttgtttctttccccgggccggaatattggccccgcccgcctgccaaccaatccaaccgagccacatgcgcaatcacgcaacacatgttctcaaattactacttcctctttttaagttgaacacggttattaaaaaatacgtagaattaaataggaatagattgtaattggttggaaaggaaaggtaagtcgaaaaaataaatggtgaatggttgtgattggttgaaaaatgaatgtttgtgaagaaattattatattttagaacaaatgttaagtggtaaaattattatattttggaacagagcgtaccagatttacaatcatcaacgcgagagatccgattgtacgtacacaagcacgtacgtacaaccggtacttgcatcattgcatgataccacctgtgttattgcgtttatttttccatgtcgttttcagggttttgattagcaatctgttgtacacttgtgtactgtatttgtaatgcgggtgtgtgtatgattggtgtttgctactagtgtgcgcccccagatctcgatctggaacatgcacacatgatggatcatggatggatggatggaccagggcaccaaaggctcaatcatcttgatttgataggccgttttttgggtcgatgtacgtgtcgatggacatctgtacacttgcaaatccgtagcgaatcgattgatggatctgttatggattgatgatatattacaccgacatgacttgtgtgtagttttctctttttttctaaaaaaaaatcatcggtgtgttaatgtgtttcgtggtggattatttgattcgccagatttgacgaaagttaaatttggactcttcgtggactcgagttgggtctacatttgtctgggcttgatttgttcaagagccccatggcccattcaccaaagcagtttgtttgtggaataagtccagtttgactcccttagttagtggctgattcgtaccccagaaccacgatacggatatctcgatcccccattcccccaactattcaaactggtacaatttgacttcctcgacggttttggaggacggtttcgctaatgtgacccctttgtagcagtgttgacttggtcttcgtccaacgtggcgttgacatagcgcttacgtgacattagatttttttaaaaaaaatatgtggggtcccattttgtctcacaaaaaattacgggacccactaacacgtggggcttaaatgtcatcctcttaccggtgcacgcacgagctcggcggcaccgcctctcccctttcccttctcaaccccctccccccgctctatagcatcggatggcgagattcgaggtggtgctagcgcaggtagagacggaggagtcggcggcggcagaggagaaggccgcgtgccccgaacatgattccggcgctgcggcggaagagggagatgatggcacacctcgtcccctccctgaccacatcttgtggcatgcagggaggctgatgcaaacgacccctccccgaccacttccgcagcgagatcctggagacacaataggcgagatgcagtcgctctctctcgtcctccactcttgctctcaacgacgtaacaaaagaagtagacatgggcattgtggtcagaacacatgccaaacaatagtttggcatcggttgggagtgactttaacaatccgcggagtggcatttgagtaaaactctcttttagcagtgggagaatgtcctatttccttgttattttctcatgcggattaagattttatctcggtttccgttagcacgcttttcaagctattaaacgacatgtttcgtgaaaaaaaaattcttgatgaaagttgctttaaaatatcaaatatatcatctttcatgtttgtagtaattaaaactcaatttatcacacgttaatagctttctcgttttacatgcccgctttaaatcttaatttaaagtagaaacgaacggaccgacgtctaggactacatctgggttttctcggttattttcgttaaacggcacacactccctctataaaaaaacaaacttcgaagtctttgatctttggacatacagattcatttccagaagttttttttattgagaccaagagtgtatggttgaatttactgtaataaatttggtcaattccttaatacgtaacgtaacatgaccaataaactattttagtagctgtagcactggttaattttttctccatccaacatgtgacatttcgatggcttcgccagccatgcatatttcgaataccctcaatttatcataatcgcctatccacaacataaatagtaatcatgcttcaattatatcttcgttataaaatacagctctctgtcttatctcataaaaatacttcaaacgtgctgatattttatagtgacggagagagtaccaatttgtcaatgacagatatagtacgatgaaagctatcggatcggtgataattgtgcaaacatctcgcgagagctatcagctactacgtactatgcattatttcagttgatgtgcactttttctgaccaaaatgcatatacactgaaagaatttctctctcgtcctaccgaaaatagagtactactgcactacattcagattcgcaaaatcgcaactcgaccgttcaaatcaaaatcctaaaaatttctacgggacggaacacgccaacctgagcttttgttcgtgtttgggggcgcttttccacagtataaaatcacagatacccttttgattttgataaaatcccctatgtacctatgaacagagttcacccttccccgcaaaaaaaaaaaaacataattcacctaatcctttctatactcttgaattttgctcaatcccttacatacccctgaattttagtttggatcccttccatgcccttttcgctagttgaccgttaaatttttttaaaaaagtccattttaccctttgctatgaagaaacataataaattaatgaagtatattgttggaatgtaaaaatttattggatgagactattatatttatgagtatgtaatgcaccatattatttgtgacaaatttacttttacatatgatataaaaagttaatacttatttattagttattaaaagttcttttgtgtagcatatgtgtttttatagtaatacaacatatttgtttattactatcagaacacatatactaaaaaaaatcttttaataactaataaataagtaataatttttttatgtcatatctaaaagtatatttatcgcaaataatatggtgtataactgtctcataaataaaatagtctcatataacaaatttctatgcttaaacaatatactctattaatttatatgcttctttataccaagggcaaaattgactttttcataaggatttaacggtcaactagtggaaagggtatggaagggatccaaactaaaattcaggggtatgtaagagattgagcaaaattcagagatacagaagacattagataaactttcagggtacacagattttctctttgattttcgtgtgcctccatgccgcgcgtttccccttggccgcaggaactaaaacccgccttgaatctcagccctccacgtgtctgcctaagagcaccccacgtcaccaccgctataccaacaataccgcgcctttttctccctccctcctcgcggcggcggcggcgacggccgacggcggaggcggaggcggaggaggaggaagacgagaggagccgagacgggaggcgtgtccgtttcttcgtcccgccctagggtttctacgagggggaggcaatggctgccgcggcgggggtggctgctggaacgggaagaggtagcggggagggagaggagctgctccccaacgccgtggagggagacggcggctgcggcgggggcggcacgtgcgcgggggaccgcccgtggcggctcaacttcgacggcctccgccgcccggaggcgcaccaggagaagccgccgcgccgcttccatgaccgcctcggagggctaggtactacctctctaactgtctctcgtgattggtggttctctggaactttcgtatcgtttgtgtttgggtgctattcgttttagttgtaggattgtttttgatctggacttgtgttttagctgttttagttagagaattcagatgtcagcgtcttatcctcttcagtgacggcgattgggtcaggtgatgtatagtgaacgtgtactggagaatggggagtggagaacttgcagcagcgatagttggtattactgatcagtgtgtttcatccactgatgtcccttttgtttagtagtagttgattggataccgtaatttgctgttactcaacagttttgtgccatgtctgttctgtaacgatggtgatcgatttataggtttcgttgtacgttcacattatatgataatttgtatttatgattgtattgtgttaataatatttgaaaccaatattatgtttgatagtggtgatagattttattactctgccatgagttactaattgaattatgatattaattattaagctgaagatattatattgaaaggcggaaagcgtacacatcctgagacctgttttcttaagaaattgttgtacccttttgatgctggtaaaatttactgaagggttgtttatggactgttgagttgactattttttacttcctgctttgatattttgtctttaagctgcatgtgtcaagcctttggtttctgttgtttgcaatttctaccttacagctatgtaacatggtaatttctagcaccaatttactgattctttcctctatatttcagtgctcaggaatctggatatttcaggtctgtatgttttatggaagaaaacactggttttcaaacagagatataagttttagctctaagtccaaagttctcattctgcagatgtagacaagaatgtttaatacagatggtggaagtcatttctttggtgtttgaaaattattatcaggataaaaaggtcatgtacaaaacaagtttaactaagttgactgttgagtctatttccaacttcgcactggtctcattgtgtggcattgcactcatcataatcagataacttagtattcttcttttgttatatacttctatttacagttcaaagccctggagatgatgttgcagaatattaccagcaacagtcggaattgttggaaggttttaatgaaatggatacactcacagatcgtggttttcttcctggaatgtccaaggtctacattcttgctctagtaaggccttgtttagttcgggaaaatttttgtgttgggttgtcacatcgaatatacggacatacatttgaagtattaaacatagtctaataacaaaacaaattacagattccgctaggaaactgcgagacgaatttattaagactaattaatccgtcattagcaaatgtttactgtagcaccatattgtcaaatcatggcacaattaggcttaaaagattcgtctctcaatttacacgccatctgtgtaattgtttttttttcctacatttaatactccatgcatgtgtccaaacattcgatgtgacagcgtgaacatttttgttttgggaactaaacagggcctaacattaaaagaaaaaaaacttcattttgcagataaaatgttgaaagatgcatctatactgttttctaccttaatttgatcctatctgtgcaggaagaatgtgaaaaagttgccagaagtgaggcattagccatccggttatctaatatagcaaacatggttctttttgctgcaaaagtttatgcctcaataaggagtggttctctagctataattgcctccactttggattctctacttgacttgttatcaggttttatcttgtggtttactgccttttcaaagaaaacatcaaatccatacaggtacccaattggtaaaagacgcatgcaacctttggtgagtttccacaccaataactgccaattaggcataatttgccctgcatgttctatgcttttatttcttgaatttttctattactagaataagtcaatcatttttgttgaactctgatttgctgtagtatccatttatacgttgtttaagagataagagagacataaactgtataaatcgttatgtttcttgatcagtattcctcttattaacgaactctgacacaatccgtttgccagggaatacttgtttttgcttctgttatggcaacgcttggccttcaaattatcctagaatctacacgctcattgttttatgatgtaagtcttttcttttctcttcttaccattctttgactgcttttttcaatacaattatttgattcatattgattagcgtagttggtttttcacttctctattcaatctaaaccttctagcagatattatcagaatgcctcatgttccatgtgcttttgaaaaaaagtcattttcacgtccctttaatgggggaagattttctaaaaaaaaggccaacttgtccgttttcaattttgtacatgcctgtttggtacacttatgatagttaatatgtgtgagtactccatttcgtatcgttgacaatcttgcacttaaacttaactaactgttaagcacaccgtaataaaaattaggacagtaacataatgatcagattaatcaggtagctattgattatcttgtgctccagggggatactttccgcttgacaaaagagcaggagaagtgggttgtggatatcatgctttctgttacatcggtgaagctcctactggttgtatattgccgttcattcaccaatgaaattgtaaaggcttatgcacatgatcactttttcgatgtcatcacctatgtcattgggcttgtggcagcacttctagctaattatgtttaaggctgtattgacccagttggggctattatagtaagtatactaaagtagtacttgctctgtataattccttgtttattagaatttcactgaaagaactatcatttcctagaattgtgagatacactatagaatttgagtatgtcacgaatttaatcgggtaagacaactattttggctatggaactgaatgatgcactagtgataaatcttctcacattcgacaataacttgaacttgaataggtttttattatctttccttctttgcagctggcgatctacacaatcagaacatggtcaatgacggtgctagaaaacgtccactccttggttggccaatcggcttcaccagagtaccttcagaagcttacctacctgtgctggaaccatcacaaggctgtcaggcacatcgacacagtgcgagcatatacattcggctcccactactttgttgaggtggatattgttctgccatgtgacatgcccttgcaggaagcgcatgatatcggcgaggctccgcaagagaagctggagagcttgcccgagattgagcgggcttttgtccatctcgactacgagttcacccaccagcctgagcatgctcgatcccatgatacattatagcagtccgaacttcagagaacccaagttgaaattattgaagccatctcagtttcacaaatctgggagtagccaacatgcttcgacacattgcttatttcagatgcgttgttttttttttttttgggtgtggctaggaatcatatctgtgcctgtgggcgtgtaggggatgactggatgggtggcattggcaatgtttgaatcaaatgattgatgcgatgaggtgagatgagccaaaatgcttcgacacattgttttttttttttttttttttttttttttttttgttttgtggctgggaatcatatctgtgcctgtgggcgtgtaggggatgactggatgggtggcattggcaatgtttgaatcaaatgattgatgagatgagatcttcagtgtatgtgcggtgattgatggtgcctgatcgaccgagatcttcagtatatgtacaggccttgataacaagtgcaaagcaaatcatgctttgcagtttgcaccatatcccactttaattcctgaaaagcagtccagagactcacaccgttgacggaggcgttcgttttgttaatttcttgcactgtgctgtctgccaatctactcatcacagaaaaggtttgagcgctcctctcccagaaaagctcagtggtctcgccgtcaccagaccgagtgcgacacacgttgtgttggagaaagctagtctagaatccggggcccctctcccggagactacactgctagtgcccgctgccctccgtctattggtttcgcattctcactgtagctcgagcgagacggccgtcgtccggccccggcctacctctacctgcgacggacgcgtcaccttcatgggatcagcgctcgacgccggatcggctccccctcccctcccctcccctcccctcccctgccttacctccgcgtggtggcgcgcgcacgcgtcccgtacgtactcccgtgaaacggctacaggacaacgacgacgccagctcacgagaaacgagaaagggacatatgattaattaagtaggagtattaactagaagtattataaactttaaaataaatttatttgatttctaaaaataatctacatatttctttctaaaaaaacgtactccctccgttccaaaatataacaactttagccctcaagatttgtcccaaaatataacaacttcttccccaacattctcttcttaaccaatcacaaccctccaccatttactttttacacctacccccactactcatccaatcacaaccctccaccattcacttatacctactttcttaataactgtgtccaactctaaaactccttatattctgaaacggagagagtaccatttagcatacttacagaaaatgagagagtagccaaaatgaaaagtttattcaaactcagccttatataagagacaggtgtcagcgataaattaattgatgtttgatgacatctctaaggtcattcccaactcaataactaggatgttgtccataatactccctccatttacttttgatagttatatttcatcctgacacacagaccaatgataagtaattctacttatcatccatttaaacatgtggagtactccctccatctacttttgatagtcatatttcatcttggtacacagaccaaggataagtaattatacttatcatccatttaaacatgctactagttattcctcgtaaacaagcgattcattaatatttacatttttcgatgcccatttaaccaatcttgtgtagaagaatggagagtcatgcattaaatccgaaaaaatcattaagaggacaggttattggattgaaatatgcctatcaaaaataaaattttcagatttggaaatatgaatatcaaaagtagatggaaggagtaccagttattcctcgtaaacaagcgattcattaatatttacatttctcgatacccatgcagccaatcttatgcggaagaatgaagagtcacgcattaaatccgagaaagtcattaagagaataggttgttgaattgaaatatgactatcaaaaataaatttttcagatttggaaatatgactatcaaaagtagatggagtattaaataagctgctacctaggatgaaaaatgatatgacaagtgaataaatgaggaaagagaaggaaaccatgtcttgtataagacatggtttctacacaatatccaagacatcatgtgagctaagtagcattaaatttaagtatggaatagtggtgtttacattggaagagtagtgtctagtattagtttcttgatgatgtggagtttatgaaaactatgtcttgtgtcttgggttgggaatgatctaagttctaataaaacacacatcaccggggcataatgggatgcagctgggagatgttttttcccctcttttagggatgtcctaccatttattgcaatgctatttaaatatttataattttttttcacaaaatttaataatatatatcgatatgtgatatttcactccacaaataaacaagtttaaattaacctatatatgcacgttgaaaaaaacaaaaacaaattattactccaaacaaaatataagcatctgcacgtttaccaaaatgtatttgtatatcttttaaaaaatataaataaatgcttatacttttggaatggagtacactcgtattgttcgcaatcatatttgttatttttctaaaacttaattctataggtcgaatttagattgcatatgtgttgtggagttatatatctcacattaatgatacatgcatgctgttatatttttttttctaaaagaacttttaattattttaatgccgtggagaaatgaggggacatcggcatggagggttaaaagactctcctgcatttataactgcgtatatcgtaattaatttaaacattttgctacctactccctctgtcaaaaaaaagtaaaccctgggttttttgtccaactttgactgtccgtcttatatgaaattttttcataattcgtatttttattgttgttggatgataaaacatgattaatattttatacgtgacttgtctttttaattttttttcataatttttttaaataagacggacggtcaaacgttgggcacagaaaccagtgtttgtcttttttttttgggacggaggaagtatttgtttccctatatatgtttttctatttttttggagagaattatcgtcccatttgtccacaatcatgacgacagagtacagtgtaagaggtagagtggcaactagctagcgagccatggggtcctgagtgtctgtctgatcggttaggtacacgtcaccatgccacgtgtcacaaagggattagcaacgacagtgcatcagctgcacctgtagatcgcaaggtgcatgaagacaatcttccatatcctgaatattccacgcatgcattcatgtttgcatacataagatgcacatatatactaaacagtacatgacacctagtacatgatttcttgtgctaataacatactacacacaactacatgttcatgatttaattttgtggcagctagctggctagctaatctatatatgatgcatgcttacggcacatttatattaatacgaggattgaaaaagagctctcaatgggatggagccaaatcaaacaagcaagctagctagctagagagctcatgtgaagagctagtcatgaactctagctatagctatagcttagctagagctagctctcgtcgtcgtcgtcgtcgtcggagcccttggatgccgcggcgtcggagagcatcttctggatccgctgcatcgtctccgcctcgatgttgcgctccgccctgtccttgttgtaggtctcgaagaactccttgttctccttctccagctccttccatactgccgccacaaagatcaaaatatatttttagataatgcaaatggattacatctccggcttctgtcataagatacatagccatacaaagattaaaatatatgctcacatgaaatgatatatatgcatatataataaggtgcaaccactagcttgcgaagagaatgcgcatacgtgtgtatatatataatttgggagagaaactagctagagtctataggtagcactgcacatggagatatatatatgttcttgaagagaagtgggtaagtaattaagtatacctgtggaagtgacgacagggttgatgttggcatgcttctccagggcctccatgcactcctccttgttcaggttgaagcaaatgcacttctctatcaggtggtgaacctgcagtaattaattaacaatggcagcttaattgtaaacacctctcatttgatgcacacccagctaacacacacaacccagaagaaactcatactagcatataagtatatataccattctgatgtacgaagctgaggatgatgagtctcccatggcgcctagcttgagagagacagagatcaccactaattaagctccagctagcttagctaatggcagagtagtactggactactggatcagcaagctccaggagacaggagccgctgctgattcagctcactgttagctagctagctaggtagctcactgcttacttatctatctaaactatgggggaagaagaagaagaagaagagaggagatagaaataggggaggtggtgggggaggagggggacgtggaggcatgtcacgtgggcgccgccgccccattggcggagaggtggccgcggagatttttccgggcccgcgcctcgctctcagtctcagcagcagcggccttgctttttctgtggctggagcgtgcactagctttagcttgggcggctttgctagctagctttgggccattttggcgtatcgttgctactcgatcgtccctagctacttggagacgttgatgagtagtcgttgctacttgttggacgttcgtgagtggtagtctcattgctacttgcttctcttttatttaattaacctcagtcataatcatgctgtggcggagccagcgacgtacgccgttgagtctggtttgatcgatgaagatcgaacatctctacccggtggccgctcgacctgtcaagtagtggctccgccactgatcatgcatatgtgtctgaaaagccatatatgttatttttgtaattgttcctaagtaatagatgcaatatttttgccctctagctatatcgaaagatgtatatagtcatctgaacatattagccgctaacaagccacaaaagatgctaatagtagctaaagtctagctagctaaaggcttactatgtgtagacatgaggttattcgaaaggagaggcaacatatattagttagtaattaattaagaccgttcgtattactatgaaaattagtctagagttgtatttaatatatatatttatatactcctatatagtatttattagtgagtcttgagagatctagaattgagatgcgcatcgaacacaccctctccaattaaaaagcatatttgaaaggtttaataatgtattgatccaaatttatgtacaatagtatttattcagccaccgcccaccaggttacgttcgtaacgttattcttatgcatcatcacttcatggattgcgcacacacgatcatatcacctttaaacggccggctcaaacacaaagctttactactatacagagcttactcttagagtatatactattccctccgtttcatattataagtgcttgactttttttagtcaaagtttattttgtttaaccaagtttatagaaaaaattagcaacatcttctatgtcaaatcagtttcattaaatttaacattaaatatatattttaataatatatttatgttgtattgaaaatattagcatattctactacaaacttaaaaatttaacttaaaaaagttaaacgattttataatctggaaaggaggaagtaacagtcaagctgtcaagagctaagggctcaaggcaagtgactatgaggtaaatagcgattgatcgcacttttttaggactatagcacagcaactatgccacatatgccccctccacataagaacccaaacggccaaactatcccctcaaatgtagatagcatggcccactgcacagtgaccaaagatcatctctcatgaaatcgcgtggtggcccatctgaccaaaatctagccaacccgcgttctgtccgaaattaagcacgcgggcccaaaggcgtatcaggcccacgcaagtcacgcgacgagtatacaacgtaaaccgttgatcgagcgatcagccgatcacgaccgttgaatcgaaggaggcagcaataacgtacaacaacgtaccggaccaggaagcagactgcagtttttgtaagctcgtcccaaaatatcatcatttttagggttttacaggtgattaggaaaattgattgagtaaattaaagcctctcatcgttccctttacaactgataagccatataaaaatacacgaaatatcaaaaaatagtttacaagtaaaatttttatacctaggatcttaattatttaaaaggtaatactgaaaaataaactataattaaaaaaaatcttaaattaactttaaagtttaaattttggttgtgactcataatgtaacgagcaattaatgatgaagcaataaaatggttgtgattataggtgatataagaaatttggtcaggaagttaaataagatgaagaagtagttggagaagttacatatagactaattttatttcaaggttgcatattaattattttgaaatggagagagagcataaattaatttacgcctggttctcttgtgatgcatgcatgcatgtcattgttgagcaattgggctagctcccgtaagattgcgcaccccaatggatacaaacgctataaatgcaccgaggtcgatagtaaaagaatttgaagatagtggatgttcagaaaaaaccaaaagaatttgggcgacagtggatgtccagatagaaacgcgtatgtatgttcgttcagtatgtggattttttcgtgttaaatacttaaatgtcttgtaaaatcatgtaaagataaaattttttatatatttacacatcaaaaattaaaaatcaaagttggaataccacaccaataaaataaaagacggaggaactaaaatgggtgtggtaactctacagtgtagcatttcgttttgtacaagtgccagacgctttagcgtttggcaaataaatttcctttcaatctaagttctaatataatattattacttcggagaaaattatataaaaactagggagatgtgacatttagataacataatttacatatcccacaaataaaatataacaattaatcttagctaaaacgtaaaataaaattccacagcaactctaaaaaaaatcacagtaaaattaacgcatcgtgacaacagcaaactgatcagccctgtttaaagtagcaagcacacggactagctctactcctcttcgataaagaagaaagaaatatcgcccgaaatgggtgatgaaaacgtgttaattgtttctaaaggatcgatatcgatggaaacgtgtgaaagaatgtgcagctgtgaatttgcatggttagaattagttagaagagagctgatccaggcatccagcaaggcctgggtgattgctggtagtactgtccaaagcaaagcaagaaaagtaatccacgcttcacttcatcgcatccgagaagcagctccctgacgtgctcgatcatgtgacgtggcgcgagctaattggccgtctaaattgcatagggtgatcgagcaaatgactgaccagctagtggcagtaacgtcgtacgggacaaatgtaccacccatcgatcgctggcgctgctgctggagaatctttcgtcacccacgattggcttcccaatattgaattaatctgatgtacaattattttttttataaacgcatgtaataaatatatatatttagctatatcgatcaatatacaccattataataatattataatgagtgaagtacatgggcggtccctaaacttgtaccggtatgtcatctaggtctctgaactcctaaaatatatttttaggtccctgaacttgccatgtgtgttatataggtccaaacaggttctaacccactcgatgtgctgacgtggcaatgccacggtgacgcctacgtgtcagtgaaatccacatgtcaagcatatataaaaaataaaattaaaaaccatattttctcctcttaggtagacagaaaaaaagataaaaattttaaggtagagaggagaaaatatatttttctaattatatttttttctatgtgagtgacacgtcggtccaactaacacgtatgaactatcgtggtatgccacatcagcgcatggaaggggttggagctcgtttggaccggtatgacaccccaaaacaagttcaaggatctgaaatgtattttgagagttcagggatctagatgacacatccactcaagtttagggaccgctcgtgcacttcactctattataatctagacgcatcacgattaaatggcatgtgtctttttttttctcctgacgcggtaagataatagatatgatcaattagatcaaataattttactccttttgtggtgcaataaagctatctccaagaggaaaacaagactctctgtgtactgcaattttcccaaatcactgtatatagcttggcaggtctgaaccagtgtacctgttggacgacttggatcgaaacataaatctctatgaataccatactaataatgtctgatttagacctaacctgctaaccaagaagaatatatatctcaccaaccaagaagaatatatatctcaccattttgtttctgatatgaaaatgaaatgcacagggagggacaggaaacacaaaacaaaactatccaacattctggggagacaagtaacttcagcattagcatcatgcaacagtcatactgacaggaacccacaaataaaaaaagacatgtaacggatttagcaataggtagcccaaatggatttctcaccaactctggaaatcggttttgctaaaaatatgacatcacattttttttatttaatttcgatcggtttctatcttgcttgtcttctcttttcaagtagttaatcaattacttttaatcgtgtttttatatataatatgaattaagagatttataatttatttacaatgtaaatataggtaattaatttgtagtataaaaatgatttgactgtttttttttccaatacggcacctagttccttcgtaaatcatgttatactttttttttatagagaagtgtattattttacccgacctctacattaaatcagatatatgcatcctttttaaatagtaacttagctcatcaaacaacccaatttgaaattcatagccttttcaaataggaacttcgcgccttaaatatcccaatctaaaattcactcatgtgaaagtttgaactcaatatcttgggaggtgctactcagcacaccacaaccactatactacaacccaatctataaatcatgttacatgatattcgtttaatttaatccattaatttcctctctacctacctgtatgtgtgctagctgatgtacctgatccttgcgtatccatctcagaggatgatgcgcggcgaccaaatgcgctgtggatcacaagttgccgatctcgacgtcttatgacaatgcacatggcttcttcaattttttcatcatagttaataaaatatgaggtgctaaaggtcttataataatattttagcatagtttaatattgagattatatgtttatgtcgatgtaattggtacgttgagtccccaaatttttgtttctggatcctagggatcgaacgatcgatctatcgagcacggcgccagctgcagacaaagctgctaacatgaggacagcaatgtcacagcacagctagtagcaacgacgaaaccacatgcttgatggtgcacagacactgcagctagcgtacgtcgtacctgctgctcttttggctgcatctacgcgtcctcgatcgttttacttagctaacataattactactcctacccttcgttataaaataaataagtttaacctttttactatcaatataaaaccgaaaatactagagtactcatgctttatcaaatcctgataaaattatttctctctttatccactcctaatgtatttattctatatttttatacaaattctaatgcaataattgttttaaaataaatttattttgagataaattggagggaccgaaaatgatcttgttctatgatgatggagacggcgggattagttaattaatttttagacgatgatccaatgaaattagtgatgatcagagaaagaggttgcaatctcacttttacagcagcaacgacggaattggatctatgccgacttctctatacattttctgtgcgcgtgccaattatttttcttacagtaccggtttgtttgtctgtttcgatctctggaagatcgagaccggcatttagaatctcacctgatagaacaaaaaagcttgctatagctgtagctccaaaaaggctcacagtgacactgaaacatacccacgcatgcacggccggccggccagccggccactgcgcttcatataaacacattgcaacgaagtgttcacttcagagctagcgcaatcggcgcatgcctagctttgtgccatatttggactgggacagtttaattaattgctagcattactgcaatttcccccaataaatatcagccatcgtttgcacatggtctgctaatcatcaaacaaattaacaattgtgacgtgaaccaccaataacaatatactcctactcttacctccaatattttaatatctaacgtaattgacttttttttctcaaatttaaccaataatgtaaactcactagaatttatgaaaatgacccactaaaatatgaagcaacggtattcgaccccacaaggttaaacttctggccccgccactgtccgaggatactactgtggtgattatgttactatttacaggttaaatagagagagaagcacataaaaagataaaaataccctttagataacaacatgtcaattatagctttcctaatttttcttctctccctctaaagttttgcctacacttacttccctgtagatgtagatgtcagttcccaaattttctcctcgctcccgatcagttaatgatgatggtgcccaagggccatttttgtcttttctatgagtttttctctccattcaacctaaaaaaaataaagcaatcatcacggtgtcttccagaaagtaatagagtttaaactttatccaaaaataaatcaacttttatattcttatctatatcgggtcgcaaatcaataaattttatcctttcaatatctccctcctacttatccactaatataactagagaagttatgacgattagagttcttttttttaataggagtatgaaaccatcggggagaagttctgctcacggcctggaaaaccatccggaactgcgactcggcagaagaagctgaagtcatagcctgtcgggagagggtgagtttatcggtagactggatcagacagccgataatccttgaagctgactgcgctaatgtgatcgcgtgcctcaaggccagagaaattgaccggtccaagctgtgccatatcctctacagtattaagtcgtccctgcaagtcttgccggattttcgcctggagaagattagaagagaaagcaacggtgtagctcacgctttagctaatttggccttacgaaccaaacattgttctgtttagcgtatggatgcccctgcttgtattatggagctattgaaccgtgaatctcaacaagttgttgagtaatcaataaagctttctcttcctcacaaaaaataaaaaggagtatgaaagaacttccaaactgccgctaagtagtagtactactaaagagcctaacgtattattgtcaagtcaaaatgcaaacgaatatacctgcctgacttcaagtgttgcaactgagaaaaatattttctacatctataggtgccataccacctagttcatgtgatttaaatggttatataaaagatttgtccttgcaactgcccttgctgcatgaacgcgagcccgggcttgatgccagcgatggc

SEQ ID NO: 27551 - DNA, 9167 bp, Oryza sativa
cttttgtggcaccgcattactttcctattatagtaaattatacacctcaagtttatacacctcaagtttacacatctaaagtttagaccaaaagtttataagtcaaaagttatatatccggttcaaatttgaatttgaatttgggtattttttatatatagtatttctatacatctaaagtttatagacctaaagtttatagatctaaagtttataagtcaaaagtttatatacccgtttcaaatttgaattttaattatatctgattcaaatttgaatttgaattcaaatattttctatatatagtatttctatacatctaaagtttatacacctaaagtttagtttatagatccaaagtttataagtcaaaagtttacatacccgattcaaatttaaatttgaattatgtccgattcaaatttgaatttgaattcaaatatcttctatatatagcatttctatacatctaaagtttatacacttaaagtctatagacctaaagtttataagtcaaaagtttacatactcgattcaaatttgaatttgaattcaattttttttatatatagtatttctatacataaatttttttaacttttgttttttttaaaaaaattgtgtggtatactgtagtagaaagagaagaaggggaggaggaagggggagaagagggaggagtatagggggaggcggggccaaccgatcgctgggcgattgcctgtcggagtctgaaactaaaaacttgcatccgaattaatgtatcaatccctggatcagtaaatattgatacatacaatataactggttcttcattgcatatgttaaagttttacaatactaagggttttacaataatacgtactcgcctaactaattaatacacagcggaagtttctatacattctgactagggaggtataaccttaagggattctctaagttatcggggtcatcgtattaatagtcataggggtcctccttgacccaaatctgaaaaaggggttataagagcaaggatgagtattcgcaatactcagcaagttatcatggaaatatgttatgcattaatacatagtagggttctttgcaaaaagcagtaataaacaatctggaaaagttatagaaagaatttataaaacgtatagactttagatttctaaccagggtaccatatgagtcccgatactcaattccatgagtacggctattcgaatagtttcaaagatattctactgcagcagatgtacgttttacccgtagtccaggacttgctgataatcatcggctttagtcatggcccagtattaagtcattaacaattgtggcacctgttccatgaacttatatcctcatatgctctgaatgtattgttaacagcagcaagaggagttctggcgttcccgaggtatttaagggggaactgatcgtatgacaccacgtcatctcgatcagggtttagaaatataccatatagtttatactcgagtatcacaaaccatttacctgtacatggtaatggttaaagttgcccttcgcggctatagttgcctcctgcgcgaggatttaaaaataagaaccactatacagagatgccatattgctaattaacataatagctaggtctgtccccgttctagaaactgcggtcgtacccgttcgttcgacataagtacctggtaataactatatcgattgagacagtacttgacggagcgtggggctcctcaccgggagaccgcgtaggtccccctttgccggttcggccgggggcgctgagtgaggttcttcaccctcgatctgtggaacgttcgcgagagagcaaatgcacaagacacgggcgatgtatacaggttcgggccgctgagaagcgtaataccctactcctgtgttctggtggatctgtgtatgaaggagttacagagcaaatggagagcaagagagttcaagctctagaacccctctttttccttctcttctggttcttttttttctctcaatctcctcctcccttttttaggtgggcaaggtcctccttttatatctcaaggggataccacatgcactacttctacctactcttcttttgggtggggacccaccctatcttgaccaaatcttagactcgcgcctccgcctggaagctaaatcaccgcttgtccttgagtgatgcccagcgtcgtcactcgtcggacacaggggatcaccctgtcatttcttcattaatgggaggagatctgcaatggccgctgtctgaatgaccctccgatgggatgggtcatacctacctccactccgccggaagcagatgcaacgtgggagcacggttgtctgccgatgacgtgaccagcgtcagtccagtcacagaccggtcattcttttccaccacgcgtcagtttagcatgccgcacatctgcccttcttcatacagtgacttccttgcaatggttgcgatgaagcctggcatgaatcgagccgggactgacgtgctaactccaggagttaccacgccggctccagctagggacgagtgccaagaggctctcatcattccgacaggacggggcgaggcgtgtgacaggccgcctgctgccacctaacccgcgatctgaccggtctgtgaccggtcacacactgcgaccgatcacggaccggatatgcgtgcgccgtgctgcattaaatgcggcgtggcgcgcttgtccattccgcaataaatgtggtttggtgagcgccgctgtgcccacctaacccacacacgtggcgccaataccacagggggtcggggcgccccagccctcggggccgaaacaggagcggcccgacccctcggggagacagacgagggggtgggcacgtctccctcgggcccaacccccccgagggggctcaggtccacgtggtgtgtaccgcggctgcccaagcctctagtcatgatactcccggtcccatgtcaccgacaagtactagccacccgggaatcaaccaaatcttacgtactgtcccaatctaagtatgaggtattttaaccagattgtaagcaaaataagcaatactaaattgtttgggtttctatgattgatttatgcatagaaaatagaatattgaatagaaagctataaataaataatttataaaatataggcttaaatgatcaaaaggtatatggtaacttgccttgctcgatgtcctgagattgattgatattatctattgagtcagaagaatcctcaagacctagggttagacatatataaaattcaaattcaaaaggaattcaaataaaatccaaaaatataaaaaatagagaaaataaaataaaatgcaaaaatagcaaaaaggggctcaaaagatagagaatgattttagaagaatattggtccaagtttcactggaattggatctatattttaaaagatatgggtttctaaagtttaaaaatcaaataaaagtgaaatgctactgtgcgcgggtcccacctgtcagtctctctctcttctcttcttctacctccggccgtttccccaaatcgggccggcggcgctagggttggcgattgtggcggcgatagagggggaaagtggttgcaaccaaagaggggagggagctagggttctccggcgacggcgagcggcggcggagggattaatttgaattgtggatgggttggcggctagggcggcggtggcacggttaggccgtaaaggcgattgtgatggtacgagttagacatggctaggggagggctcctaaagtatctacgatgtatctagatggattccagcagcttgccaacctttggcaaggcgcggagggtagttgccgacgagcgcctccataggcggcggccgtgctcacgtcggcagcccagagggcgacatgatagtgcaaagtgattgctaaaatggaatctagggggtatgtagatggttaaaatggaagaactcaccgagatatgccgagatgaaggattgcggccggaaaaactcctcggcggcgaagaacagagcagcgcgggggcggcggtgctcggcttggtgcggcgaggtaaaactcgacgcagggcttcggttagggtctaatatactagaacatagttgatataaagtgttctaaggggtatttagggcggaggatagatggagaggtgtggagtcgatcgcgcacaaggtgttcaaccgacgggcgatggtggttgatgagatggattggtgaggcagagcttcggggttgtggggttatggttgttgatgatcgatgatggacaaggaagggattggggtcctatttatagggctagaaggagtggatgagctcggacaccgtcattgccatggatgagctcaatctttggatagggttggggcggcagaggctgtgagagggcggccaagatcaatttgagtggcgggaggccacgtttgaatacttaccggcgaaggattggcttgactgcatgcgaattcggctggcgatgtgttggcgccaatccgggcacgacgcgcggcggcggcgagggtgaaaatggctgactcgggggtgaatggtttgaattgtgagaggggataccaccgtctatcttcaatccaaccgcgcggcaagaattggcgcaattcacctcgggtagaagcaaaatcgcattcggcggcggctttggacgagcgcgcacggcgtcgagcggcgatttcttgcggcggtcgtcgtcccggctttgtcgttgtcaagattggtgcggcgatgatggtctgagggcgtcgaacggctagcggcgcgccaaggcgatcgagcacgcgcgatcgatcccgagaccgacgcgcggcggctcggcgtgcggcgaagtcggacgccagagagcgcgcataaaggggaggaagtagcaaagagatccacggtatttgagtgggatgtggtcccctaggatcaattctagactttgtgcaagattggatagggattgggctgtgttcgttgggctaggcattctgccgaacaccttgaaggcaatgaacagtgaaattcaagaattttaaatatttccctagaaaagatttgaatttaaactatgaatttggaagggtttcactagggtttgaagtatagcaaatcctcattaatattaagataaactaagaaaataatctatagtttgaaatttgagagaatttgctcaattcactaaggtttggagtaaagggaataattagagtaaattaatagggctctaaggaagtaatacttgaaccaatttaagaatcaaatagatttttaaaacacactaatttaatcaaaagccagcatgatgcagtcaaattttagtttaaaatttgagtatgttacatcgccctggcgatcaatcgcccattagcctcccccgggagggagggggaaggggatcgatcgctacccccgtctccgggcgatcgatcgcccattagaatcccccagccgcgtcccgcgtacgggggtcggggggacggtggcggcgcggccggtggaatccatccaattctacgtgacgtgaataacgtgaccgtctcttggatgggggcgggatggtgcgcggcactgtcccatcttggctttacacggacaaagtatcatttgctcagtacttcctgcgtcccactttaaacgcaaccataagctgaatgatagaaaatactaattaacacgcgaagttaagcacgcatattcaaaccacgtaggtgtaatctccgtgcgtgccagcgctggcagttcatacgctgagagcctgagacagaaacagttttgcctgcaccgggcggggccaaccgatcgatcgcgcgaggagaggtcgagactcgagacgagcagcgcgcgcgggtgcggccgggccaaaaccaaaaaccacattgatctcatcgtgcgcgccgcctccccctcccccggcttgatccctcgtcgattttctctctcaatcccggcctccgcgcgcggcggcaggttcggcggccgcttctccctctgtttcgtccgccgccaccgggcgcggctgctggctcggtcgcgatgcgcgcgattggtaaaccgagcgtggaaactagcccacgcaaccagcagccggcccacggggaggcaaagcgattttggcccgtccgcacgcgcctgcgccgtccgtgtccgtccgcgtgtgctcccgtgctccgccccgcggtgcagcctctgccggtttgagccacatgcgggattgcggctgccgcgggcggccagtggaatgtgctgtagcggcggctgggaaactatttttttttaagactagtcaccgagggggagagcttccccacctgtattttcattgaaagatagaagaagtatacgactttagattacatagtgcgaagggggaggaaagaatttgtttccaggattctacaacgatcctgtcagcacaaataagtctctctgcccacaaggttgcatcctcaatacatctagtaactagtctatgcagagagggggattctccacggaagacaacatcatgacgattattccataatccccagagacaaagcaagaagaaaaccttgaagtgctttgttgggaggcggccatttgggcgcagagcatagaggtcgctcgcgctggtgatagtctgggggatttcaagctgattccagaatgcagttgcaaaggggtagaggaagaataagtgagccaccgtttcttctgccgagtgacaaatagggcataacaccgactggacgattccttttttgcacagattaactttagtgggcagacgttcctttgtgagaagccatgcgaagaattgagctttagggggatctctgttccgccagacaaagagccaattggggcttggtaaatctcctttgtgtgcaaaatcctcgtcataccctgggccaccctagagtccggctcagaatttagggatgtgttttgtcagatcatgagcagttcatccacctgagcctgggcagcagaagacagcctgggagcaaactgctcgctgaaagctccactgcaaacctgcgccactgggaaactattttgattccctcgagggattgaattcaatcgtttgtttaaaaattatctacacagttatatttttttttcaaaaaaaaattaataacttttatacaacatgcatatgatactttacaaaatctttcaagcttaactcacgcatttagatataaaaaacatattcagtaaataaatagcagatgtatttgtaaacaaacttagtaaatgtatacttatctgaatttgttttttttctcaatgtgccgaatttgaacttgatttaaaatcaaaggctgatagaggtcgctatattatatatttgtcattttattcttatttttttataactatttacattagatttaggagagaaaaaaaacacgagagacattctcgaaggattttgaatccattccaagtagtagccgtagttgcatggatgggaacgccggaacgggatggcatcggtagcagcacgggcatatgcacacgttctgtctggtgtgggcaaacaccgtcccgtgctgatttatcacgatctaacccgtactccccgttaaaaaaaccaatctagatgatgatagaatactactagatagatatgtccagattcgttgtactagatggtgtcgacctatctccatataggttgaattttgtttggacggagggagtacgtgttatcccatctgtaagtacaactactaccaacaattattcctaaggtaaaatgtatgatttcgctcccttctcttttgaatggtggtgaatctgttaacccatcttcttccgtttggaaagtatgatcattttatacgtttttcttgtgagaagaaaaaactgcacacttgcattgcatctcatgttatgtaaaactggtttgttcgtacacttacatacatacctcgcatgttgcaaataaagaatgcagaaaaaaggagagagaaaaactttggcaatttgtgggcaccggagatgccgggaaggtattaagctactataaactaatgcttgtttcagttcatgcttatcagccatacctgcagtgctcagcaacaccaatttggtgtctaaaattgcttccctttggctttagtttttctttcctacctttgattggcaatggcacgcggacgctaaggactattcgtttctgcattttctttacgagatttccgcttaaagcagagaggaatggaattatttttctccttcagtgggatccttttgatctgatttaggacggttagatgctgacaagcagtgttctttatgggggaatcattagcttgacgtgttaataaattatcgaattattctgttgtagtttcacatcatgtgatgcttagccatgaggagaaattctggggaaaaaaaaccctagttgctgtcttgcagaattggtttttatcagattatcaggcaatggtgatgtaggatagatgatcctgtctgttgcattgcagctttcatgacccaaaacatgagtaaaatatggaagggaactggtccttgttttctgcttttggacttgtcccctcgaactaccaatctctctttgttttatctcacatctaactacaccttagtttggtaagactgaatgtctgaatcactaatatctgatagaaaaacaagggcaacaccataagaaactactcgaactagcaagtagcaacaaatctatggctcactgtcagggaaataccatgcaaatgtttatgatttttttttcaaaatatttgacaatatttatatagcataacatatacaattccacgatattccatgactcgactccacgttcttttccacttacgtattatggatgctaggctttcaaaacttctgaatggtatagttgttacaaaaactttcttcattggcgtttcttaaatattttttgaacaactttttaatatttaattccttcgtttatgtcctcgaataacttgtcttttaactcaatttcatccataacccatcatccaacagaactttacaacatacaaaccatctgccatacttttctaccattttaattgctcacagtgttcaagttggagatgaaccaagttcacatcttcagagaaatgaaagagaaacagttgtctccctccaaaatactgaagcatgtaaaaaggtacatgcccaaa

SEQ ID NO: 27552 - DNA, 1102 bp, Oryza sativa
tctattgtaatctacaagttttatggccttaattgtaagatattatatcttgctgttgtcactcaatgactttatgatcatcatattattctgcaaaaaagtactatctttgcttcagttatgtgtcttcgtttcttgatgctatgttaagttgcttcgaagtagtgttgtagaaatttttgctctgaaaaaattgatacaacacaaagcatataagaggccatttgcttcataatttgcttcatacatctaattgttctcctgacaaacgggtttatatatgtttcttctctttactttatgctgtcgcacatgcatcctataatacagataagagataattaaatcttactactacaatataatttgagagctaatttgctctgaactgtactccaaatctatgcaaaattctggaattttccccacatatctgacctgcttattaccacctgataaaaatggctagctgccacatgttcagatgatatgctgattgctgaattctgaatatgatctagtatgatgaaaaagtttagaggccattcatttgatcgaacaaactcatcatgggtgtttcagcaacacacgtttttttttgttcagttttacaaaactttcagaaatccatcgcgccattgtaagtacatttatcacactcacgctcgctgtcgtcatcaacctctgcaaatctcgacgagctcttccgggccgtcggattccgcggcggcgatcttggacgccgccgacgagaggaaccggaagccggcgtcgctggcgctcttcctcaccgacgccagctgctgcgacctcttgcagtaggcgatcagcccctggatcgggttctccacctccgagctcgcgctgctgctcctccgcagcgccggcgccgccgcgccgccgtcggactcgctcgacgtccgcaccgacgaggaggaggagcacgacgacgactgcggcgcaggggacgtcttgttcgacgtcgagtaccggacgatgacgctggagaaggacctcctgtggccgccgtggtcgcgctctttgtgcttccctcctccgaccgaaccacggccgccgccgctctgtgaggaggcgatgcacc

SEQ ID NO: 27553 - DNA, 5103 bp, Oryza sativa
tactcctccacgttgagctccccgctggcgtagcacgagttcgccggcgacgcggtgcacgagtcgtacggcgtcgccggcgccgtgcttatggcgagctgccgccgcccggcgccgccgacgacgacgcgcccgtcgagcagctcctccaccatctgtatccgcggcggcaggtgcagcggcagcagcttccccttgtagaacagctcgtccgccggcgacgccagcggctcctgctcccaccgggcgccgccgccgcccagcggccccgacatgtggaagtcgaactcgaactcacccggcgccgtcgccgcggcggcgctcgtcaggtccatgtcgatgtagtcctcctcctgcatcgcctcctgctgccccagctggtgcttgctcgccattgccaaggtgagagctcgtggctccggagctgaagctgagacaagagggcaggagacggtggctgcgtcttgctacttatattagccgcttaatcatggtggattaatgggcttagagcaaaaatggacacttggacagtgtcatggcatcaaatgaggcttaattacaaagtataaatactttctttatccttatttaatcatcacctaagattttcgaggtcttttcaaaataatcatcctataacaaatgtctctttatttgtttgtgtaaagagtaaatgagcatcattgaatatgctgcatgcaaccaatcaagattaatttttattgatgcaactacatgcaatatttaaaacttggtactattcacgagacacgaagcaacataccatcttaactaatgagaattaattatagaatgatggaaatttggttgtttcagtctctgtgtttaggtgatgatcaaaaataggatggaaggagtatcttgtaactttatatgtattgtgattacaggcgttttagcacataacacgatattccggatgccatgatcatatatctttaaaaaatcatgccgtaaaatcaattgttctttatttcaccatacttaaaatcaaatcaaatcttgaaattaagattctttttattaaaaaaaatttagccatgtcagttaagattctcttatcttgcttaactttaatagttttgcacaacttaaaccatataaaggggttaatgaagtatgaaccggattaatcatactattatggtgggccctaccattagccgtatgatctgcctcttgtttgcatgtaatgcagaacgagttgtgtgctctctccctatcattgcatctgatgtccctggctttagtgcagtattatcactcactcaacttcagcttcttttctgtgagaaaaaatcggctttagcgatcgcgttagtgctgattagggtggtgttcttttgcttttgtgccttgcgttagctgcatgcttctcttctttccatggctacctctcgtgctaatgctactaatcactagtactagtacagagttactagtattagtgcaagttaatagtacaaaggtgtggttaattaggaacgcatttctagttccaaccagtgagtgaccgcgagttacgagatgatacggacgatacgcgcgatctgtgtagattacttcaaacaggctctgatcattggctcagttaatcagtgattagcagtttagcactactaagtaatttcgaaatcgaaatctttctaaattaaacattttgaatttgaaatggtgacatagctcattccccaagaacaatgaggagaggaaaaaaaaaacaaagcatggagtggtgcagtgatgttctacagtacttcgattgagcttgtaggcgtgtgcattctctgaattttttagacccttcttcgtgtcaacatgttggagtgtgtgaaggtgtcattcatgtagtacagtacaaaatggcctggctgactgtctcgtcggattctgaatttcaggtcagcaaccatcgattcagaattcagagagagagagagagagagagagtgagagaaagacagcatttccatgaattttctagagcaaatcattttatttcgattcctactagcacgtttttcaagctattcataaaaaactttctatataaaagttgttttagaatatcaaatatattcactttttaagtttataataattaattatgtgctaatatttctctttttatgtgtgtcactttaattttcatctttatcattttcaaacaccacctgaatgcatgtgtgacttcgatgtattcaagggattgaggtaaaactgcacaacagcaattgtacacaatctaaagatttaacggccaaaaccgattcaccacattaaaatcgaaacaatacattttcatagtaagttgctacagtgttaggatgtatctcaagtgtctattttgaatcatgtgatgctagtgtggctgtttagcttgcagtcacattagttactacatgcacctaaacgggaaggtaacacgctgacgcgtgtgtttcagtggttctcttatctcctccttatcttagagcaaggttaataatacagtagctgcatactgtatagatttttagtctatctctcagctcattcatattgtggttaactcttcactataaatatatggtacacatgtctgtctcacagattttcttggttcctgtacctaagccggatgtaaacttacaacccgtttctcatctctctcctctcctctcttctcttctctcatccatctcagcattcagttttcttacagcccactattattcttgctcttaccttacgaatgatgttgatgttggtgagaaatttggcaaagccgtgaatttcggcgaagaagtactcaacctggccagccaaagtacagcatacacgcataaaagaattttctttttcttttttctctccgatggtgtcatggtgatacagggccttgactttcgtgtgttcccatggacttcctctattattactccacataggccgtaggaacaccctataccgtgaccatctgaagtaaaacaatgccatttacccataaaaagataggaaaccattgtatccattcctttccatattgtgtgaactcaagtcattttaatttgatcctaaatcaaacttctctaattctaattgagtttaaagaaaaatacacaatcagctataatattaaattagtaccattaaatccaccttgaaatatgtgttatagttctcttatttgttatattcggagtattacagatgttgccgtatttcttttatagactcatgggctgtttggttgctaccctgagaagaagtggcctgacctaagactagcctggcacattttaagtgttgtttggttaccagcctgaaggttctttgcccttgcctgacctgatgcatgctgtctcgtgattagcctgaccttcaggcgtagcagcgaacgtgtattatcttctttcatgtagcacaaagccaatgagccatcgctatttgctgccgccgtcgtcgcgcggaaccccagcctccgtcggcgtcgtcgttcgcgcacgaccttgcctcctcctccgccgccatcgtctctcgaaatcccaacctctgatgccgttgttgtcgcggacactcggaaaccgtcgctgccttctaattcgctcgaagcctcgtctttgccggcgccgtcgtcgtcagatccggcacagtgtcacacgaagctactgcgaggtcgccggccgggcccatcttcagcacgaagcagcagccgtcgccggtgtgccaaagcgatttgatgaatgcttggatctgggggatttctgtccttgcgttcttttctcctgctctctttttaacttatgcaattgatctatcttatctaattatgtgattgatatgtctataaagaaagacatatagtagatggatttggggattttttttcccttgtgttccgcttgtttttcatccttaatatatgcaattagtttgttcatgaatctgctaatagtgtttctttcctctcaggtagctgtgcacaacctgaccaggcaatgtaatcaacttttctcgtgcctctcaggcatgcaaatttctcatgctagatgcccagggcacgaaccaaacaagccctcagtcaaagttacgtaagtttgcttacaacaaaactaaaatgacttacagcaataatgagtaattcaacgtgaatattaggaaatgacctaatatcaaataattagaaggggtgaggcttcgaacccaagtcatctagcccatcaccttgtgaagctagtcggaagacccatgagtgtttctacatgactttgctatagcagactcaattacaatgatcttttatagtactgcacagaaaccggaccgtactagaagtagagtgagaacacttaagcaaagctccataaattgcttaaagataacataaggctaacatcaccatcccaaacttgcaattgaaggagtatattttattccgcgtataaaaattgttattttagtagtagtgattgagtcatcttgtagcctactaggaggatgtagcgattaggggctgtgaaactcaggttaggttgtggtcaaccttcaaactccggatttagggagaaaaaattgcaggcctgaaaactgaaatgagtgccacttgcaggctggctagctgctatgaattggtcggtagtggtggttcgaacgtggaagattcgcgttagtacgcaaagtatctaaagtcagcactttgttggttctaatctgcatgagatgaatctaatctggagtgtattttctaagagaaaggaagagagagagaagaggcaaacatgtaaaatacactaatgtaaatttcagacccaacttttgtacaatcttttgttgtttttttttctaattcatacatggtatatgatcttttgtgtgtggtccacgagcagtgtctactaagattacttcgttttaatttgtgtgcctgatcttttggttgcttcgtcccattaaaagtgagattagcatgacttcaactccttacgcctcacttatttcggagcttcttttccccacaacacaaggccacggcacaacattaagtgacaagaagttctatgatttttgtagtgtagagtttaacaagatggatatcgt

SEQ ID NO: 27554 - DNA, 2347 bp, Oryza sativa
actaccgcttccagaatataataagttttagggttaagaaatgaggtataattaaatatgagaatactatgattggataagtggaggtagtgaagaaattgaatgatgaatgattatgatttgttaggaatgattggtcagaaagaaaatgttagtgaaattgttatattttgggataaagggagtaatattttttttacatatatcctctacactgttgtccttgtattgaaagctgctaacacgagtacacagcggaggatctctcaattgattgttcattgtttcctcctgaatcgttaggcaaccggaattttatttgcgtgcgtccaatacgctaacccagcaaagggaccagaaaggaaggtgatcccaaagctcgaggtgtttctttgcctcctcttcggctggaagcaggcaaactggcaaaggtttctgtttcctccaactcctaggaaaactcagggtccctgatgatcacctaatggcaggaaaagtaacctgaatctgacaccagtttgtccatttgtttcagcatgcagcccctgttcagttcccttttctggtaaaccttggatggcgagttttaagttcttggtggttgtggcaggtgatgcacccaggaagttctgacaactgatgctaaggctgtgtttagttccacgctaaaattgaaagtttgaagaaattgaaacgatgtgacgacaaaagttagaagtttgcatgtttagaaaagttcaatgctacagaaaagttggaggtttgaagaaaaaagttggaatctagacaaggcctaacttttcttcatcagcaacagaagacctcaccgcgggaggccataatctgaccaatcacaagacaaagtgagccatgctctagcaaaattagatgggtttcacatcataaaatgatcagctatagagtaattcattccatccaaaatatcagatgacgagcacatgaaacttttaccagttacaggcattgaatgttacatacagcacaaggagaaggtgaaaatggggtaggaaatgtacaatgtttttctcttgtacaacatacagcgtgttttgacagttttgggttgcctgttgcttccatgaaccaggagtaatctaatcatagaggagctgcagctacaagaacacaaagagaaaaattgctgactagcagctgctgatacaacttggaaagctgacaagctaaggccgtaagttcgacgaagagtatcacagatcactccctaaaagatgtatgatcatgagagcttcgtcaaagcaaataaaatggcaacctttgcgttggagatcaaaaccataaatatggaaactcctgagatgctttacagattggacagaaccccaccatagcgttgagaattagtgtacacggacttgactgttatgctgatgcagaatctagtgttatctacttctgtgtttgttagaactacactacagatcaacatctggcaatggcatcttccagtaattccaggaattgtagtcttcctgcaaggcatcatcattgatgatcagcacaaaaaggaatttgcatgttatggagtatgaccatacatgagtacaacacaatcacactagctgcccttgctcccaacagtaacctgtatggttcaggcagcatagaactggaggtgactatgcgctaaggataaaaacagttctagtcttggatagtatgaaagaagccaaacaagaaaaagaaaaacatgaatgtgcatgttttcggtctagctaatcccatgaaaagtattgctagaaggcaagaatgacagctaacctgctcaacaagagtggttggagggaacatatcatggacaagggtatgtaaggaggtataggacttcacgtcgacagaactgtttatggctacttccccctgcacgcacaggatgactttaaaaaaggcacaatacaagcatggcatcactaacttttaactagtgtaatggccatacctttgggttgatgataaagattttcccttttggaattcccatctttttgtaactaagctcatctgtatctctgttgccaaatccagcataaaatggattgtaatcagaagggaaaagtgctttaatgtcctgccaaagaacaaaaattagaatttcaagagcctgctgtgataccaacatggagtttcaggtctatggaagaatctaaaatgtgtgtttctaagattgtcacctacccgttaaaaaagaattgagactaacaacttttcttaattcttgcaaagttatagtttatttctgaaggatatgagctatgatgccatacaagaactacaacggagccagctaataagaaaacttcggtggcgt

SEQ ID NO: 27555 - DNA, 755 bp, Oryza sativa
ggcaagccttgctgattctttcttagcggatcttgatgaactttcagacaatgaagcctatcctgtgagttggtttcagttactatgataatacagattttacaatgatttatttattgagaatttgttaactaatcatcaaatttcaggaggaagaaaatgctgaggcagtgggcacggaagagattggtgatgatgatatgcctgacctcgagtctcttaattatgatgaccttgatagtgtttcaaagcttcagaaaacacaacgttacaatgacattatgcaagtatgtgatcaagctcaaaatctcctttttcttgaagatggttttgtcctcttgttttaattggattgttgtttgacttctttcttctagttttctgattttgaagccctgtactgtcctattgtcacaagaaggctatttgcagtcaaacattaatgggtgtgttttagagtccaagacatgtttaactatatactcaatgttacaaatgctttgcgcaaaaagtacaatccttctaaatttgattctaaaggggactgtcatttgtatttttaggtaacaaagccttatgtttccatacatggcaacttacagaatcactctttgtttgcagaaagttgaaaatgcacttcagaaaggtacagatttttccaatcaaaggtcgatcctggaggaagatccagaataccagctgattgttgattgcaatgctctatcagtagatattgagaatgagatcattataat

SEQ ID NO: 27556 - DNA, 1287 bp, Oryza sativa
aatatcagagttgatatgcgcctgcattgtaacatatttgcaattacatcgattagtatttttaatgtaacttttcttttcatagttaactgcgtaggagtcctctcgtcattttgtttttctaatgctctattatttgttttatcgtccaggggatagagttgtcaaatccacaggcccacggcaacctgcttggaagtggaactcagagcacctatttttcagagaccgggacgttctcgaagatcaaaaggacctgagctgataagcaaaagtttcttcttcccatcagcccacagacccgtcataatcctcaggatgcaccgatgaatccattttgtaatgtactccaccttatacccgaattcagcagactttcgtggtgctgtttgcaatctctagaagttcgctaacttccatacggttcaagttaattcgacatgctgcgtttgatctgatgccgtctttgcgttcaacacaatttactgtttttggtaggtgattatcttatctgtcatctcatctttaaagtgtaatccctcttgtttcttacaaggtgctagttttgcgtctagaatttctgaaacaaagataagcatcagttggtgttcccaacttcccaatgttcccatcagtccgctatcaaggcagcgtacacgcaagtggattttacataaaatctttgaccaattaacggcgaatagtctcagcataacctctatgtgatggttgcatccgtatactcaaaacatagccaaatgccaaaatttacatgtacaaaaatggggttgctcacactggttcaccctacagagaattgtaagacagaaaactgtctgaaccgagcaaccaaaaatggatacaacgctgcaaacaatgtaaaatgactattcacccattctacaaaaagaaaaaccatcgggatttttacagggctactcgataaagttcgtttactcagcagttcgctgaataatatgatctgctggatatggtgtacgacctagcctttgctcagcctaactcgcaggtcctattacttatccactttgtacagatagtacatctcgagccatcgattcattatgctaacacgaacagaaaatgatctttaagctagtaatgatttaccaaaataaatgctttttgctcatgactgaagaagcccgtcaccttcccaaccaagacgtaacatctgatccactaccttcaagctcaactgcaacattaccagctctattagaacgaaggttaagtggcaaggtagtactttatgggggatccact

SEQ ID NO: 27557 - DNA, 699 bp, Oryza sativa
ggatcccccggacttttttttcctgataacaaagataaacatattaaaatcctttgtagaaaacaaagagaataacagaaaaccgaaagaagcaacttactgcacgagaattctcagtggaatcttcatcagacgaaccgtcgtaaccagattcaatgtctggcttttcacggttcgatgatgtcatcattaccccgacaagtccatcaacgacttcaacaagttcacgcttactgatgtatgtcacacacaatgaagaacatggatgcttcttggatgtaaccaaacatggcattagatttgaaggcagtgccaacactggctggcttttgatcatgggattggtcatgagtggcaaaccgttgctcatatccactaccaaaatgaggtggaataggccttcttcaactagatttaacccagggtcttgtcaatgaaaaaccacttcttgagtgttttcttcttggtgtaggtgcgtgcacagttgttcaacagaaagttagcagagatctggaaaaaaaaaacacaagataataatatgacgcaactaaacgcacatatactttacaatcacaaaaatgtgatttaccttcatgtactctccagttcaagaaggtatgtgcatcagaaaaatgacagccagatagaaaaggccatgtaatccgccctacgcatatacctggtcatatagcattggtg

SEQ ID NO: 27558 - DNA, 1361 bp, Oryza sativa
tcatgatggtcgaggcaggtgtgatcagcatcgccatgctgagacggatacaagctcgccacgctgccaatagagtgcaaggcctgctccacgcttctccacatggaagcctcggacctgcacccgcttcaagaggcagtcagcctgtgcctccgcaaggttgctgagtggttgaggtgcaaaccctgctgatgttagcactgtccgccaagcgatcgctttgtcagctctacgccgcccaagaactgcatcctccactctgggctgaatcagaaacctctcgatcttactgacagcatccgcatcagtgccagcagcatcaagtgattcaagaagacatagacaagactgtaagcaattcaagaagtgttgggaaaatgggaggtcgctccgatcactgccatagtcaatagcaaccacaatcttaggagcaagctgtttcaccaactgaagcatagctgggagtggagtgcgtgctgagcaaccaactgggaggcttactgcaacaacctcatcagctgtaggagcaatgagttccataggatcaaatgcgtcgagattaatagcattgaactcaaatggaataccaagatcagcagcaaactgtgagaggttatcctgagtaagatgcagctcaagcgggtggtgggaggcggctgagacgaaggctgtgagcttcaacatcggcaaggacacaccgccagagccacagcggtgagcaagctcctgcaagaacgaagcccactggccgccgacaccgaggtcgaaatcaatgacgcggatacaagacgcggttgtgctggcgatctcatccagaagcgcctgagttaccgtgaagttggcaaactggagcacgggggagaggtcggagaaggatttgtaagcggtgagcttcagggcgacgtcgagcggagacgtgagacgggtggcggcgtggtggccgtcggcgagcgcgaggaggagggcgtcctttaggtaggaggcggagcggaggaaaggcttcccaattgggggaagctgctgattgagccgcgccaatatctctcgcgcgcctatggagttgccgacttcggttgccttcgccgccgctgcaagctcgtccaggaggtgttgctgctgcgccgccgccgccgccgcggttgacttcatcgcgttgcgcggatgctgcatcgaaggctggagctggaagggtaccgcgctatgtagcgttggaaacgggaggcattgcgcgggcgccggcggcggtggctggggctggttgtggaggaggaagagattgtcgggcacggagtggtggcgcttcggcggtggctggagcagtggctgttgttgatggtcggagaaaggagggggaaccggca

SEQ ID NO: 27559 - DNA, 3565 bp, Oryza sativa
ctatgacttcggcggttgatcgggcttgttccctcctcgttccccgatagcttcaatgtccatggtcgcttctctattgcaaaaatggaatgtctctattcagttagtacgatagtagtatgagcaacaggattaccatcattttgtttaccgcgactgttgacgtcaaacacgaggcctgggagagtacaggttcaaagctcgccttcgggtgtgttagcgtgccaattgaattgatcctgcaatcaacaagaaatagaaacagagagatcgcggttaaatctataaatgatagccgatcggctaagtgtcgatgacatatcatttatctttgagccgatgtcatatgtgaatcgatcggcgactataaatagataataaagacttaaacctactcgatcggctgtagatattaccaatatatagttcttatatcgatatatatttaaatcaagtgattgggatagatcggtcgccatgccaagacaatataaatcacttggatcgaaatatatattaataacaggactatatatgtttatagcatagccgatcatatagatctagcatgtatcggctaatacttcgatactactctatatcaggatattaaaacaagtataatatatcaaacaaaagcttaatatacttaaatgcaataagatcttgacataaagggcggatttaacatgtcactgaagcatatagagcgaatatggttaaatcagataagatcggctgaaactccgatactaccctaatcggcaaccagaaggcaggctagagattgatattctaaacacgacttaatagatcaaactcaactgatgcagcattaagtatgaaaagaagaacaatatctagacaatcaagccgctggaagtttcatagagtggtggatatcttatataatctaaatcaacatcaaaatctaacctaatcggctgccctctactagcagatgttagccgattgtaggttagatagtgatattgccagagattatgtacgatatatgataactcgacgaattacgtaaacaagattagagtatcataaagatggaagcactaatcccgataacacaagccatcataacaagttttacctcttgttgaagatcgaaacgatacagctcaacccgaaagtaagaactcgtcgaaataaaactaaagcaaaaaggtggcgatgcgccgaaattgtattgaacgtgtgtgtgtttttaattacatagggctcggggtctatttatacccgagaattacaagatatgtccataccggacacgactattatctctaacaaactctaagataccacaagtctttacggcagacttttgcccaagcatatctataaggaaattacataaaatatcctaactaatagatacaattgccttcccaggactctatccatgcgtggcaattatcttgaagcacctcaacccaacccgatgtcgtacaccaagtcgtattgttggaatcggctgcatcacctaaccaaatctgactccaactcagccgatccaatcgtagccgatccggacttcagccgatttttactctgtttccgcgacaatcttcatcttcgaccccgcttcaatctaatcttcatctccgatactgatattaccaaatttggtcgttaagagtgacatatgtaccatttatttgaaattcaaattgaaacaaacaatttagttgaaaaccaatttattcatgttgaattcgacctttgctgcttgctgatgttctcaagttgagcaacataaccaaataattgttaatttttgggaaaagtttcatccagattgtcgagcccatctatctcaaagtccacgggttcaatgcaaatggccccacttgttcttaacccatttaaactttttttcctttcctgattagaggcccctagcccacatacgtgtctcggtggccaaatatagacatttattcctaaaaactttatatatagaaattttacatatgtgaactttctacctgtaaactttcgacagagaaactttatgtggaaaattttcaagcaaaataaaaataataatttcataaaagaaaaataatgtgtaaactttctattgggcttattggcttaaactagccaaaaagtggaaagtagattcaaaacatgcaaaagtcagagaaaaatgtgttctacatatctcatataggtgcatgtcatgaaatatactcttgatgagatcatcatgtgtttaaaactaaagcacaaaatcagtaactaagaaagggaatgcagaagattttttggagaagaaaactcgaaaattaacatggggggttattttgcgtgattgatcggccttatcttttcgcttatgcttatgcttatcacccaaaaattaaaatttcaatcttaaatttggagttgattttgggtttttttatatcgaagtttatttttcagtctttgcttttagattgctaagaacacgtatataaaagtcttattcataaattattattcgaataagcgaaacgatgaggcggacgtgcgtgtgcttgttcacaaagtactcttttcacatatagtcttgactttagagaagagtcctgtggaggagactacaaatcgggcatctgatttttcatcaaaaatcaagtgtcttgtcactcttagtcgaacaatgtttcaccgttaaataaaaaaaatgtttcaatctattaaatgctgaaacataggtgaatcatgattgaaacaattcgatccaacaaacaaaacatcaagcttcaaccgttaaaatatcaagggatatgcacagatcgatgaaacaatatcaaactatccaatgcaacatttcgatccaacccaaagaaacatcaaagatacattggttgaaacatcgaaaaaaaatgcaccagtctagattgagcttcttcctcctctccggtgaccactggctcatttggtttccgttgcagatccacactgggacgtgcaaggctcttctactccaccgaggagggcaaccacagctgccgagacactaagcccttgtcaccccaccattgtgccatcgtcactcagacgaacggaggccgcacccaccagagagctgcggggaggacgcctcactggtcacggcaatcataaccgcttggtccgccgcccacctacatatatatggtgattcgaccaaacaactgaaaaatcattgtagcaatttagtttttctaactaaatgaaaaaaggaaaaagtacggattacccctccctaactatcacggtcgtccgaattacacccctgaaccataaaaccggatattctttaccccgaactatgcaaaccggacgaattaccccctcgatccaatccgcggtggttttggtctacgtcgcatacgcgtggcagtccagacggcattttagttattaaaaaaatgtgggacccacctgtcatacccctataacactattcccccctctctctctctcctctctctctcacacttcctctctctctcctctcactctctgaacgcgcacggcaccacggcggcaggcggcggaggaggcgaggcagcag

SEQ ID NO: 27560 - DNA, 3665 bp, Oryza sativa
ccgccgcccacctctcgcccttgtgatgcccgtgagagagagagagagagtgaagatagagagaggaaggagaggtatgacactgacaggagggtcccacaatttttttagaaaaaaattgctgactggactgccacgtgtacgccacgtagaccaaaaccacctgcggattcagtcgaggggggtaattcgtccggtttgcctagttgggggtgaagaatgtccggttttatggttcagggggtaattcgtactttttccatgaaaaaatggaatcgttattgtttagaattagaacgcacgttcatatcgtcgtcgctaaatatagttctttcctttgatgtagcccatgattattattgaacacttaccggagttgagaaaaacaactcggttaatcctatttagtggagagaaatagataaatttgaaaaaaaaaggaatacacaatcctaaatatatcggaatattttgatttaaattgaaacacatattttgggcccctaattttagggatctatacggtcgcatagctcgtatgtgtgcagagatgggcttgcacgaaattaacttgcactgtactcctagaaagtgaacaagcatttcgagatttctttataagggcttgtttgttttggaggaatttaaacacatataaataggaagaatggaggaatataaatacatacacacttcaattcatagaaattttccaagatgtttgtgtggataaatttttttctatgttttctcattacaactcgtaccaaaggaaattttcctttagctttcctatacctacattattatgaaccgaatgacactaatagtaattaattctaagtaatcgatttccctccaaactgaaagaaccctaaatcaactgtcattccacgagtaaaatatatcttgcttatataagtagccaggtgaaatgtgaattgtggcaagagagcaaatatcttttatctttttcctcgcagtgggaaaatattctttatcttaaccctcaactgaacagaaagttactttgttgagtaaaacaacacaacacctttttttttcatgtacttcatccattttaaaatgtatgacgccattgactttttcataaattttaaccatttgtactaaaaaaattatatggatatcatttattttgttccgacttgttttaatatcaattaaaaaaataatcttaacttatactttttacatatttatattaaatttttgaataaaacgaatggtcatatattgtgcaaaaaattaacgacatcgtacattttgaaaatgagctataattacgactggttcatctttttagaattagacaggagtattaagaaagtaggtgtaattaaatacgagatgaacgtgtttgcttgaaaagagaaaataggtgaagaatttaaatggtaaaatattatgattagttaagaaaaaataggtggaaaaattgttatattttgggatgaattctaaagggatataaatggttacttcaggttataagacattttgattttggtcaaagtaaaactgcttcaagtttgactaagtttatagataaatataggaatgtttataatactaaattaatttaatcaaatcaataattaaatatattttcataataaatttgtcttggattgaaaatgttactctttttttataaactttgttaaacttaaagcaatttgactttgatccaagtcggtggagtatacggagggagtacgaaatttcgggcctgtttggtacagctcaaactcctaaatttaactccaggaggtggatttggagtggagtccacaactctagtttattttgtgagagagcttcacccagctccactcccagttttggtggagctgaaactgtttgactgggctgaagctagagctgtgccaaaaatggccttccggtgcaaacttcgaaactccaaataccgcgccacgcggcagcctgaaaaataaaactggcgcctcccgtacgaaatttcgcacctgtcccgccaaatcaccgatccgcgcctcacgccacgtcagcgattcgcgtctcctctcgccatccagatcccaaccgtccactccctacccatccaacggcagccacctccccactccatcctctcgtccccttttaaaaccccctcccctttcttcccccaaatcccactccaatcaccaccgcttcttctcctcctccatttcctctcgttcctctctctctctctctctctctcgtgcggcgagccaccggaatcgtcgtcgtcggcggccatgtcggggcgcggcaagggaggcaaggggctcggcaagggcggcgccaagcgtcaccggaaggtgctccgcgacaacatccaggggatcaccaagccggcgatccggaggctggcgaggaggggcggcgtgaagcgcatctccgggctcatctacgaggagacccgcggcgtgctcaagatcttcctcgagaacgtcatccgcgacgccgtcacctacaccgagcacgcccgccgcaagaccgtcaccgccatggacgtcgtctacgcgctcaagcgccagggccgcaccctctacggcttcggcggctgatcgatcgtgcctccatcccccatctctcccatgttgtctggccgtggaatccaccttgttcagttcgccgtttagttttgtagggtttacctgaatcatgaaactgtgaagcagatgatgtttgcacctgggatttgaattgaaacatgtttcagggccaatgttatggatctgtcctcttgttgatgtgcaatttgtgttcgtccttgtgctgcacgattattctactaggccttcgcgttttgggttaatgcgatttggttaactttgaggctgagttcgatataggttagtggtgttgagattataggcatataatgatttaatttattccataaataaatcatgacattatagatgaaaattagcatgaacgcatcattagatctacacatggaaactatacagtataacatgaacagatcaaatatacgcaacatattgaacacgtaccgaggtggtggaaagaccggctgctcggtcgaaacttttcgcaggcgtctacgaaggcacgaagcacgtgagcgaagaggaaggcgagccgtcgcgaacgaacagggagcagtcgcgcgaaacgcttcccaaaaaccttattgccgccttctcccggtgcaggacgtcgaaggcagaggttccggagacctgctctcccaatcgccggtgcacgctggcgagcgggatggagtagtctatgagcgacggcgcagtatagagtaggaggcaaaccctagattgatttcgcgtgtgttgcgtgaagacggcgagtcggtttatatagagaagagtcgcttgatcagggcgcccgcatgatcttcactccacgcgtaacttatccggactccacgccgtttgcacgcaccggatttttcggaacgtttccaaaacaaaaatgaatccgaatttgcagcaaaacgcgtgtgttgcgtgaagacggcgggtcggtttatatagagaagagtcgcttgatcagggcgcccgcacgatcttcactccacgcgtaacttatccggactccacgtctcccaatcgccggtgcacgccggcgagcgggatggagtagtgacgagc

SEQ ID NO: 27561 - DNA, 9374 bp, Oryza sativa
gcgtaacccatccggactccacgccgtttgcacgcaccggatttttcggaacgtttccaaaacaaaaatgaatccgaatttgcagcaaaacgcgtgtgttgcgtgaagacggcgggtcggtttatatagagaagagtcgcttgatcagggcgcccgcacgatcttcactccacgcgtaacttatccggactccacgtctcccaatcgccggtgcacgccggcgagcgggatggagtagtctacgagcgacggtgtagtacagagtaggaggcaaaccctagattgatttcgcgtgtgttgcgtgaagacggcgggtcggtttatatagagaagggttgcttgattagggcgcccgcacgatcttcactccacgcgtaacttattcggactccacgccgtttgcacgcaccggatttttcggaacgtttccaaaacaaaaacgaatccgaatttacggcaaaacacgtgtgttgcgagaagacggcgggtcggtttatatagagaagggtcgcttgatcagggcgcccgcacgatcttcactccacgcgtaacttatccggactccacgccgtttgcatgcaccagatttttcggaacgtttccaaaacaaaaacgaatccgaatttgcagcaaaacaaaactgcaaaaggagcgcaaggtgaggaaccaattttggcggaccattcgacgcgtacgtcgtgcacgcgcgccgcctgccctgccctgtcaggcgaggcgagcgagcacgcgcgtgtgttctcctctcttctctccaccacacatgcttcaagtagctaggagggcatcctcccttttaaggaggtccccatctcctagaataagcaatgtggtactaaactccacatgcatgccatcccatgaggcgggcttttgtgattttccaaagaattaattttcgagtgggctaaggcccattcattaattccaacaagtggttgatatctagctacattgcagttcgatatactccccccattccaaattaatctacatattccataggtacaccaagacaaaaaaaaagctaataactctctcattctatatttactctagcaataaactcaatgcatgcaccatccccactattttctagccaatagcaaattaaaatattgcatgtgggttataaatgcttgtgtgcatggatgcatgtatcaatgtctatttactccaatgcacaaataacgaatagacctaatgaatgaacacaaatatgtagatcatttaggaataacctcaaaaaaattatatgtagatcaatttggaatggagggagtagtattgatttgaccatcgttgaccaagaataagaacagcgaatttgcataatgtcaaacggtgtctgagtcgctttaatttgacgatagatccaattcgtttaatatttcggacttcatatttctgttactgcagtagcctttgggttccttcagcaaattcatctgtgcttttgtttgtatatttctgttactgcagttgcatttgtattccttcagcaaattcatttgtgcttttgtttcagttggttctagcagttgaattagcctgaaatccggatagtttcaggaaatttcatctgagctttagtttcaacagacctccgcaggaaaattttaacaacagtgagtgagtgtgacgcactgacgctgcacttggcagttggctcttgcacatcactctcaattgcaatttctgaaaatggcatagcattgctcagagtcacaggaattcacttgaaatcatatcaacattagggcagagattaatggaatagcttcaaaacataaacaaaaagaacagccgtttttttttgtggagaagttgggtccaaatgggctgggcccaccaatcatttatggcccatgggctcaaatctaacggcccatgaacgcatctcaccgtccccttctctctcctccgccgcctcctcctcactagtgacgacaccacccgaccaaaccgcaaagcgacgcgacgcggtaaaaaaaggaatcaaaaaggcgaaaaaaaatcgtcctcctttccgtagctggcaacatctccgcctctcctctcgcttcccgcatcttcccacacacacacacacaaaaaaaaaaacctcacgcgcgattccaatcctccctgaatccaccgcgcctttgcctaagggtttcgattcgttcgcgtgcggctgctctccccccgatcgatcggcttctcgcctcgctctcgacgaatcgaggtcgctagctcggttcggttgtgcgttgcgttgcgttggcgtggcggcgggcggttgaccggttcgctagggttggagctccgggagggggaggaatgatggcgagccacggcgccggggtggtggctgctggatccgatgccgctcctgccgaggtagatgacgcgcctcgtctgatgttctattgatttttgaatttgttttttttttgaatatgtgatcgtttatttagtgtctatttaggatgcaacgaatttgatattatgctaattactgtaccaaacttaagctaatttgaggatgtgggtgattggtagaagtaaaatttagccaagggaactaaactattcatgcaaggtggcttcgttgaatttttgcaaagaaaaattagagcagaagtttgatcggatttgaacgtctttgctatgcgtagaactacatgttaattctgagaatctatggttgtatggaagcctagttgtacgaatcattctagttgcaatatagtactgacttaaagcattttgccaatgaattactgaaatggttaaagctgcagtgaggatgaatcttttggtcatggcttttgtaactaagttgctatgtgcattatgccattatataaatgatcatgagttcatgacccctttatttgctaatggcaggtcagcattgtggggcagacaaatccatctacttatccacctttagctttagggcatcattcatggtcctcttcaactggggcagctacagtcccgtggagctatccagtgaacaatcaaagccaagatacagtttactatgatccacaaagggatgtttcggtttcgggagacaatcagagtgtggcaagcagtgcacctcataatgctcagccaactatgggcacagaaaatgcgactcattctcacatgccttactcaagttcacttcaacatgggtacactgctgcagaatatgcaaactattattatagttacccacaaactacaaatggttcttctgtccagcaaggaggaacaaatcaacattcaggtgcagctcatcagcctcttacttcatttcagaattcagagtcttacgttggtcccacaagtaacacatattacaatgctggtggtcatcagactgctccaggatatggaactagcaatagctattatcagaacagcacctggaatggtggaagctttgaaaataattatgctcagtcatatcagaactacccgtcatccaataccaacacagtacagcattccatttcagtgcctaccaattctttctcataccaacagcagtacaaccaatggccatactattacaatcacaccgtgccaaatcctgctggtgatccagtcgggaacagtaactcaattgttaacactacttctagctactcctatcccagtatccagccacctcctccaggaactacatcatggaaaagtaattcaagttcttctattgcgcctcctattcaggtatattccttcctttctatgtatatcgctactaattgtacatagccttcttggtcacaccctggacatttattgatcatgggttttaagctatctggttatgttgctattttgggacaatcatttctttttttcgatcaacagatggtgtttacttattttgtgttgcatatgtgttatgcctagtcagcttatctcaaattcaacttcctccgcttgctgtgcatctgggtgcagcattcttttcgatgagtttcgtgggctataaacacgctctttacgatatggaacatcagaatgcatgatgattgtttccgtactttgttcatgtagatttggttggcactagcacttctctttgtgtttgcatggagaagtttatagcacattgcatactaagaaaatcatctgtaccgtatgaaggttttttgttgcttgtaggtcttgaagtgtcatgtcttttctgtcttgtttgacttgtggcaattttcttgtgttctttagctcgctacatagattgtttcatcatgagaatagaaaataattatatctaaatttcatctacctacaggcttcaggtggtccagggcctcaagatcaatatatcaaccaggcgcacgctccggtgttggaaaaccagtatgctggccaggtagcaggtaacccaaggtctcaaaaccattatgccagccagacaccagcctgcccacagagcactgtgaatttgaaccccgttcagcaaagcaatcatggcgatcaacaaaatactgtaggttcaaacggtccaaactcaaatatttactcagtcgaccatgtatctgaaaatttacacccaaattggcaggtttttattgcaaccgaaaattcaagtgaaaacaaaatgcaggttcctcgaattgctccaggtttttctatggtaataccaaagagcgagaagaaaattttaggtgctgatttgtcaaagaagcctgcttatgttagtgtttccatggtgaagaatgatgctgtaattttctgctcttcttttcttcatttctggcacatgatgttctaactttctaaggctattttttttgctcatatggaaaatgactatttggggagctattggcatataaaatgattcattaaattatatattagtttgttagttcaaactcatgatatttaaattcgttcgatgtctatgagaatgcattggcttattccttggaaaaccagcgcaaaaagttagcacgtattatgcttatacttaatcaaggaagatattggtacttgcatattcaccacctacttttctattctcatgtttagagatcactccctttttcattacataattatgctacgaggaatctcaactgttgcaaggatgaggcccagaaggctgcttgccagagtatgatagaagaggtaaatctctgttatattgttttggcgttttgttagttgccagcattttgttgtaaaaaagattggcatcgtggctgttgccaatttgccattcacaacaaatggctgatcacagttttctagttgaattcactccagttattgggccagcgattgatgtggtgcttcattcatatgttttcctttgtttattttgtggttcttttacgtcaatttagaatgatgtaaattcgttgactctgtatctcagtcttgttatcttcctaatataatatcagataaaaaacagcgccattgctgatggaacccttcttactaagaattgggacactgagccactgcttcctttggtacaaaatgttgcaaccattccagaaacaaggtttgtgcttctggattctctggacagtgataatgtagtgttttgagtacttaactacgttgactgatattttttatctgttgttttggacttatgttgctatagaattatactttcgggcaaccagcaccatgcaatgaatgaaaattccagcttacaccttcttaacagtgttatcttctgggtaatttatatcagaagtgttatgatctaagcaaatatcgcaaaaaaataatttatctataataatagtaagatgccttcagatttatataattggatatgtctcaactgtcttggacatatgttaatcttattgggcagtatatggtggaatcatggatgtatcatttcatgaagaatatttaaaatcctatacccttcctccgatttctaaccatgataaccctagaaaataattaagatgtgattattgggaattggtttttgggtgcagaactattcatatacttaatcaaatgtttgcattacatagatactgggttaaaagtgatccatctaattttgccacaaactactatgcccaaattcgtgttgtaggcaaaattaggattccttcctttcactaaagaaagttttgagtcattggctcattgctgcttctgtgctatgcagaatcacatatttctgaattaactttttgctatttgttttccatatagcagtgcaaacaattcaagtccctccttgtcgacatctaccaataggagacgccaaaaaagtaggtgggagcctgttgtggaggaaaaggttacagataaggtggaaccggtaaaagggttggtgaatggtaccacccacaataatttggaagccaaaaacagaatggtaagaaccggcatgtgaactcttgcaaaatctcatactaatcagtcaatgtacaagaggaacagatttccatattttaactacatgtatggctttccatttctgaattgccaatatcaaatacctgtgttattgctctacttagtatttgaaatatttgaatgaatgccatgcagagtaataactgggattccagaaaatttttccagtctcatcatgcgactgcaaacaaagtcagtcagcggcctgccaagaagcaaaagatcagcagttactcagatcaaatgcaaaatggaaatgcttcaagtgatagtgataaggagcaggatctaaccaaatattatgccagtgcaaccgcactagcaaattcacctgaggagaagaagcgcagggagcataggtcaaagcgttttgagaagaaccagaattcatcatctaaatcgaggaattctgcagcaagtaaagatgtaatggctaatatacatgcacgaagagctgtttcagctcttcttgccagaagctgtgaagatggcactaccttggctgtggaggatatggattgggatgcattgacagtaaaggggacatgccaagaaattgagaaacgatatctccggcttacatcagcacctgatcctgccacagtaataaaacccaccaactgttgtcctggattcttaattgaaaagcatcaatagcaaatcttttttcttttgcaatttgatcatatctactgtttcttctccttatctgaataatgcttggcaggtaagaccggagcatgtcttggagaaggccctttccatggttgaaacatctcaaaagaattatctttataaatgtgatcaactgaagtctattcgccaagatctcacagttcagagaatccagaatgaacttactgtcaaggtatcctcttctcatgaatcatgatcctattgtgcttaccacaatgtgttagcaactagaaaactgcagttcctttataagttacttctgtcaagatatcaatatcatattagttatgctgccagttactattactgaccataagaaaatatttgtaaatgctgtgcaccaggacttcagttatgccactagtgcttctaacctttaggtttgttatttcaggtttatgaaactcatgcacgtttagcaatgcaggcaggtgacctacctgaatataaccaggtatgctttgttatagtttattctcttgggatatcaaataattgtgtttgtgcatatgctcaatatttctgttgcaggacatagttttgcaacttcatcttcatgtttagttagataacatgcataaagaaaatagaggtcaagtaattttctatcggtgggctgacactgacaatcccaagtttggtcccacttactactccctctagtcacaaattagtaaagtagtaccattttagaattttcaaggtcaataatgcataactttaacggcttaattcttttgcataaatgaatccaataatagtcgcatagtgtaatatcatgaaagcttttatcattttcgtatacccaaaacatatattctaaacaatagtttttttttcaaaagttaacttctgttgacttcacgggttctaaaacgacacttatttttgactggagggagcttcagattaccatgtggagtattgatatggattagcttcggataggcttttgaagaccaaaggtagagcactgaccttcatctagccgccaacatggcttctacctataagctagagaggctctgaagcttagttttactttggattttatcatcgtgtaacgaaaagagacaagaatgcatccttatataataggataacttaaaccctaagaaaattatcttcaatattcttatggaatagatgatactaataaatctaatcctatatctatagaaaattaatcctcatggtgccacagtaaaacgtgtgaacagtaccaaagactagtccttggggccataagcccgtaacggtactgctgtttcacgaaagttgattgtcattggaaactgcaactacatttgtaaattagaaaatttatgtttgcaatctttgtgcaaaaaaaaaaaaatgttaagtgatgcatgggtattgtagttctaactgtttatgcacgcaacatctcttgcagtgccagtcacaactgaagaggctatatgcagagggaatcaagggctgttactttgaattctctgcgtacaatttactctgtgtcatgttgcactctaataataaacgagacttgctgtcatcattggcaaggtactattttatactagtacactggcagaatattgaccagtttttgttcttaaactgaccacgtttgacatactcattattttcaggttatcgaaacaagccaaacaagatgaagctgtcaagcatgcccttgcagttcattctgctgtttcatctggaaactatgtcctatttttcaaactatacaagcaggcaccgaacttgaattcttgcctcatgggtaaaggactaaatactatctgtatcaattcaatgtgcttctgtatttggctaaaaaatctattctgtattcatgaaaaaattgatgtctgttgaggatcactttgacagatctatatgtggagcgaatgcgttttgaggctgtaaaatgcatgtctaaatcatatcgcccgactataccagtgggatatgttgcacaaattttgggattctcaagaattgatagtgaagcatcagaagagtgtgaaatgtggttaaaagctcatggtgctattctttcaatagacaacagcagagacttgcaattagacacgaaggtactactaatctctcttagaacattgtaatgatcatcataggacagcaagtgcatagatatgaatgggtgacttattttcagtctgcacgaccagtggaagggtataatataaatataaatgggtgacttatttcccaggctcccagctaagtgatacttcctccgtttcacaatgtaa

SEQ ID NO: 27562 - DNA, 15818 bp, Oryza sativa
gatccccctgtttttttatgcaccctcatgcacaaagccattcagctagcctaaattagtaccatcattctctttctcgagttattttaattctacataagagctccaattgaatatctgcttgatttggattgtgcaaagatgcagataatcttgtattagtttgcagggatgatttcacaaattgagtccatttcatactaattgaatacttatggtgttttgctgaaatatgtgatttacctggtatattcgatagctatacgtgtacatgttttcctcgaatgtcaaccattgaccttagcgtatttctataatataatctggtaatgttcgtgcctttctttgcttggcaggcttctactactacactttacatgccagagccagagaatgccgtcgcacatggtgatgcctcacttgcagttaatgactttttggcgcggacatagcgacaaaaattgtaaccatgatagataagtccagtatgtttgtgccgatctgtgagcctgtgatgtactgcaaatgtctccagtacacatcgtgccagttatggagctcaatgaaatggagcagcagatgaagggcattatgcttccggagctttggagttggagcaaataggagagtgctgactactgagtgctcaacttgttcccgggtgtttgcacctgatgcaacaactgcaatgctcaatgcaacggtgaggcatatactggacaacacatccaaaacgagaagcctgcagaaagctttgccgctggcctgtggtctcacagaaacacagaaaatgtatgaacttctggtaacccagatcccagatacatgtaaagtgtaaaccaaaattttgagagtgaatatgtatggtacatttgtttgtacaacacacttcacacataccattttcaccaactatttgtagctaaaatatatttctaatacgtgagccccgggatttttttatacagtgtaatactcatacataggagattaagcttttatttctttttttttaaaaaaaaacctcacctattttgaaccaagttacataaaactacatagataaactacatagattttgtcacgtgacatataatccagtattatggttctgaagttttattttgtctttgatgtacaaaatcaatatattacttatatagcttatccgttagataatagggttttgtactaacatgtttattactctcattgtgggaaacgtattctccaagtctaatggtactcaaatttcttgaggagtttgcagacattatatgttagggcggagccaccgcctggcccacaaaagctctattaactttctatgctgttgaatgaattgataaaatttctataacaaattactagctctttagcaaaatgtctctggcttcgccactggttatatggtcctcgatatgagtagtttgcagcgtaaaatttatatgatttttatttatgctaatcttcagcgttagaaagaaacacgacggatctagcatatttttatttttctcatatttatattcatatatcctgatctctacgctgtggggtttcccatgtctatttgagtgtacttcctttattcaaaagagttacacgtattacttttgccattgagatcaagaaaaaaataatctgatactacatccatattttaatgtatgacgccgttgactttttatttaatgtttgaatgttcgttttattaaaaaaaattgtgtaattatcatttatttcattgtgacttgattcataatcaaatgttctttaagcatgacataaatatttttatatttgtacaaaaattttgaataagacgaatggttaaacattggataaaaagtcaatggcgtcatacattaaaatacggagggagtatgtaacaaagatttagagtgtatgcatgcatgcatgcatgcaaccaatttagagtctaatcgaaagtttaatttatcttttaatttaagtcttgaatgaatatataaagattacaaatacgatcaacttatttaaaaataataattaaaataagtctaccacttttgagtggaggaagtacaactctaacgactaacctccacccggttttcttttcttgcgtccgcccttgccatctccacgactccaccggaacccaagacagaggaaccaggagccgacgcgaagcgaagccatcatcctgtggttgtgtggcacgaagagcaggtgtcctgagcttgaccggctcgaatggagaatacggcgaccaccttgcaaatccggtactactgcactgcacagggaaagggagaattaggtgcagaccgaaagaaagcggatttcgtgacaaccaaacgacaataatgctgcagtggaactgaaagattccagaacctgtggcgttagttggtaaccactgggctaattgcattatatttgccggcaaccaacctgctgtccttagccggcagcgatttcgtgaatggcactatggatacatggatggtggtgttatggtaagtaacaatttcagacatgcagcgaaacctgaacattctgtttgaactgttcgttcgtatacaccatattcctctctctcttttttcagaatttataagcatgggaagtaagctgtggtaaattttggagaaaattgttggattgatacgaagtttactggcctcatcgaccgtgctggtgtctgagactgaaacgacgccgaaaaggagcagagccttaggttatgcacattttagatcttcagaagcattggtagtcctctgaaaaaaaatgcattggtggtagagctcacgttacttaaaacatgaggagagatacttgactactatttcctctgtttttctaatagataatgcattaacttttgaacacacgtttgatcatttcgtcttattataaattatgtgcaaatgcataagatataaatcatatttaaaatattttagtaataaaatatctcacaacaaaataaatgataattatataaatttttgataagatgaatgatcacatgtatgtgcaaaagttaacggtatcatctatttaaaaaaaacaaatataatacttatcaaatgtactggttataatgactgaaatatatgccagtatagggagactaccttcaatacgggcaacacaactcacacgaactaaagaattaactggggatgaatcattgggctcaccgacgagatcttgccatgccttttccaccaactttggtagtcattatagtggttagggtcttaataattttcaaatgctgttttcaattggcaccaatccatgcaaaaaagactggagagtgatgtgctaccaagcgagcaagttgccctgttgtcccatccattacacacatgaccaacttgagaccagcagtgctcactctaatttcaatttgggatgctgtcctgcccctcgtcatgtgaggtcacatgataccatgaagatctcaaactacaacgtcccttttttattagatgatactgctgttttttggacacacgatatgaccattcgttttattaaaaaaaattaaatgcataagatataaatcatatttaaaatacttttagtgataaaacaactcataacaaaataaatgatagttgcataattttttttaacaggaatggttaaacatgtgtttaaaagttaacgacatcctatatcctatatacctatacaattcatccccactaactctaattctctcatctcacagcttgccacatcactctaaattagtctaaccattagatttgcaatcgatgtcttagattttcactgattaggatctacagcaaaaacatcaagctccacttgagtacctccatgtctcccaagcgctttatctttcgaaactgccagttttattacccactatgattacttcttaatgactgatgtgttcacagaatcaacaggtagcatttgtttcctcttttcttgcttttcctttgcctcttccgatcgttctcctttctattcctaatcttggtttccttcgggatatgttttccctcgctaacactcttcagatgaatgcagaaatctactcgattcaagattgaatggtgaactctcgagcatgagaaaaaagcccatacaggatagtactgctaatctttttgtttattaattttgcattgttttagacatggtaagcgtaatataggtctatccatgttctcattttcttcaagtcctatttgataaaatagacatactttatcatcttccctgttttacaagagctcttcaaacaaagggaaaaggactactaaaggtaactccttgcctggcttcatgaaatttctgctttcactggaatctcactttgggataattacgtctatgcatcaacgtgtaaatcaggccattagtataaattacattcatatatgtgccacgtgttgctatattagttcttaaatgtaccgtctatttcatagattttgttaacactgacacttcgatgatgcaaatgataatacaaagtggtcgttattttgcgtgcttttgctatataacacattctcttcggatgaatatatgtgttaggccttgtctaatatttttagataatgctataggcaaatcatcgaactgagagatacaaacaccatatttaatcttgagtcaatatatgtttaatgtttagaacagagcatgagagcatcaactatttggatattcatggagcacattcttcacaacaaactagcatctacgtcaaagagcaattgccagatcgtacttttttttaatatacgacgttattgactttttaaatatgtttagttatttattttattaaaaaagtatgtagttatcatttattttgttatggcttgatttattattaaatgttttctaagcatgacttatatttttatacgtttgcacaaacaaattgaataaaatgagtagggaaacgcatataaaaagtcaaatgtgtcatatatttaaaaacatatatagttatttttagcacattagtatttttcttctgtaatttagttaataagccttcttacatttttataagtttccgctgcaacgcgcggggtatttttctagtttaaaaaacaaaggtaccccagtgttttatatttcagagaggacaatttgtacataacaaatggagagaacaatgcaagtaagagaaaaatgggtgattggacttggatgcatttaagtggtcattgacaaaccatatcaatagaagggttgatcatcacatcaaagaactaactgatactactgaatgtatagtactccgtataacagaaggagcacctgaagtcaaacatgccaagtgaaaggactgtctaccacacaaaatgcagacagcttgaagctttccctaagcaataatacatgctgaattaattccttccttccacattgccctccaagcaagaaaacaatggagaatttgtacacaaaatgcagacagcttgaaggtttccctaagcaatagtacatgctgaattaattccttccttccacattgccctccaagcaagaaaccttcttgtacatgtccagtttagtatcctgagtctcatcagtaaaatttgaagctacaaggagagaggaacaaaacaatcttacatccctgtagtaaatacaagacaatgagctatattcctgaaatttgtatggtgtgctaaatctcacagggagaagagatcaaatgaacaaggtgagcagattttccaattgccaggcagccgccattgctgcgaatcgccgcaactcatcaaagctcgaattcctcttcccggagcaccatctcagcagcctcctcctcatcttcgtcgaacgaaaagtatctgctcctctcggccggtctgaatgtgtagaacatgaagaggtagaatgccaatgtggccacctcctcggccaagacgctcacccaccggaactggtaactggcaatggtcttgagcgcatacacgacgatcctagtgaagtataggtaaccgatcaccacaatgtagaattgccggaacagggtgagcttcgatagagtccgcgctgccttgccatcagtcttggacgtctcccggagcgatcgcatcgaccagacgaccgggaagagcacggcgcagcagcaggcgacgtcgacgaacagcaagatctggttccatgtcacccacccttgcaagaacgggccggtctccccaatcacggcggacgcgatgttggccatgacctgcagcgggatcaccaccatgagcaccttcttctccctgtcctgcaagaccggcctgaggaacgaccaccccgtgccgacgagcacgatcaccgcgaacaggacgacgcccttgacgagctggaagaggtagaacgcgacgtcccagccgtgcggcgtccccgtgacgcggatgtagtgctggtcctcggcggcggagaggcagtagagcaggcgcgcggcgaggaggcccgacatgaggtggtggatctggtgcgccgcggcgcggtggtcgcgggaggagagcgtgaggtacccccaggcggcgaggaacgcggcgtagcaggcggcgaagaagccgtagatcgccggcacgggcgcctggccgacggggaggtagtcgacggagccgtcggcgtttccgttgtacatctcggtgcgcaccctcatggtgacgagcgactccggcgcgcagttggcgaagtagaggctgtactcgtcggggtgggtgaccgggaacgtcttgttgtagtggccgcgcttgaggtcgtggaaggtgaagagcgtcttgacgtaggggctcgtgaggatgcagcgggagacgtcgggctcgtcggcgccgccgcccgccacctcctcccgcttctccggcggccgccgcgctgcgcctcgtagatggcctggaacatcgactcgtcggagaggaggaagaacccgagctgcttggggtccgggcgggcgaacgtcgaggagatgccggcgccggtgatgacgatcctgaccgcgcccgtcttggagaacccgaacttctcgaacaggatggtgggcctcgggtcctcacggaaggcctccgtcctgatttccgccgcggcgcggggcgcgagggacaccgccgcgacggcgatggcgaggaggaggaggcggcgcgcggcggcggccatggctgcggcgagatctgtggcgcgcggtgtgggtgggtgagagaatgcgggggagaagtgtcggtgtgcgcgtggcggggcgaggtgagcggggggtgcttatgtggtggggcgcgggagggtcggatgcgcctcgagattggtgagagttcggtgtggggaggttgacttggggagaacgttggctactactcgccaattgtttgatgaatttttgtgctaaaattcatagaagaaataataaattattgggcatttaattttatatgagaatattatttatagcccaattttactgaatacatgtgaggcgtgtctctgtgacgtgtgggtctagaaaaattcaaatatcacataatgtccgaatataatcaatattgggctcgttttgttgtacatttcaaatagaaaataatggttcgaataaaattcaaatttaatgcacaattgaagagatataagcttgaaaagagaagagatccactagtactagcagtatacccattaatcggtttgttacttcaccggtgggtaattatcactggtaacaaattcaaataagacgtggggcccaccgtcatcagccatgttaatctcagtgattatctccgacaccagcaactctatccgcatgcatcaggtggccggcatctgcatgcgtcgcacttatctgcagtagcagatcgatgaggccaaaacagattaaacgcgttatcacgctcgattcacggagaattagcgaggccgttgtggtcatcgctgcctacataaagcagtcgacccctcgtcgcggctgggggaacacacggcacaagcgctgcgccattaaagcagcaatatgccctagagaggtgaacactcgcacccacacaatattctctacatcgtagagagattagaaagaagatgcacgcgcatgacgcagggtgcgtgatcgcggatcagcaacctgtagtcgccggcgctgatggcatctctatcggcgagtcatcaataacaagctaatctcgttctccgtcaagttgcttatccaatacaaacacaacaacgcccggcattatcttctagagggagcaaatatataccgtagtgttgtgcagttacacagtccggacggtaaaacagtaaagtggagtatcgatgaatatgtcgtggatgcgttgtgaacttgtagccatggatataagtatccccagtggcgcatgcacacgcacacgtcatctttgtcaagcgattaatatgggctgcaaataaatataaggcgagcttgaccctcgtgggggttggactgtctaaattatcaatatcaaatattggagctggatatttatttgtataaacttgggatgagtttgagacttattggtatcagaccaaccatgatttatacatatttttattcatgcctgaacaactatcgatttgcctcgtgcatgtcatgtacgggagcaattccttctctatccaaattctaccatatgagcgggagcaatccccacaattcttgaagacaacaaaaacaatgctagctaggagggcgaggcatgcagatttaaaatacacgtcgacaccatggccgagtatcgacgagatgaaatggtcgatttatcaatatttgtgctacgtccgagaccgacgaggccggacaacatattagctaaagctaacaagattggagccattcactcattccatctgtctatgactgacgaggctagacgaaaccatggccgagtgccaacatggccaggtcactatactattaacacgtctaaattggacaggaaacggatacaccgttgctgggcaccgacgaggcaaaagcaaccacaaaatccatgtttgatgaaggctagggtacatgactgggcaccgacgaggcaaaggtcacccgcttcaccaaattctctccgcacaccgacgtgatggtagtgtattgtgaccgggttttggcgaaacaaagccacctgttccacattcactatattcaacgttaaatctgcaccaacctcaaccttcggcgagtaattaattttgaagacaacgatcctaaagcgcagcttaatcggaggtgttccataggctcgctcatgtggatgtaattaaccggtagccttattgctaggcgccgggaatcagcggactgtacgcaatctcgagtcagcatacctttccattaagcatttctcgtgaaggcaaaaggcgaactcctgcgggagccatcatgtatttgtaaatattcatgttaatgaatcatgattaataaaatacagggttttcctattttctgtgtgttcgtggttttgttttcatcaaacaccaataaactcctcagctatatatagatcgtttctttaacatatgataaattagaagtagataaataaaagaataaagggtgatccaaagtgtcgctgagataaaattgtctagtctaaaattaaaacattggtttgaaggatgatccaaaataaaacatcgggaataaaaaagatagtatgaagtgaaatttactcgtaaacaaatctaatactaatactccctccgggtttataatactcgtcgttttgaacaagagcacggtcttcaaaaacaactttaatcattattatttattataatatgtatataaatgttaacaaatatataatttaattgaagtatttttaagattaatatatacatatagtcaccatagtttaaagacaaatattttagaaaattttcataatcaaagattttaaagtttgatatcattcttgtccaaaactttaaagtttgatatcattcttgtccaaaacgatacgtaaactactctcagctcggagggagtacgaaatatgttagtacgatgcagttttttctcatttttacgctactaatacatcagtggggccaaatgaaaccgcatacagtgctaatcaccagaaaattcacaaagcaccagcacctcctccagtaactgccgatgccgacggtttcgatcggtagtcctgccgatgccgacggttgagaattgtggtactggtggcaggtgtgtgtgtgtgtgttgcggcggtcggagcgtgaccagctcagcttcccccggcccccggggaagtaaccggccagctgaagtgcgctcggcccgcggttctccaccggtgcgcaacggcaaagtcgacggttcggctgggttgctgggccgctcatcgcacgaggccgttcgactgcctctccccctcaggattttgcctgtttgggccgtgcacatcaagcccgcgaactctgccgcggcgagtagttcgcttcaggttggtttggttcggttccaaattccgccctactaatttattggtaatttttaatagtatttctagtttttttattaatgctaaattttaacaatatatctctttagatagtaaaagttttagccatctaaatttagtagtgccaaaaattatctaaactttgataattttagtatggcaccaaaccaaacttgcccttcatcttcaatccccccatccccatcggtgccacgccgccagtcgtatccaaacttttctcggaccacaatcccgatgacggtcgcgtacggcgggacggcgacggctactggaaagcccacgaggaaataacgtacaagttcacggtgacacggtcgcgcacacagccacacacacacagggtcgcaggcacagcaccccggttgcgtcacggaaccgaccggtcaccgcgtccgcacgtacggagaggatggcatactggcatattccccgcgcggtgctctactgctcttctctccggaagcgccggatttcgtcgaacgggtcgaaacacgcgggcgacatcaatacatcatatccgcacgccatttggcttttgcttccttcgcgcaccattccatcgcgcgcacgagcggggagacgacgaagacgaagacgagccaggccgcgagggcaggatggtgatttccgcggtcgcggtctcgtgagtacaaacgattaacaaagttcgacgtttaggttaggtaggtcaaacgcgtgcgacaacaataatgacaagaccaatcagggacgtgtacttttttttaacagaacataagcactcacaattacaccctcaccctcatcactatgaatacatactgacatgctccttccgtctcaaaaaatactccataacaacttctcaattaacattcatttcctaaccaatcacaaccatctattattcagtttttccacctacctctacttctcaaccaatcacaatcactttctatttaattttacctattttttaataaccgtgtccaactctaaaactagcaatattctagaacaaagggagtactccacagtgtatatcatcatgttatctattattaaaaaataattaattataaatacaaataatcatatcgaatctaatattacttaaaaataactgaatatattttaaaaagaacctaaataattagggtgtagctatatatatggcgccatatttttcatcaaaaaaaagtcagcatgtatttacattgtaagtccctaaattacatatgtaattttagtgtatttacaatgtaagtctcaaaattaaattacatatgtaagtactaaaattacatatgtaaattcgaaaattacataccaattacatacgtaagtggggtgtaaatgaggtgtaactactctgtaagtggctgaaaaaaaatcgactgtagtatatggcgccatatttctagcaaatccgaataattaagctacgttttattcacagcaacgttgtatttcgttatactagtatactaatgctccaaaaggcagtttacaaaaataaaaaaacaacattatcttgtcagtactaaagtttttacacgtggacaccccatcgcacaaatcttgtggggcgcacgatgccaggctcacgtgacccgaatttttttaagcctactttggttaatctgtcccatcaccagaacattttggcgtgttatacgtcgccagaaatctctacggccacctatagcatcacgagccccagtctatggcacgtggtcccggaggacatcgtggcccacgtgccagtgacacgagcgtgcggtgcaggcggttcgcgagggtgtggatcgcatgtgtgccccacgcgatgcctcccatccaacggccacctgtccatccccaattccaacctcgacatggaaggttccagaagcttccggaaacgaccttccccatgttcgcgtcgcgtggcttctcgtcgaaggaaattttgccagaattttcgcggatatttccttcacgaaaccttggtgggagaagggagatggaattcccaatggcgtgtagaatttcaatttcgaattatgttttaaaaacggcgagaaaatgtggaatgacgcaaatgcccttctgcctcctcgcttctcttcttctcctcctccctcctctctctccgtcgtcgctgcctcccctctcgttgctttgcttcccccgatctgcagagccggaggcgctccgccggcggcgaggcaggcacggcgtggacggcctcccccatctcccgtcgccaccgcgccctagccttctcactccctcccggcccccgcgcgcgcgcgcgcggccgaccagccggtggtcggcttccgtctccactcgaatcgaattcgaggtatcatccattcccctcccgtatcccgccctcgtctccctccgccgcttcacgtgcccggcgtggcgtggactggagacccctccggcttggattggattggattggtttggttttccttgttctggaattttttaaaaatttttgatgcgtggtgcgctgctgattttttgcagtttgtttggagagaaatcgggggttctaggtgaacccccatgcccgacgttggcgcggtgatcgaaggatcctcgcggcggagatgaacgtggttgggcgggtagggtcgctgatctcgcagggggtgtactccgtcgcgacgccgttccacccgttcggcggcgcggtcgacatcatcgcggtcgagcagcctgacggctcgtacaggagcacgccctggtacgtccggttcggcaagttccagggcgttctcaagggcgcggagaaggtggtcaccatcaccgtcaatggcgtggacgccagcttccacatgcagctcgacaactctgggcaagcctacttcatgcgggagcttgtgcctggcagtgaaaattctgggacaagttcggaggaagaggaagctagctgtgagcctgaacctccggcgcggagtaagagcgacggggatctttacatcggagcgaaaggcagaccaggtagcccggagtcgaatgtagagtgtcaagagaagcaagctatagaggagtttgattcatacggttatagcaggatggaggtagcggaagattcggcaaagcaacctgatgggagcaattcagagatggttttggttagtgtggatgggcatgtcctcaccgcccccatttcctcgaccgaggagaatgtggaggatgtgcagctaagtgaaccccaattccacttgggacctggggagagctcaagtggtgatttcagccgcagtggtgaggtgtgggaagctggcattgtcggtgatttatacatgccacaggaaaaggttaagtttgattctggaaatcaacaagaggctttggaagaacttggtgatgtaccaattgagacggataagtcacatcatgtccctgttactggagatgaagtgctccatacctcagtttatgaagatgtgactagtgcattgaccaatgaagtcgaatctctagttgtcccagagttagggaataatgatgaggactatcaagccttgatcaatgtagatgaggtccatgacatctcagagaacaaaaatgagggttgccgacccccttctagccaatatgaggtttgtgatgtctccaagaccgatgatgagggatatcagcccttggccactgaagaacttggtgatgtaccaattgagacggataggtcacatcatgtccctgttactggagatgaagtgctccatacctcagtttatgaagatgtgcctagtgcactgaccaatgaagtcgagtctctagttgtcctagagtcagggaataatgatgaggactatcaagccttgatcaatgtagatgaggtccatgacatctcagagaacaaaaatgagggttgccgacccccttctagccaagatgaggtttgtgatgtctccaagaccgatgatgagggatatcggcccttggccactgaagatgaggctcgtgatgtctccaagaacaatgatgaggggtatcagcctttggccactgaaaatgaggcttgtgatgttccactgcttgagaatgacgaggcttgcagggtgccagctaatgtagacaaggtttgcgatgtcagcaatgaggacactgagttagaaattgctagtcctagttttggtaaatatgatacttttaaaagttgcttagacctctcatcacaaatagatgacggagattcgggaactgaaccattttctcctgaatttgatcatcagcagggttttgaatttagtctgagtaatcgttctgttgttgacatagatctggaggaagatataagtaaaactacccactgtgatcgaaatgatccattacagtatctagaggaggataataaaacagaaggtgaagatagttctgcccactgtcgcaaggtatctgatatgtccattgtaggaggttctcatggcaagaccaaggagacagcctcttctgaaaatgaggcgaataggcctgatggtttacattcaaccattggaaccagtgacaaagacaaattaggtagcattccagagaactcagcagctgaagaggaactaaataaagaagagcatcccaaattacaaaagggcttgggtaagcacatgtcaggtcttcaggctattcttttcctttttttggtttgaagtttcattgtttatctttaatatgctggcagggttcgaaatttctctttgtgggcacatgctacggccaggaatgggccaagcatcagctgaagaagttttccaacaacatcttgttcttgaggaagatttcaagttatcaggatcatcaattatgaaaaatgtaaaccttgttgtcaaatttgatagtcagtatttcttatggagtaaaatttctcatattattcttgggaaagctgtctttggtccgaacttctgcacagaacatattgatgctattccggttgaacaccaagaaacacctacttcaagagattctcttgggctgtctccctcaagcaggagatggaggctttggaacataccattcaggatatcaagatcccttcagcgcagtaacagtgattcatccgaggacatttttcttgacacagaaactgtcttgagtccaatggatgagcaaactccagagaataatataaatcagtcaccaagaaagcaatttgtgcgaacattaattcccactagtgaacaggtggcatcactaaacctgaaggagggccaaaacattgtaacttttagcttctccaccagagttcttggaaagcaacaggtctgtgcccctatttcttaataataatattttattttggagatctgtaaattgatttttctttctttttttactaaggttgaggca

SEQ ID NO: 27563 - DNA, 1120 bp, Oryza sativa
aatgatgttctgggcgagaatgtcatgtatatctttttttaatgcataataaaaattcgtactaaaatttaccttcatttggtgagtgataataagcgagatcctactttgtctaacaaatatagtaattttagtccaatgattctccctttaagtggacttgcaaaaaacacttcatgtggtccttaatttcttggttatatcttctattctgtctgcctgaaaatgtcaattggcaatggtatcctggacatggtacagataagtcagtcctacaaattttaggggctaccacattattttcttcacagaatacaactgttatacatgttcctttttctgtttattttcataatggctgaatttgagtaattaatgttccatatcaggtctgatgtgttgggccaggtcatgcctttagttggacgagattggagtcagtctggtgttgctcgtcttttttctgcaataaaggtgtgcttcagaatttattttagtttttgtttctctttattttaggaggatattctacccagttttgcaaatatgggtttctgatgttcttttattctcccaatcaggaaaatggatatcaactattattcctcagtgctagagctatagttcaggcatacctgaccaaaaactttctattcaacctaaaacaggtaaaatatagcatctgtccgttgaatgtgttacctaccattttcatctttagtgatttaatcatatcttcactagaactgatagtaatttttaattctatattgttggtatgtatataaacttggttatcccttggcaactttgcaggatgggaaggtattgcctaatggacctgttgtgatttcacctgatggtttatttccgtcattgtaccgggaaggtaacatcatctctccaatatttacatatccatattcttctattatgacttgctgaataatgattagccttcactgaactactaggatggtctgtataattcaggctcaggttcaacaaagaaaagtagctaacaatgatcaacaatactgttactttatgtactgtaataaaatttgtttaccatgttctaatgtttcctttgttcttctcagttatacgaagagcacca

SEQ ID NO: 27564 - DNA, 14562 bp, Oryza sativa
acaccgatctttgaacgaagctcctgaaacctggttctgcccagagatttggtgaatatatcaccgagctgctccgcagttcccacgaacatcatttcgatcagtttcttttctgcacactcccggatataatgatatttgacatcgatatgcttactccggtcatgatgcactggattttttatcaatgatattgtggactggttgtccaccttcagcagcggtgcggtgatctcgtcgcccagcacctccgctaacagccgcgcgagccatactccttgacatgttgcggcggctgcggcgatgtactcggcctcacaggaagacaatgccaccaccttctgcttggaggactgccaagtgacaggcccgccattgatgaagaaaatctggccggacgtgctctttcgctcatctggatcgccagccagatcactgtcagagtaaccaaccagcattggcaaagcgcaccgtgcacctgggccaaatcgaattccccagcagcgagtgcctgccacatagcgcagtatgcgccgaacggcagcgagatgatcttccctgggtgactccatgaagcgactgacatacccaacagagaatgccaggtcgggtcgcgtgttgacgagatagcgcagactcccaaccaagctgcgatacagtgtagcatccacaagcggaaaatctgaaccctttctcaatttcaaacgtacctccataggagtctgacagggattgcagtccttgagtcctgccttctcaagaatcttgccggcatatgcggcttgccccagcgtgatcccatcactgtcctgggtaacctcgatgccgaggtagtatctgagtgcccccaaatcactcatcttgaagagcttcatcatctctcccttgaagctgcggatctcgtcgtcgtgatcgccggtgatgatgaggtcatcgacgtagacgcccaccatcagtcgtcttcctcccctggtgcgtgtgtacacaccatgctcggagctgctgcggtgaaagccgagtgacagcaaggagctatcaagtttggcattccacgcgcgaggcgcctggcgcaagccgtaaagagctttgtgtaggcgatacaccttgttcttgtggttgtcgtcgacaaaacccggcggctgcgagacataaacttcctcgagcagctcgccgttgaggaatgccgacttgacgtccatgtggtggacttgccacccttggtgcgcggcgacggcgagaaggaggcgcaccgattccagccgggcgacaagtgcgaagacctcgtcgaagtccaccccctgtcgctggacgtaccccttagcgacgaggcgcgccttgtagcgcacgatcgccccctgttcgtcacgtttcagcttgtagacccattttagcccaattgcacggtggccatggggtaggtcagtgagcgaccaagtgtcgttgtcgacgatcgcgttaagctcgtcttgcatggcgccacgccagcttggatccgcctcagcctcagccagtgaagcaggttcgtcggcgctcacaacatggagctcgagctgttccagcacccgcggagcgtgtccgggcggtgaggcattccccagcaggttatccaccaggcggtagcgaggcacgacgtcgtcatctgcgtcggcgtccaggatggaatcttgggtaggcggcgtgacaaactcaaccgcctccggcgacggaggcgacggaggtgccggtgtcgtgggggccgacggagccggcgatggtggcgagggtggagtcggcgacgaagcaggtgccgtcccgatggtggtcgtcaccacctgttcgacggtgaacggctcgagctggggagcaccatcaggcgtcactggtccccagtcccaggcgatgtcttcatcaaacaccacgtccctagacacatggacgcgctcgctgactggatcatagagccggtaggccttcgagccttgctcgtagccgaggagcaccattggcgcactccggtcatcgagtttcttcagcccgggcttggtgatcttgacgtgccccacgcacccgaaagtgcgcaggaaatgcacagcgggccattggccataccatgcttcatagggcgtctggttgtccaagcttttcgtcggcgaacgattcaagagaaagaccgctgtggacatggcctctccccagaaccgcccaggaacacccttcgccttcatcatgctgcgggcagtggcgacgatggtttggtttcgacgctccactactccgttctgctgcggggagtagggcgccgtcaactgccgaccaactccgagattggcgcagtattccccaaattcgattgaggtgaattcgcttccacgatccatgcgcagtgcacggagtttgcgcccggactccacctctgcacgggcctgaaagtgcttgatggcgttcgcggcctcatccttgctcctaatcatggttagccacatatagcggctcatgtcatcgacaagcaacaaaaaataccgattaccagccggcgttgcaggttcgatcggcccacagagatcgccgtggacgagctccagatgttcgtcagcgcggtacttggactgcgtcgggaacgccgctcgccgctgcttcccgagcaaacagccatcgcagacttgagtgacttgttgtagcagcggcagcccacgaaccatttcctgttgcgcgagcttgcggagagcaggaaagttgaggtggccgtacctggcgtgccaccgccacgccggctcggcgctccttgccgcgaggcagaccggacggtcgatgtccagcttgatggtgtagaggcagtcgtcggagcgtcggacacggacgagtaggtgccctcgaggatcccacacgtgcaggatgccgtgatgaatcagtaccttgctgccggaacgatccagctgtccaaggctgacgatgttcgccgtgagccgcgggatgtagtagaccccggcgatgccgcggtgttccccgaacctgcaggagaacaggacggtgacgcggccctcgatgcgaaccaccgagccgtcgccaaacctgacagtgccggtgaccgccgtgtcgagctcggcgaaagcggagcgggacccggtcatatggttggttgcgccagtatccaggatccacatcgccggatcatgttcgccaccgtcgtctagctgcgcgaagaccttggcctcgaccacggcaagttcgccaatcggcgacggcgccctcggcgcgctcggtggcgagacgacgtttgtcggtgcagcgacgcgaggacgcggcggatccagctgcaccttggccaggagcagagcaggctcttcgtcctcctcctgggctacgtaagcttgctgggccttgggcttgctgcgacagtctttggcccaatgtcccctcttgccgcaattcttgcaatttcccgggttacggcctcccgggttggctggcttgggctgggcctccttcggggctccatcgtccttcttcccacgccctcgaccccggcggtcgccgttgccgctggaggagtgagcggcgtcttgcagagaggccgccttgcggaatttcgccagccattcttcctcggtgaagaggagacggccattggcgtcgacccgactcgatgccgccgcagtcttgcactgcttgcgttgctcgacggagcgcagacgcccagtaacctcctcgagagacagctcattgacgtcgagcaaggtctcaatcgagatggctatttgctggagatgttctgggacaacctgcaacaatttctgaacgacctcagcttcagtgatattatcacctaaggtgcgaaggttgttggcgaggccgccgatccgcatcgagaagtcgtcgacggtttcatcgtccttgaagaggatatcaccgaattctcggcgcagctgctgtgcattcgcctcacgcacgcgctgcacaccgatacggcgagtcttgatcgcttcccacgcctcctgcgccgtctccttgacagcgagcgtggcgagcatctcggcgggcacggcgcgaagtatcgcggcgagcgcctgctggtcctgccggtagtcgacgagatcatcgccctccggctccaccgcgccccacagacattgggcttgcatgttcacccgcattaccagcgcccaatcttggtaatttgtgcgggtgagtgtcgggtagacgacgctgctcgtggtcgcctcgcggacgacgcgttccaccacgacttggccgcggccgccatgacggccacggcgcggagacggcgagcgccagcgacgacgcggtggtgagtgggagacgcgcggcgttggtaacgacatcaggaaccccggcgatcaccgaaggctctgataccaattgttagcagcaaaacgaaaaactgtagcttgtctggcaaaacagaaacagaacaacacagagtattttggcgctgcattaactggcagcttttctggattagagcttaaccttaaatagcaaattacaagaaagttaaacgtggccatagtggcctcctaattgtgcgtgccacactccttgccacttcgcgtcatcccacgaactggagcacaccacgcacgacaccacggactccgcacgaacgcagcgtgcgtcaagcccactatgcacacaaacaggatgaacagatcatgtgcaagactcaacgtaaaaacaaagggaaactaactactctgagcagctagacttattactaacacttcttccttttcttttctccgattccttctccttccctgtgcaaccggccgatgcggcggtcgcggcggcatcggtgcaaacgaggcccagcgcgggcgaagcctcaacggtcggcggggccgcagccaggacagcgcggccggcggccaacgtgagtacgagtgtggtttgggccggcgctgttcgtggcagtcggcggccggtggtggtaactccgtcaatcggcattcgccggcgactcccagtcggcagtgatggaatccaacaaaaaccacaaaaacggaatcggaaggatgcgagcaattcttttttgcaattcaatgtccaagatgcaaggggattcaagagatttctctaccttcttctttctcggtctccggtagaacgtcgtgctgataacatattacgcaaccctcctgctatatgaagtagtccatgataacatattacgcaatccttctgctatacgaagtagtccaagaggtcctatatgaagtagtccatgataacatattacgcaatccttctgctatacgaagtagtccaagaggtcctgtaattctacaaaagtggagatataagattgtaattctacaaaagtgaagatacaagatttaggggtgagactctcttctcattcatcattctatcctcctcaagcacaagtgtataatatgatcacccctctcctctttgtatagccttcctccatatatggaaggttttggtgtgggccaattaatatatatgggctgggtgttcatggacccaagcccataggtttctaacaatacagaccaatcagcctaatcactagctagctagtacaagttcgagataaagctccagctctaccgacttccacaagcgcaaaacgtatatttatttttggccctgtcttcatattattttttctgtgagaatgaccgatctctctatattatctagttgaaatagattagcgtgcgttctacctaactctaggtatagtaacgggttatggctaatgagcccttttataactttacttaagctgcgtttggaagtgagtttaggatgcgctaatacatcggtgtcttttatgcaaactttttatttcagtttttttaaataacaactaaaatccttttcataatagtcgatacgcaactaattaatcatatgttaatggtttttcttgttatccgtgctaacttaagctaagcctagatctggcgattaaattttctatactaaaatatgatcgaactaaaagaccactttggtcctgtttggggagcttgtcccagctgcagcttttcccaaaagctgcttctgctagaagctgccccaaacagttcacagcttacagattctgaaaaataaactaagaagccagaagctggagaagctgagtttcagagcttttccagattctcagaagctggctaccaaacagctacttctcagaatctaaagcttccccaaacagaccctttgccttggtagtgttggaattttgaggaaaaagaataagaataggaaaacgcaccgtcgtgttatgcatatacatttttgcttgttcatcgagaaaaaggatcgctactgcaggtgctccaacgcctgcgtcagaaacggcctaaaccgctcaatgttgacccgcacgtcctgcttcccgaggtaccactcggccacgtttccccacccgctcaagtgcacggcgacggggtccttgatcatggggtggtccttgccgaacacgtccatcagcgagctctcgtcggcggcgatgtcgtactcgatgtaccggagccccatgtctcgcgccggctcgccgaagtccgtctgcgcgatgctctcgagccggccgtacggcacgatctgcagcagcacggcccccgtggggaggaacacgcagttggtcagcccggctccgtgcacgcccaccatcacgtcgtacgagttcacctcccgggcgaactcgtcgtaggtgctcgtcggacggccgccggcgacggtcacctcgaaccccgccgctcgcgcggccgcggcgacctccgggaggttcatcagcttccggctgttggtccgctccaggatcatcatccgcggccgtgcaccgtggttggtaccgagcttgatcggccggtcacgcgggagcgagtaggattgcctcaagaactcggtgaagttgaccatggtgtagccgccgccggtgtcgtcgagggaggggtcgatggtgaactccttgcggctgccatagccgaccaccacgtgcgggtaacagcggacgacgccgcggtcgtcgtccttctccaggtcgacgatgtcgtgccgcgagatctggctgaagatcctccggtacttgtccacccagaagggcagcaggttgacgacgaggagctggacctcgccgccgaagcgacgcgcgccgatgaagagcgggacgagcacgtcggtgaagtcgtgccagtagttgccggtgagcccgccgagctcgatcaccatcgccgggacgttcagccgcgtcgtgcacggcggggcgtcctccgggttggggacggacctcaccgtgacgggtttgaggccgtcgaggtacttccgggagtagggctttatcttccactcccgcggcgccgcgcgcggcgagaccagggtgaccacggcggcgccggcgccgccgcctccctgcgctcgcgtgtcgccgtcgagcacgcagatgtcgtacttgccgaacgacgtgtcgcagatcggcttggtgttggcaacattgttgaagtcgtccgttcctcctcctgatcaatgatcagttgatcaccacgtcaataacgcgcccacgcttgaaaactggtataacgtattggggctgcaattcatgacatgtgaaatgaagagctggtccatcaggaatattattatttaccgaattcactgaattctatcgtatccttcttctcggattggcgtccttcctcccagtagttagagctcctgtcgttgcctgacatcatatacacataataagataaaatgtgatactgtggcacgctggcaagtcggtgaaagaaaaacaaacttgagaagtcaaatttggtcatatataaggaattttgtagtactatttttcccaccaatcacctcccatttaaattctctttattttgatatctaattactctcttttccttaacaatatcaataacacatatataccagttttaccaacaaattattatttggttgcttacatgctattttatagcttaacgtgtagtggtagaaatgaaaataacaaggtacctaattgttcctcgattgaatttttctctgttcgttgcttctcgctttcgtcatctttctctgaaggagcaaaaaagaaagagaataatttgaattcgatatcttgtagtaggtaaaaggatatgtcgtaattgttgtcgcttgattagtatgctctctggaatgacgtagctgacgtttaccttgacgttggcctgttgatcgttccgtgtgtgtactagctacctcctccctgtggccttcctccagtcctctgctcccatcttctacagacttcacaatttcagcaaagaaaagaaacgggattatctaacagcaattcttaatcatgttaaggctgtatatataccttgccatgcttgattcccttgatatgttgtagcaggaatcgattcagttttactagttgttgctgggcctaaataagctgcggcaaaaggaaatcaggacatgaacctccatgttggaaagattgaacacatgaatctccatgttgttgtctaactctagactttctcgagtttccaaggcaaacaaaggaagatgataattaagcaagcacatatggagaaaaagtaatcataattaccatttgggctgttgctgaactgcgcattgaccatcaagtagagcagcaccaacacgaagccaagaactaagccatatccaatatatctgctcttccacgacgacgacgacgacgatcgatttgcgcccctcgtcgccgccttcgattcccctcgcctcatctcgggagtctccggtggcagaaggatgatcccgcggcagtttggccgcgcctcaacataagaatcgaattaatattggaacttggtagttggtacttggtactacttggtagagtacgtttccaattccctacttgactgattctatatcaactttgggctgttgctgaactgcgctttgagaggtttctttatcagcttcttctactggctgtgcttgcaatttgtggtaaaataatagcattccagctttgacatattgcttagccaaccaatcgacgacaagttcagtacgtgagcaaccatagctgattttctgttaggtcgtgggccatcacgcacgtcgccctcacattccggcgtataagtaaaagatgtactggaatcttatctatatatcaaattattgaacaggacagcttactcaagcttgattagctttaactatatatcatcgggttgtcttattgagacggcctacaagatacattccagccatcaaatgacatgtgcacattctaaacacatgtagctagcaacttgtgtagtggccccacgtacactactccaaaaacgatttttctggacaagactcctatttggttgcagacggaccgtaattagccatatttgcaaaatcgacctctatttttcataccgctccttaagaggtttgcatggaaaaatcgattttcgcagacgatactcttaaatagccgcatccggaaatgagtctatttttgcaaggggacctcttaaggggccacatgtaaaaatacattttcgcaggcgggcatgttaaggatccaccgagaagcctaacttgcctccacttttccctctcaacacttcaaaatttttcaaagtccaaccttatcttttcggtcctcatcctttcctcgctctctcttggcggccggcgagtgggcagcgggcggcttaagctacctcgggcttggcccctcgacggccccggctaccggtgggagcgggcaaatccactgcccctaaccacgagagcgaaggtgatgggcggtggtggcggcaatggtggtgggatcgggtggatccgccacccccgccctcgggagcgacgacggcgggcagatccgtcgcccccgacctcggaagcagcaatggccggtgggtggcagctgaagcaggcttgtggcaccaggctagctagggttttggtttttcaatttcgagatttttattttttttttcgaaattttatttttgcatacggctcgcataagcacccgcatgcgaaaatctggtttggccgcatggcgcccctatcacatggaaaaatagggtttggccgcatggaaaaatgcttttttagtagtggtaaggttgggcggtagcatgattatacaagtgcacaataactaaaacactcttctcacatataggcagcccggccctctccccaccctcacccttcactaagtaattaaattacatatgagcatagtgatatagccacacatttgtatccagtcctgttttgataaattactcagttatcggcctatattagtaaataaattactcatgaatataataatctagccacaaaatttattctggccttttctctggtaaataaatcacctccagttattggtccaaccttcttttggtaaataaattactcttagttatcgggctttctcgtggccataatatttactcggtatattctcttaataaatagattagttacctccaaaaatcagttgattagtacaaaacaaccatcctacttccgtagaatatggagtaatatttttgctcggaaagtattttcccgaggaagaagagtgatggcaaggtaggattgtggatgtcactgacttgtggtttcctacatacaaagtctcttgtaatacgttgctagaagtcgtttctgttgaaatactgagatagtattccatcctgacgaatcggaacataataccttcccccacatttcgcaacatacaaagaaactgaatggtaagaaaacacaaacagggtcatctactggcacgagatcaccccaacatatagttttccacctgacaactattgcaggcatatcacaagggccttcgacggacctgccgaaacgagtcaacaatcgtcagggcgaagcgcagcagcgaagcactgattgacgcatagacagtagcttcgggcgaagccgagagcctttaccacctagccaagggcctttgcctcaaactagagaactcggggtccaaaggggccgattggtcaatgatggcccacgttgcggcctaagaggaagcccatggctgaattgtctataattgccctcataaatgtccctattataagggtatccacgtaaattcccctgtatttatttaccctagggtgcatgagtttatactaagactataaatagaccccaaggggcatgtaatgtggggatcccaaaaaattcaatattaatacatacggtttaacttttccacaaaaagtgaaccacatttttcgacgaatgcagctgtcattcgacaaacacagcaaaatcaacatccatacctattttgacaagcagctccgggtcgtatgctcgcgtatgagtgaacacccgatccctgaggaggttgtaggtctgcacatcctgatctctttgcaagcccagcttggagtcgggatggaaagtttggccttgatcctcatccattggcacttggccatatgactcagcatgcccttcactcttgcgtcctcattggacgggcacgcactcaagctgtaggaatagtgatgtgagcgcgagcttgcagcccgctttattgcgctgagaaaacgcttagagctcttcttcgtcctgcacacaaagcaacaaacacacgaataatcaaaaacgggttacgttagcaaaagccggttagccgtccaagagttagtcgtccttgtggagcttggttgctaccacaaaagtcatcattgtttgtattaacactccccaaaatcgttcttatgggcgagaacgcaccacaaaatcgtcttgtggggtagtgacactaccacactacgttcttgtggggtaatgacactaccacactatgttcttgtagttcaacccttaaggttaacttgatatgcaagaagaaaaaagtggatactcaaacttgagacaataacacgagaagcactctagaacgaaaatagaaacccaagagaaaactagtgcaacttggtttgaggcatgcatggagaacaataaccatgggttagcttttataggggcgagccacccctggtttggccacaccaaggggtcggcaaacccctaatggctacccatgtttccctcctttcgacgtaagaatagtggcatcctccactaaataaaagtgaaagttcatgtaatagaccgccctctagaaccgcgtagccaactcatccgacgggtgcgccaacttacacacaccagcccatttacattttcatccttgtttcgtgtaaaagggttaacaagggagtggcatggttggagggacaatgccttataagttggttccacccttgctaaactagcaaggtggtactaaacatgtgcacacagctctcatgggccacacatgcctcatcctaattggtccagggtgtcacagtttggtcccaagaaagatgccaattcatacctctttatatccctaagtggtcccattttgattttcaagaagataaataaatatgagatatcgacttaatttacctttcagcgaaggactcattatttaaagtccaacgagcgggacttctccgttccaattaatttgaagctacgtccagttctggagatgatgcgacggatgactattgttatttgactcgccacactttcttagttttcttgggtttagctagtgtggatgattcagcggacttttgaggtcgcagtcttggctgcgccccttacctcttcagtgtcttgtcattctgatattaaagagggagttccatccttaacactttttccatgaatgcaatgaggttgtccttcttcgggggtgtcatttcgacctctcggatatggattttttttttgaccgggaaacagtggaggaagcccccaaggttaaatttcaaatataaaaaggaaagaaatctgtacaagcaagaaaattacaagacgtcaatccatgtttgcaaaataggtctatcagctatcctaagtctaaggaaatgtagacttagctcctccttgagattagatttccatatctgaacagaaggttgtatatgcttaaagattaaatcatttctttgcttccataacagccaacaagccacaagaaagatctccataaagcatgaaagatgaggtcgggcactcctgtgagattgcagcatttgatgaaattcctgtgttgtgtcccaagaaaaaccaattgtgttccagcaagcaattgcaaaagggcactggaaaaataaatgctctctagtttctcgcagacccaggaagcataaaacacaagtaacaggaacatttggcggtttgcaatatcttctttccaacaaatctcttgtattaactctatctaggaacaacaaccaggcaaagactttaaccttcatgtatacttctcggatatggattatgaagtgaagtccttaattaactagggcaacttgccaaactacaaaagcacatagcatagggtagcagcttaaggacatgtagttggccctttgagcaactaaataacgcatagcttgacagtaagctcacatagagaccatacccagtaacgatcacacatatacattaccacctaactaggttcatatagagtcacccatcaccccggtcaaaaacattatatccgcccattgttcattacatggtgcaacaaatgctacccaaaagggcacacaaccacaaagttcttatcaaagtaatgataaataaaatgatgcatgtattcaacacaaaacattttataaactgggtccaatatgttcaaagaatgcacttgccttgctacaaaaactgtccttgcactgcgtcttctgtagcgaacaactcctctactccaacgtctacacgatggcaaacaagaatcaaataaacataaggaaagactaaatagataacgttaaatgaaataacaaacttaacaaggcggtagagctcacttttggaacaatttaggaagaagaataggtcgaatcggcattcgaacgaatgagttatgaccttcgaaagtgtgaattcgaagaaaacccatggataaaaataaaaggaatattccaagatgacggagcgtggggctcctcaccgggagaccgcgctggcccccctttgccggtttggccggggaccctgggtgagactctaagctcccaatctgtggaaggttcgcgagacaggaagcacacaagacgccggcaatgtatacaggttcaggccgctgagaagcgtaataccctactcctgtgttttggtggattcgcgtatgaagaagctacaaagtatgagccagcctcttccttgttctgggttcctaatctggaaaagtccagtcccccccttctctaagtgggcaaggtccttcttttatatcttaaggggataccacatgcaccatttccctcttttttgtggggacttcccctaccttttcataaatggacggagatttgtatagttgccgtccgagtcaccttctgatgggacgggccacaactaccttcacttttcgcgggagcagatgcgacgtggaatcgtggcttgttactgtcgacatgaccggagtcagaccagtcacgtcggtcattcttg

SEQ ID NO: 27565 - DNA, 15503 bp, Oryza sativa
ccatgtcacgaccagtagcccccggcgttatgccagggcgatcgccctctttaagggaagcggtcgggcgtgatgccactcctaaggcctggtgacaggtgggaccggtctccacaattgggcagaaacccatcggtcacaaatcacgcacatctgcagtggtaactcggctgtcaataatgagcggtctcttcaagactgccacattactcgagtagcacacgaatctggacatggcgatttgtttcgtctggagatatggtaacgtcgcttcggtcggcgagcgtaattaccgtgcgaacgatatgatatatctcgactgccacaaccgcatatccacctcatgcgccgcaagcgggcgaatgggattagtggaagcgtgggcgcgagaaacgagggggcgaaatagtgggcgcgagaagcgaggagccgggcacagcgttggcaagagtataaaggcactgaggaagggatctgtttccttcctttcgccattattccccttgtcttcgccgcttgcgccctaactccttctttcctgtgccctaccttcgccacacgcgctcgctcttaatcttctcttcctccggcgccatggcacgaggctccgctctgctcgatggtagcgtgctgccgccttcccgcatcgtgagcgagaggcaggctgggctgccgcgccgcttcatgccagaatctgccaccggccgggagatagtcacgctgggcgagggacgcccggcgccagactacccggggcggtccgtcttctttctccccttttcaatggcagggctggttccgccattttcttctttcttcatggatgttctggagttctacgatctccagatggcgcacctcacccccaacgcggtgatgacattggccatcttcgcgcatctgtgcgagatgttcattggggtgcgcccatctcttcggctgttccggtggttcttcaccgtgcagtcggtgtcgccgccatcggtagttggtggctgctacttccagccacgggggccagtgctgaaccgctacatcccctgcgccctcagcaagaagtgggacgactggaagagcgactcgttctacacccccctcgccgacgaaacgcgcctccgacttccgagccagcccccggcgcaggccttcagctggcgggcgccggtagatctgggggatggctatgacgccgtcctcgaccgtctggcgggcctgcgatcccaggggctcacaggggccatggtgtacggcgactacctccgtcgtcggattgcgccgctccagcggcgcgctcggggcgcctgggagtacaccgggtccgaagacttcatgaggacctaccagggagtgagatgggactgggctcctgaggacttcaagatattggtccaacgggtgctgaatctcaactccgtggaggcgtccctcattccccaaggaatcctccccctctgcagcgatccagaccgcgcctccatcctgaccattatgatggcggtcggggcctcagaggagcgagctccaaagggccacgacggcgcaggcgggagccgcaggggggaacaatctaccccgggcgggggtcgtgcttctgggtcccgcgacaggggcccggggagcagccgtcctgccgacgcccgggggaagaggaagcagggaggaacacctcccccatctcctccccgagggggcggggcggtgcgtgccagcagcaggcgcccggagggggccgcgccgacatcgcagcccgagggggagcgcaagaagaagcggttccgcaagatgggggagacagaaccatctcggggaaacctcatttcccctccaaagtggtcgtttaaccgaccccctcgcaggttcgtctctcacccatcgtggctgtattcattctctcaacatgagttttcactcacccatcttgttcgtcttctggtcttttcttttgtttcagcgagatcccgtcgcgtccctcccgccattccaagtctggccagtctgaggccgaggatccggcggccgcagaggcccggaggcgggaatctgaccggcgagaggccgcggatcgcctacgggaagctgaggaggccgcccaggaggccgcccgggctcgccaggccgaggaaaccgctcgggaggaggccgcccgagcccgccaggccgaggaagccgctcgggagaaagccggatttcgccaggacgaggcgatagcaacttccgaggcagctcgcgacgaggccgcgggcgcgtcgcttgggcccactccctcgggcgacgctcaggcgacaacttccggggcagctggcgacgaggctgcgggcacgttgcttgggcccactccctcgggcgacgctcaggaccaaccgggtccggggaacatccccgagtccggcacttccatcggcggcccgagccgcgcggcatcctctccaaggcggctcttccgcacgccttctatcgccccactgaacgcagagccccttctgcaggccttggccgccgcaaacaccacggtgttggatgggttaagtgcccaggtggaggccctgcaggcagagcgggcggagctcgacgccgcgtgggcgcgtgtcgaagaggggcgacgctcggtggaggccatggtggagatggccgtaaggctcaccgccggcacgtttcggagcttgaaacccgtaagaaggtgctggcggaaatcgccaaggaagtggaggaggagcggggggctgccctcattgccaccaccgtgatgaacgagacgcaggacaccctccgccttcaatacgggagctgggaggcggagctaaggaagaagctcgacgccgcccagggggtgcttgacgctgccgctgcccgagaacagcgggcggcggagaccgaagcggcgtcccggcggcgcgaagtggcccttgaggcgcgcgccatggcgctggaagagcgcgcctgcgttgtggagagggatctggcggaccgcgaggccgccgtcaccatccgggaagcaacgctggcggcgcacgaggctgcctgcgccgaagaagagttcgcgctccgcctccgcgaggacgcgctcaccgagcgggagcgatctctcgagggggccgagtccgcggcgcaacagctggcggacagcctgtccctccgcgaggcagcgcaggaggagcaggcgcgccgtaatctggaaggtgcccgcgccgagagggccgcactgaaccaacgggccgctgagcttgaggcgcgggcgaaggagctggacgcgagggcgcgcagcggcggggcggccgcgggcgaaagcgacttagccgcccgcctcgcagctgccgaacacaccatcgccgatctgcagtgcgcgctagactcgtccgccgggaaggtcgaagccctccgcttggcaggcgaggtagggcccggcatgctttgggacgccgtctcgcgcctagattgcgccggtcggcaagtgggcctctgaagagggcggaccgtaaagtacgccgccaaccagggaggcctcgcccagcgcctctcgaagatggccggggctctccaacggctccccgaggagctcgagaagacaattaagtcatcctcgagggacctcgcccaaggagcggtggagctcgtcctggcgagttaccaggccagagaccccaatttctctccatggatggcgctggatgagttccctcctgggaccgaggacagcgtgcgcgcgcaggtccgggatgccgccgaccagatcgtcgacagcttcgagggctcggcccctcggctcgtgttcgcccccaactccgacgaggagggcaatgccggtggtgcagacgacagtgacgacgaggccggcgacccaggcgcttcggattgagcccccagacccccgccattcttcagttttttcttcttttctttcttctaaggcctttgggcctcttttttgtatagatcaacttaatctgtaatcaaaaatgaagaaatttttgtgtcaatttcatcttgctgtgtgtatgagatgaggatgatctgtgccgtagtccttttgtgtcttagcttgactaagggctcgcgcccaggttctagtcctcaaaaggcgcgggtcggagctagtgcctggggagatccacatgtcgagactggccaggccaggaacgtggtgaccgagggttatgggtgacccgattgtgggtttttgccgattcccccccggagttcaccacgccccggggcacggctcggttctgtgccccgtttggcgattttagccgacccgagcccccgagggcaggattgagcgcgagtgacctatttcaagtcaagattcttcaaaaggaaaaaacagcacagatacagcctttaggaaattgaaactgcttttattgaaatactgaaaaaaaaaaagaaataagaatgtgcatgtgtggcagcccccggccaaccctgcacgcccgagggggtgcggggttggcccgagcccgaaacctgacacccgacccccccccccctcaggggtagaagcgacgaaggtgttcgatgttccacgggttaggcagctcagtgccgtcgcccgtggccagccgtatggagcccggccgggggacgccgaccactcgatacggaccctcccacattggtgaaagcttgctcaatccagcacgcgtttagacgcggcgtaggacgaggtcgtcgacgcagagtgatcgggcccggacgtgacgctgatggtagcgccgcaggctctgctggtagcgcgcggctcggagggccgcgcgccgccttcgttcttccaagtagtcgaggtcatctctgcgaagctgatcttgatcagcctcgcagtacatggtggcccgaggagacctcagggtgagctcggatgggagaaccgcttccgcgccgtagacgaggaagaaaggcatttccccggttgctcggcttggtgtagttcggtttgcccagagcaccgctggcaactcctcgatccatgaatcgccgtgcttcttgagtatgttgaaggtcttggttttaaggcctttgaggatttccgcattggcgcgctccacttggccattgcttctggggtgggcaggtgaggcgaagcagagcttgatgcccatgtcttcgcagtagtcgccgaagagttcactagtgaattgggtgccattatccgtaataatacggttaggcactccaaaccgggccgtgatgcccttaatgaatttaagtgcggagtgcttatcgatcttgacgaccggataagcctcgggccacttagtgaacttgtcgatcgcgacatacagatactcaaacccgcccggggtccgcctaaacggtcccaggatatcgagtccccagacagcaaatggccacgaaagtggtatggtctgcagggtctgggccggctgatggatttgcttggcgtggaattgacacgctctacatcgccggaccaggtcgaccgcatcattgagagctgtcggccaatagaaaccctggcgaaaagctttaccaaccaaggtgcgcgaggcggagtgggctccgcattcgccttcatggatatcggcaagaagcacaacgccttgttcccgaggaatgcacttcaggaggattccattagccgcgcgccgatagagggtcccttctaccagcacgtagcgtttggagatgcgatggacgcgttcactcccttcgcggtcctcgggtagagtcttatctgtgaggtatgcttggatctcggcgatccaagcaatcaatctaagggaactgggagcactcccctcgggtcccgaggcctggactccgacaggcctcgggggccggttaggcgtatccgtctcccctaaggggtcgggtcgcgccgacggctgggcaagcctttcttcaaaggcgcccggtggggtctgggctcgcgaggatgcgagccgtgagagttcgtcggcaatcatgttatcccgtctgggcacatgccgaagctcaatcccgtcaaaatggcgctccatacgccgtacttggcgcacgtaggcgtctatctgcgggtcagagcaacggtactctttacagacttggttaacgaccagctgtgagtcgcctaacaccaggaggcggcggatccccagtccagctgccactctgagtccggcaaggagtccctcatactctgccatattattggtcgctcgaaagtcgaggcggaccaagtatctgaggacgtctccgctcggagaggtcaacgtgacccccgcaccggcgccctgaagagacagggagccgtcgaactgcattacccagtgggcggtgtgaggcagctgcgaggggtccgtgctggcctcggggatcgcgacgggctcgtgagccggggtccactctgccacaaaatcggcgagggcctggctcttgatagcatggcgtggttcaaagtgcaaatcgaactcagaaagttcgattgcccatttcaccacccgtcctgtaccctctcgattatgcaagatttgaccgagggggtaagacgtaaccacagtgacccgatgcgcctggaaataatggcgcagtttcctcgaggccatcagaatagcgtaaagcatcttctgggcctgagggtatcgggttttggcgtcccggagggcctcactaacaaagtagacgggccgctgcacctttcggtggggccgatcctcttcgctaggggccgcatccctggggcactcttcgtccaagcagcctcgcggggcgcacttgtcttctgtgctgatgacctcggggtcggaggataacaggggcggccttcccacagtggcttcggggccgtcctgggggtcgggggctcctggcgtcgtcggacaagcgggcaaagggccaactccggtcgtcaggggccttatgcctccgttcggctcgggggcctcttctccctgctctttcccgggtcgagtcagcacagggttagcctcggggtcaaagggcgataggtgcggccttcccacagtggcctcagggccttcctgggggtcgggggctcctagcaccatctgacaagcgggcagagggccaactccggtcgtcgggggccttgggccaccgttcggctcgggggcctctcctccctgctctctcccgggccaagtctgtacagggtggggtgcgcagaatgaggattgtcctcatcgcgctccacgaccaacgccgcactaaccacttgcggggtcgccgctaagtagagtagtaagggttcatttggctccggggcaaccagaaccgggggagagctgagatacgccttcaactgagtgagggcgcgctcagcttcctccgtccaagtaaacggcccggagcgtttgaggagcttaaataagggtagcgccttctcccccagcctcgatatgaaccgacttagggcggccatgcaatcggtgacgcattgcacatccttaagcttgctgggggggcgcatccgctctatagctcgtatcttctcggggttggcttcgatgcctcgggcagagaccaaaaacccaagaagcttgcccgcaggtacaccgaacacgcacttatcggggttcagttttatgcgggcggagcggagactttcaaaagtttccgctagatccgagagtaaggtttcttggttgcgcgtctttacaaccaagtcatcgacataagcctcaacattacgtcctatttggctacccaaagaaattcgagtagtacgttgaaaagtaggacctgcattttttaacccgaagggcattgttgtataacaataagttcctatgggggtaatgaacgcagttttttcctcatcctccttagccatgcgaatctgatggtaaccagagtatgcatctagaaaacacaaaaggtcgcaccccgctgtggagtcgacaatctgatctatgcgaggcagggggtaaggatccttaggacatgccttgttaaagtcggtgtagtcgatgcacacccgaagcttgccgttcgccttgggaacgaccaccgggttcgccagccactccggatggatgacctcgcggatgaatccggcctccagaagtcgcgtcacctcctcgcggatgaaggcttgacgttccggggcctggcgccgcactttctgccggaccggccttgcgcccggccgtacggcgagacggtgctcaatcacctccctggggaccccgggcatatccgccggtctccatgcgaagacgtcagcgtttgcccgcaggaaagagacgagcgcgtcttcctatttgccgtccagaagaccaccgatccgtgtggtcttggacgggccgtcgcccagggcaacctccttgaccgggacctcatcgcacgtgactatccgctgcctcggggcggcgggggcggatgtgccaagcctctcgtcgccaccctcgggcttggacacgacggcgaggcggtccgcgcgctgctccatacaagcgagcgcgactttgaggtcgccatggacagagatggggccatcggggcccggcatcttcatctggaggtaggcgtagtggaccgccgccatgaactttaccaacgcgggcctccccaagagcgcgttgtagggcagactgaggtccgccacatcaaagttcacccgctccgtgcggaagttggcgggtccaccgaaggtgaccgggaggtcgatatgacctagcggccaagtgtgccccggcgtcacaccgatgatcggctgggacggccggagcatcatccccggggccttgatggcgtcaaaggctgcgggggaaaggatgttgagggctgctcctccatcaatgaggacacgccccagcttcacgttgcaaacagtgggggaaaccaccattgcgatctgtcctccccgggcaacgcacggtgggtggtcggtctggtcgaaggtgagggcaacctccgaccaccgcgcccggcgcgtcgcctcatgagtaggggccgcggccagaagctctcgcttcatggccttgaggctccggcgagaaacgtgagcacacgctcccccatcgatagtggcaatggtggccccaggctcttggaaacctaggtcatcatcgccgtcatcgatgtcctcggcgggggccttctgcttggcctcacttcgccgattgccggaaggaaccgccggggacttgccctctcggcgctcctgcctcctctcctcctcccacttcctcgtccgctcagccaaacttttgactgcacggcagtccgcgaggtcgtgaagggaagtgttgtggacggtgcaccacttgccggttgggcgctccctgctgggagcgccggcctccttctttttgtctcccgcaggcctcccctttcgggtggcccgcggtgcgccctcgacggcgaggacatgaccctcgtcgtcggtatgggctgacctcttcttcctcctcctgtcacgccgccctgtctgagcggcggatccgggggcggccgaagctgccacaccggaaccggaggggttccaggtccatgcctcctccttacgagccactcgatccgcgagctgaaaaagctccgcggtagtctggggctctttggaggcgatcttttcgagcatgcggttgtgccgcacacctcccctgaacgcgtaaatcaccgcgtgtgcagggatgcatggtatggtgttgcggacttgacagaaccgctgaatgtacgagcgaagtgactcatcatcccttcgctgtactgcgtgcaagtccgcttcctcacctgggcgcggatacgtgccttgaaagttcatggtgaactgttggcacaaatcctcccaagagtggacagatgcgggtggcaagttcattagccaaccccgcgcctgtcctttcagggccatgggaaagaaattcgccatgaccctgtcgtcacccccggcggcctcgatcccggtcgtgtagacctggagaaactcggcggggttgacgctcccgtcatatttttcggtgatggtgggccggaaccttgggggccaacggacattccgaaggctcgccacaaaggctctacagccgacaccaccaaccgggggcacggagggctgatccccgcgtccgtggtgaggtgacactccggacgaggaggtgccctccgttgcgtggggagcacgtcggccattacgccggcgctcgatactgacgcgggcatccggttccccacgcagatcatcccgggtcggaggcgttgacgaaggaatggcggccgaatggcgaacagcggctgccgctcgccgcgccctccgtctcgacgacgcggagccggtggtagcagcaccagaggccttggtggcggaggaccgcccaccagcatctaggcgctgccgtgcagtcatgaccaatttggccacatcgtccagccaacgttgggctggagactccgggtcatgggcgacgggcgggtgacgtaggagcgcgcctgcagcttggagcgcgccctggggcgtgctgccgtcgccgtagacgaggaggcgacgctccccatctcgccgcccttctccacctcctgtggatgtcgaagtcgcggatccttcagccctctcgagcgccttctcccgcctaggactttggcgtggagggggcggtggagtacgagctcgacggcgtgggtttggctccccgtcatcaccgctcatactcggggagaggtcgtgcgcctttgctggctcggccattgggctgaacaggaaaagcttggcgcacacgaaggagtgcgagagctcagaagatcactcgcagagtcccctacctggcgcgccagatgacggagcgtggggctcctcaccgggagaccgcgctggcccccctttgccggttcggccggggaccctgggtgagactctaagctcccaatctgtggaaggttcgcgagacaggaagcacacaagacgccggcaatgtatacaggttcaggccgctgagaagcgtaataccctactcctgtgttttggtggattcgcatatgaagaagctacaaagtatgagccagcctctcccttgttctgggttcctaatctggaaaagtccagtcccccccttctctaagtgggcaaggtcctccttttatatcttaaggggataccacatgcaccatttccctcttttttgtggggacttcccctaccttttcataaatggacggagatttgtatagttgccgtccgagtcaccttctgatgggacggcccacaactacctccactttcgccgggagcagatgcgacgtggaatcgtggctgtctgctgtcgacatgaccggagtcagaccagtcacgtcggtcattcttgtccaccacgtgtcagcttagcaatctacatgttcgcccttcttcacataacatcttgcctgtaatggttaggatgaagcctggcatatatctgactaggactaacgtgccatctctgggaggtaacacgctagctccagctggggacgagcgcctagaagccctcgtcctgacgggatggggcgaggcgtgcgtcagatcgcctgtcgccacctaacccgcaatctgaccggtctgtgactggtcacagaccggataaatgagtgcactgcactgcgttacatgcggcgtgacacgctcagccaaatcgcaataaatgtggttaggtgagccccactgtgctcacctaacccatacacgcggagcgaaaacccacgaggggtcggggcgcctcggccctcggggctgaggcgggtgcggcccgaccccctcggggggactaagaggagggcgaacacatcaccctcaggcccgacgttccccgagggtgccaggccacgtgggcgattgtgtctgcctcaaacctctagtcatgatactcctgatcccatgtcaccgacacaagaatattctatgggtatttaatatcgggaattgaattattttgtaacagaaaaatatatgtgggacccatggtcagcggctttgagtatggtggactcgatgtatgatggactgctgccatgtggactaagatggataaaatggagataatgtggatggatctagggctaacgtggcaatggaaagagttatggaaatccgacagtggagattggatctaggggatcggacggctgagatcggcaaagaggcttcggcctcagggctcaccatcggcggcttccggaggaggtggtggtggcagcttctagaggaggtggagccacaacggcgtggctcttgatggtagaagaaacaatggtggtggcttctcgtggcagagatggcggcaacgatgtaagttcaagtgccttcatttggttttgttgattaaggtcaaatataattacatcaaactaatgtttttatgagcctttgtttgactagtctcacttggatatggaaatgaaaatggtgagagttatcaactaggtttttctccataatgagatgtggaagatacacattctttggtgatggaccttaatcatgataaggatgaaatacatggcgataaagcgatatgtatcatttcttatttcttactttttgatagggtcatcaagtggaggttgacaaccgatttgttgggactaatgttttcctttaagctatgcaaagcaataggtcccaccatgatgagactaatagattaaactatgagttgatggtcaccaagtcaaggacatcgctatgttgacaagaatgaagtcaagcttgtgatgaaaataaagtgttgacaaaggttggtcaagacttcgacataaagatggtaaaaccgaatgatcacaaagaattgagcccgagttcagtcaaaaagaaaaagaattgagcctgagttggatggccacaaggcaaaggtatagtgaaactaagaatgcttttattagttttttaccagtctcggtgtttagagtaaagaccgggctactagataggcgtcgtactattaagagggctcaatgagtattggcttgatttgaaccatgtccaaatcgctcaatctgaaatgcatgatctctttccctcggcatgcacactaaggtttaggtctagtttggagtgaggaatccgggttggatcttgatccttttgagactcaactagagcctctgacatgcatgtgatgaggttggttagatgtgtatgatgcatggcttttatatcatgtccacctgtaattctcattagagttggttttgtggacaaagagagaaaggaacatgtctaggggtgtctagtcaagtgtgatgagttttctcaagtttcaaacaaagagagaagtgggcatctccaataggagtgagtgacttgtgcgtatgtctagtggagtatcgttgggagtgtgagccatttatccttaagaaaaagttgtgattctaggaaggattgttcatgtgttggatagacctttgaataagctttccatacagtccaagaacgtcaaaattccgacacccaagtcataagatatcatcgttttactatcagcgtccgtgctgaaaagtgggtcttgatttgttactcttggtgtttagcgcttgtgcatgatattaagctttggcacttggtaagagtcaagtggtcttgatttgttactcttggtgtttgccgagacctagacagcttggtggcggttgactcggtgacctctccaaagaagtttgtagagaaggcccgatggttaattgtgaaggtttggagctcacctatctggagattagagtagcgctaccactagtgatcgagacttgggagaccacttctagacaggctcccagcttgcccatccattgacgaaggggttcgaaggctcggtagtttgagcggtgaagttgggctcgtctcaacggtgaagtagtaagccgacaactttccaacatcggttgaaaaaaatccttttctcttatcttctttattttgggcaacttacatttgtgccaatttactttgagcatgtttacatactagaaattatttgtgctattatcaccctaggcttgcaaacctcaacgtaggctaacttctttgtgcacttagttgagactagttgattcaagctttggattgtggaaaaccattttgatttaccttgcccatatataactcggttttatccaaaagttttaaaaccacttatgcacccccccctctagtcggcctcgtcgatcctacaagagcagcttcggaaaaaaggggagaagggcgatggccggtagtatttataggggaggaaggggactaggtttagggtggcgcacgacaccgatttttgggaggtggcaccggttcttgcaggagttcagcaatagcacagtgctgcacgcacgggctcgtgacagcgatggtgtggtctggtgacacgggcctacaccacggctcgggttggcggctgtgtgggctaggccgagggtgcagaggggacagcgggagcagtggctcgggctctcccgggctgagcggctcaaagtagaagggagcttaagctccatatataactgaaggttgaagaaaaaggagagaaaaagaaacaggaaggaagaagtagaaggggcaaaatgcaaaagggaacattagagaaaagaaggaagggaataggtacggacttttctagaaattccaactttagattatttggatcttttggaggatttaggatatttggaatggactagaaattgagcaccacttccgaaatacaacttaaatccaagtaactccaattaagaacaagccaatggtgtaattaattaattaatcacattaaactattttgatttcatgaaattttcataaagctatttaaggagaataaaccaaaactaaattttcataaacacgtgcaaaaaacagaaagagaaaaatcaggacatgacactattcaaccacatctccgtgctcctcaacaaggaagccgtcggaacaccctaatccagattgcagatgaagctaggctggagacttgtcgatgctaaaggttttcatatattcattttgcaatctagtagtaggatatggtcacctgtgatgtttgctttggtcaatgaaatatgttattgtaattggacacgtggctagttttgtgtgtaaattgggctagctataagtttttcactgtattgatgttcactgggttgttttgaatgttagtgggctatacaggttgctatcgcattggtcctatgtgggctttcaaaatggtctttgcccatttgttatgtaacatactagattttttaggggtaaactttttgcaaaagtctttaaagttgatgttcttcattctttcgaattggagcctcctaatcctttactttcctttaatttgtttcctctaggtttcctcctcctgcttaacattgtttagtttcttctccaaaacatatccaagatattatagagaaagattcccaaaaccatcagaagagttcatgtttattttaagttatcccggagtcatcatgcaaatattccaacatcccaaatcccatcaattagtattcggaaatatcctaccaaagatccattgaaaaatctcttgaaaaattcaaatggatcattatctctcctgggccgaaatctacct

SEQ ID NO: 27566 - DNA, 3015 bp, Oryza sativa
aattacactgtaacttgcatgtaattacactgtaactatcatgtaacttgtatgaactttcaaaaatctctctgtacatgttatttcggtaaaatggaggtcgtgggaacaaattctttcacatttatgtgtgctatgatttgttttcttcctcaccaaaacaaatcttgtaatagatctaacgattcaaaattatgtgaaacttacatataagttacactgtagttacatggaagttacagtgtaattatatataagttacagtgtaattacactacgattgtattataattacatctgtcaaatttttggggaaaaatttgtcgacaaatatatatgtagtccatttcttttcacttcttccacccatctccctcagtttgggccgttccggcccacggctgccgttggcccagccgaggcagcagccgctcgcgccgccctgcaccctgcccgcgttcgcacgcgctagtcgggtcgcgtgcagcctcgctcctgcctgcgctgctccatgtgccgccccgagctcgtaaccgcgcagctgctcgttgccaatccctcctttgttttccctccttttccaatcctcctcttcctcaaagcaaatgagcacagaagtctgaatcacttctggtttcctctctagacctctaagcgctaaactcgttctattccaaaattttctccagccatagccaagaccggccgtgcgaccaatccgccgtcgtcgaccttctgccgccgcaccacagcactagcaggaccacctctcgtcgaccttctttccctgcttgtatcgagttcctagcatgtttctgtccgccgccatggctgccatcgtggtcggcttcttcggcacctcatctctatcaacaaaccacaaaaatagtatccgctcgtccgggatcatgttttgacgtgctcacccggccacgttcatgttaggaaaccaaagaatcaacaggatcttgaacgaacactctgtgggtgtactatagcgatccggcaaatgtggagaaacgtcatatatttcaagtttcttgtagtgcgtcatctatcataaaatttgttgtagcacgtatatgaattcggagctattgtagatttatatatttcaagttttgaataatttgccttttgctatttactccgccctctagttggtttggtaattttgtcttttgctattagtctctttcgattctgatgctctgcagaacgccacacatcatatgagaaaaattatactccctctgccccaaaatataaaggatgttaggaggatatgacacattctactactatgaatctaatgtgaccatcaagtataggcatacaaccaagcataagaaatataagcattgccaaagaatacatttgatgaacaaaggacctataagatattcaagtccaacgagttttggaatccagttcggcctccgaacacagtactgacttcaacctgacctagctccttgcgtgatgttggacttgttggaaagcttatcttgtcacctttcaaactcatccagtctcatatccaaaattatccgaagtcaacgggaatcgacaaaacaagacagtgttgttgctaaaaccgaacttgggccctagaccttgtaatagactagggctatcttggaagtgtctctctccacctccatgaaccaacacctaatcctagctctattttcctttataaatgtctatgtacaccctctagaataattgggttttgtttagttgaattttactaagtgccattcatcttgtctctagtcctcgctcgattagtcggcgactatagatccagaccccaaatagttggtgcattgatttgttgggtcgattagttcttccacattaattgcaactatttctttgtgcataattacctattcgcaatatttagattgcatcttatcttgttcttgcaatgttctctcgtttgcattgcaagaatcatcaatcgtgcatcatggttggtacgacattgtttgtggtgtagcgattgcacaacgtccttgtcacgcccataaatttagcccaaatttccagactattttgtgtataaatcccgatccaggaatcaagctagggtacacaaaacaacaatttaatatacagatccaaacgtaaataaagcgtaaatacttacagaagaggcacttagtcctcacaccgaatgaaaacagcggcataggcaaatattcagctgttctctaacttcatcttcagctcaaaagcactacacttctgaaaaggaggaataatagcaaggttgggtacaaccaccgtactcagcaaaccacaacaacgttgcattcgtgcagtgggatataaagggaggtttgtgggcatttgcataaggcggttgtaaacatttaaagttgaaaacaataaaaccattgattaattacggcaacattaaatatccactgaacaatgctacaccacgttgaacaggcccaaccaaatcacctgaactacactggtttattaagtcaaattaataataaagtgggactaatcacggtgaatctggttgatcgcccataaccactgttggtaattcttatggtcacagataaaatccgcaaagcacggatataccgatgtagcacttcacccggtgttggtaatttcagctttctttgattttcccgtagtggtatgtactttgacaccatgtagtttactatgttggcataccatgggttggagtcgcgcaccatcattagcatgtcatctctcaagaaatcatttattggctgttcctgtgcatcagtaattcgtagctagacaaatgatccgctacggaattttctactccctttttatccttaatttctaaatcaaattcttggagcagcaaaatccatcttcatagacgtggtttagcatctttcttagtgagcaggtattttagaccagcatgatcagtataaattattaccttagctcccactaagtaagacctaaacttatcgatagaaaaacaaccgcgagcagctc

SEQ ID NO: 27567 - DNA, 13049 bp, Oryza sativa
cccaaatccttcaatgatatttccgtttgggtgcttgaagaatttgtttgtcggggttactgccttattgcttaggtaagcgaatgcaaaagactcagagataagattaaccacgatagttggactgtattgaatgacaacgtcgttcccttctaggtgacaaggaagaactcggggagcggtatttatccgagttacttcggatgaaagctctgcctctcttagacattcatcactcattatagaagtcagctcccgtacagtttctattaggaacccaagttccataggatcgggaggtggcaaggggacgagtggtttctttttactgaagtagttcagggtgttaccatagtcttcgtcaaaaccatccctgaacatgatagcggcatgatccggagtctgaatttcttcattctcaacggctggtggctcgggaactttttcaacaatcgagtaggtagaggtggaaggttcagattgtgactcgattgttgaaggttcctctatcttggacacggatgcttccaataggggttcattgcatggcgtcacgaaggaagtattttctagaatgtggtctagaattacttttccttctgacggcattttgtgcatgaatgatcatccggcagttatgtccagatagaatgcagactccttatttagacccatatgaaaatgttgcaaaagcacatagtcaggtaaggataagggttgtccggactgcactaaattagtgaatctggaccaggctgcaccgatgggttcattttcaatctgccagaaactgagaatttctacttgaagggcagtaatacgagtaactgggaagaaggcaagacataatctgtcttgcaacttttcccaactaccgtttacacatccaacggtagatgtgtaccattgcttcgctctctcatgaagggagaacgaaaacaatttccaccatacagtttcttgcttcatgccatgaatcttaaggcatgagcagacttgctcaaagtcccacagatgatggtagggattttctagatcaatgacagaaaaagagttttccctaaccatactaattagttcagggccaatttcatagccagttgtataaattggctccgatgaaggaggtggctcatagaattcgcacctaggagcagacagctcgaagagaggttgctccatagtcgagaagagtttgatgggaatacttctacaggtagtaggggtaaaggtagaataaaaaatgaaaagagatacaaggatgaactgggtttggaaatgatcagcaactggtccccggcaatggcgccagaaatgcttgttgataatttttacggtcacagtcaaaatccgcaagcgcatggatataccgaagtagcacttcccctacggagtattccaagggtatcgaatcctaacgcaatactttaggcactggcaacccgctgttcccagatgtcgctctactacgtacccggactgggaggatgcggggatggagagtgggatgctcaccgagtgcacccggtgggagaggcgacgtgggaggaggccgatggcgtgtcacaccctgaaaaatcaaaatatataaattgttgtttaaatggaatttttagaaataatttttaaaagcctagaagagaagatctaatttttaattaataaattccaatataaaatggggccagataaaatttcattaaatactttgcttaattctataattcctagatttttctgggatttatttgagctaaggaagtatttttaataaatggaattgcatttcatgaataatttaaattgaaaaaggttttaaaaagtctcttttggctttgggccgaaagtcggcccaaaacctttctctctctcctcggcccagtccggcccaatccgccgcgcgcgcgcgcgtccgcccgctgacaggtggggcccacctgtcagggtcgtcgtcaaccttcggccgccgccgccgaaaccctagtttcgcgccgccgccgttcctttccaaattcgattgatcctttccgtttccgaccgaattgatagaggggaaatgatcctcgggatctcctctaccttttctcttttggaaacatcggctaattcgttttggaagttcgtggaatcgagttcgattcggatcggcctctttcctccgaaccccgaactttccttctcgtcgccggccgccgtgggccttcgtcgtcgccctccaacccctttaaaaggacccccgggctcttctctacccgtcgcctccctcgccttcgcctctcgtcgtccgtagcgccctagcgccgtgtagccttgagccgtcgtcgccgccgtcgcttcagccgtgcgccgccgccgttccagccgtcgccgtcgctcgggaagaccgccgttgtggtcgccaagtcgctgccgtcctcgtccgccgcttcgccgtcgccgaagatcgccggagcaccgccgtcaccgtcgacccgaagaccgccgccgcttcaacctcgtcgccatcgccgtccgttgatcttccgccgctcctttggtcaccggtgagttcgccgtgccgtccgctaccgttggtgtcctccgttcgtaccgaagcgccgtcgttcgccggcgggcttgcgcatccgagctgccgagccgccgccgtcggtggtgacgtcatcgccgaagtcatcgtccccgtctcccgtgagccggtcgtggaccgttcgatctcggccgtccgttttggatcaagtcgatctcggccgtccgttcgcgtgaaccgtcgcccgtgcgcccggtccaccgaaaccctagccgctgacgcaataaacattcttttccttttcaaaaataattcattattgcgtcataattcaattaaaatctatataagtgttttaatccgattaaatcttcaaaaattcataattaattcatcttagctccgatttagttggttcaagtctctaaatttttctaaaattgagatcgacatgtactgttcatgcttgcttatgtgttgttttggtgattttgcttctttctgtttagattccgtcgtttccggagagtccgttttcgtcggagaagagtttgaagagttccaaggccagcaaggcaagtcacacagatcccaaagaaccctttgagcatgttgatcctatttaaagctattgtttctattcaactattgcatttattttcgaatgtcattgggtggaattaacctattctttgttatagcccttttgttcttgattactttattccttgataccttgggttattataacttgactagttgagctttatttattggttcagctagatattagatgtgattgcttagccatgcttagaaacattagcacactattggaataacttatgactcactattatttcatgatggtttactgatagctcacgatggtcaatcgtgattggttaattaattaatgtgccaactaaaacctgataatggtgggttgtgagcacatggttttgatggtcgtgctcatgacaattaaggaccggttcacgagtttcggttgtgaaacatttaccgtgccaaccacaagctagggtgggcaacggctttaccttttgtatagcgtggttcattgcggagcaccagactgagaagtggcggagataagcccacgggggttcgctggggagtccataccttgtttataagggggtgactatgatccgggagtggtgcactgtggtagattgtgttgtacgagaggtaatgtcacaactcttttccgaggtaccgtggtggtattgaggcacatggtgacatgatgtggggttgtgtcttgtgggtacagtggtacacctctgatcagagtaaaactattcgaatagccgtgcccgcggttatgggcgggtctaacaatgtctttcgtgattagtttcacacttctcaccataataaatgatgctataactggtaataatttgattagctcctggtttggaatggtatattcctggtttggagatagatctgtacagccgggtatggttgttcagaatggttgggcctatacaacagggtacgttgtatagtgttggattaatattgtttaattattactcaactgttttattaaattctcaaatgtttgctaaatgctgcttttggaaatgaaaacctattatgccatcctttgttatcctgtgcacttgcatatttgctgcgtggcttgctgagtatgtcatatactcaccttgcaatcattcatcagaggaagagttctacaatgatgctgatggtgtggaggattaggtgtagccttggtcaagctgcctgtggagtggagccgtctgcgccgtttattttattttccgctgcttagatctttattgattgagaggaactatctacctctgtaatgactttttattcgcctcttaattagagtaataattgtactctattatcaatttgttattgtgtgcctcggctgattcctggacaagggttcacacacatgtaagcgtttggaattttggatagaaattccgggcgtgacatggcggcaccccaatggggtcacggtgatggctggttccaggagctcgcgacaaagtaggagtggcagccagggatcagcttggtgatgcggagccggaagaggaggcggagtggtccaacgtggtcccaaccgttggcgacgaatggctggagacagcaatggcgagccgtggcacgagagtgtggtggaagtggcggagccgatggattttggagaagcggagcggtgctcggagtgtggcactgagcggcagagccagcggtgctggcagagtggagcggaggtggctagggcggcggcaagcggcggtcgcagcgctctggcaagcagcggcgcatgagaacggtgcggggagagtgggagagggctcgggaagctcggacaaggtaggaaaaatgtagacagaggtgcggggaagggttttataggtttaacagggtgaaagggagccgggtgaggcaaatttggctggcaacggccagtgaggcgggctggcgatgtggggctacgcggcgccaaatccacgccggatttttaggaaaaagttggttagatgagcggctgttgcgggcgagtgggttgttgacaggtcacctgccgaatttgggccaggccagcccagcccatggttcggtcgaacccaccgtggctctgttcgatgcagggtttggatggatggtcaggattgctcccctatggcggttggagggtattaccgacctttccaaccgtcataaccattattctcaagctatataaagccctctcattctccatttcaagacacacctcaagcaagaagtctatttcatctctcaagtttagtatattttctagagtatagtggaatagaattagaatagaatcttctatcctcggagtcttcggaagaattcgggtatggctctagtagcttttccttcttgtgtaagacttgtactttatttagaatactgttctttatactattatggtattgtattactttccgagtatatgaataccaactttactatatgtttgagttatatttattatgatactagcttatttgggagatacaatggtgtgggtataataattgtatttacgatgactctatgtcatgacgatgatattagagtagtattcggtaatttaagtgtggtgtttagattactggatatcattatttggggttatatgctgcggaagcgaggtaggccgctgatggtgacagctcagtacaggtattcctccgcacatgtatatagtcctaagttaatttcctggggagggtactcctccgtatttagcccgattgtatggtcaggacagattgtcgtaaggaactcagcacggattaggggtactcctccgtaattaggggtggcttctcaaagcaccaggagagcatcagatagagtgtattagctaagtaataatataactaggatgtatatataatatgtatgtatactagaagtgtagaaataggatctttctatattctttccacttagtttagatatcatgagcaagaggatgaatgcttctacttagtgtcactctacccatttgaattatattaccccctacttagactttgattattacaagtaatatataaattatttgtatggttctctctattataatattcccacaggattaaacaaatacaatacccttggaatactctcgggtgaaatgctattatggtatatccgtgcgcttgcggataaactctgtaaccataatataccaggagtagttctacactattgctggaattatatttctagtaatatcgttaagaaataccaacatgagtggagtggggcggagggttcccgtgcacgcggagtgggcaacgacgtgtggctggctgggataggaggccggaggctggggatgacaagtgcggccgccggtcccacctgtcgaagggaggaggaggggagactggttgggggaggtaaagtagacttcaagggagagggggctgggggaggttggaggtaaagcgaactttgggctggaacgtcccaaagggaaggcggggagtttaatttgtttttcattttatttaattgatcaaataaactttgtattattaaaattacttatttagctccaaaaattcacaggaaatttcagagaatattttagggcacggagaatattaaaaaatatttttggccattatttttaaaggaaatttaatttcccacattaattccacttgagaacttgttttaacttttaatataatttctagaaatgcattatttaatgattgttaatcccaaaaaaaatcaaggcgtgacagtcctagacttgttctgtttgatagccatgccgcaaacatcgcatttgattaaaacaagagttattccctaactagaagatcgggtctagaaaagcatgtccagattttgtaagatatgtcaaattcatcaaaagacacttatattttagaatgaacggcctcattaattctgcaatacgtggacaagactatcactgcaggcgagccaatggaggagactagcttaccaatgcctttcctaagtcaagcctacgctgcgtgtttgtttcccctttccagggttacgctccaccactcccgcaagtccacagtacgtaacgcgcgccatacacccttgacccttcatcgaaactaagttcattgtttaatgtttgactatccacgctccttacttggtaaaattataaaaaaaattgaaaaactaagtcatgtataaaatactattcaaattttaccattttatgataataaaaatattaattataaaaataatttaaataagacggaaacattgaacgatgattaaacattgaacacagtaacccattattttgggacggacgatgtacactcctagtaattaatatgccaaccaggcaacggccggaatgatttactatatatcttctgcaacaattctgatatcccccattgctatcgcgtccgagttcagaacacacaaaaacacatgccatgccgtgtccgtcctgtcgctgcaacagcggcagcatcgtcttcctcctcgtcgaggtggtggcgatccttttcaccggagcgacgtccaaagacaccacgaatccattcacttcgctcgactgcccctcgccgccaccctcggcttcgccgtcgccaccctcatcagcgatcaacagcacgttccaatccaacgtgttggcgctcctcgacgacctcccttccgccgccggccccaccgggttcgcctccctgtcccgcggcgaaggcgccgaccgcgcgttcgtccgcggcatgtgccgcggcgactccacgccggacgactgcgccacctacctccgcagcgccgtgctggacatcaacggccactgcaactccaaccgccgagccgccatctggtacgacaagtgcttcctcagctacgccgacaccaacgcatccaccgcctacgagaacagctaccacgcggagctctacaacgtcaacaacgtcaccgacaaggtcggcttcgagaggacgtactacgcgctgatgagccgcctcagggcgcgggccgcgaacgacacggcgcggatgttcgccgcgggagaggcggtgtacgaccccggcgccgacaacgggacgatgtacgggctggtgcagtgtatgagggaccgcacggcggcggagtgcgaccggtgcttgaacgactcggtgcagcagctgccgagctgctgctggggacaccagggtggggtggtgctcggctacaactactacgtacgcgtcgaaatatacacctactacgatctcaccgtcgatgcgcagccgccgtctcccggcccgtcggcctccagctcgaagccgtctatcggagaagggcagggtgagccagcttcgattctccagttaactgcacttgtacactagtgcatgcatgttaatttatcatatactaggacttaaagagttaagaccttctgctgaaaaagcttttattttcttagaaaaaaatattttactaattgctatgcgaactattttcgaaattcttttcatagaactatattcattatatctgtaaactactgacaccggttttgagtgttttaacgggtccttcctcccagtacaatgtgaaacttgacctagtcaaatcaactccatgcttcacgctaattaagtactctctccgaattgataatacttgttgataagggcacggtcaccaaaaaaacaactttgaccattattttctattataatatatataaagtgttaacaaatatatgattttattaaagtactttttaaaactaatctatacatttagtcgccatatttgaaagtcaaatattttaaatatgattcataataaagattctaaagtttgacctctccctagtttaaacgacaagtattatcagcccgaagggagtactactactactgcttggcaaaaccgtgttgtaaaataaattagtttgggataaaaattgtagtaccggaataattgattttctagatatatatatatatatatgctcttttttctcgattttttttttttgcaaatcttggttaaaaacctgtaatttcaaagagttttggtcatgtcttgctctgcccattgctaaattagcaagaatatagctgacagcttgattcatatacattagcagttaaacaaggtagcaggataattaaaccctattatggcaaagttttttttggtcaagtcttgctttatgaaagtgagctagcttaggcagctgtccaatcctaaattagctacaccatgttcctttgtctcaggataacttaatctaagatgtgatgtgacccatcctagctaatattttcttcgtcccagaaaaatcgtattttgtggaagacccatatttcttgcatttgttcgagataaaaaaaaatctatcttacacagttagaactgatctattagtatgtggtcccacctgtcatacacacattgcgtcttggagtccgtgctacaactagctacagatctgtagcccactgctcttctttctcatcttttatctcattaaaatatattttgtagctgactaatagtctgctattgtacctactctaagccacatgctccacagtacacggtagccaatagtgggtcccactgggtctcttttccatatcccaatctctctctccgctattacttttttcaccagggaatccaaggcagctcacgaaggcgccgagcgtccaggcggcccgagtagcgacggtgctgggtggcggggtggtcaagcggcgactgcaccggcgaagcggcctgagcggtcgagcggcgtggcccaagcggcgccggcggcgaggagcgagcggcaactctcccgccccttcctctcctcgtcggcgccggaatgcgccggcgcaaccctccccctaccctcctcggcagcgatggatgctcgatgatgacgaacttggtccctctcggcagcgacggatgctcgacggtggcgggcatggagctcagtcggaggcggacttggacctcctcttcttgtgcgccgccgccgcttccatcttcttcgtggagttcgcccgcgacctcatcttcctcgtggacgacgagcggcggcgcggtcatcctcgcaaaggtcgccgccgaccggagccccgtcgccgtcttcgtctttcttgcggagctgggatgagcggcggcccgagcggtgacggggcagccagatctgccctgggcgtcggtgtcgggcgtcgcgcggaacggccgtgttgggagtgggggatggcgagctcggcgggggcgtcccaagcggcgaaggcaacatctcaatgccggcgccacctcaccatctctcctctcaacgcaacaccgtgcatcacctcagtcctctctcctcggccctttctcccttctctgtggtgcaggacacgaaaatgtgggcccagagttgccgattctgacgaggtacctgtggcaaaacttggctatgcattcttcctgaagcaagggaatagtccgacctggaatgaaatctttgagctggccggcttgggctgagtgtcacatcactgcattgtgaatgacctaagacaacatgctggtggtccccaatctgccatcccaccaactttattctataccactttcatcctaaaatatatttcctccgtctctcaaaatataagtatttttagactttgacacagtcttcgagatgttaatttgaccaataatatctataaaataagatgttttaaataaaaagagttgcatagtataatactttgtttaatgataaatcaagtaacatcaattttacatgattgatcttttttatttttttctattaatatttaaagataaaaaatgtttgacttgatactattctaaaaatccttatattttgggacggagtagtagcaattattagttatgtatcttttcagataaataaccaataattgttataatttggatggtggaatattatttgtataatagaatatgtatgtgatatttggcatattttataattttgaacccaaatgagacctatggaatgtaaatatcttaaataaaaaaagattcatcgataggatttatttctttgacaaatagataaaatatagtattaagcaaatatctttgaatttgtttaataatttaattggacataagaaagaattgattatgggtttattttcattatctttattcaggttgatttatgttttagtttgtaaggcgtataaatgtatcttagttcaatttgggaaaataatatttatttgaaagaatataacattttatttgtaaaataatttattttagttttcgttcaaactaaaataaaagcatatatcattttgattgggttatcaattgctcagcccacagaaaaccgtcatcggtgcacaaacaaaatcaactcagcacggtctatcacattcgcctcttctctcgatctttctgctcttgttctttcttagttttccggcggttctatctctcctccaagacaaatggaatcctctcccctatgcactctctatcctcgcggtggagttctccaataccttgatcatcacctatgcccacccttgccttctcttttcgcccggtctgtcggatctgagaatgatggtgtttggggatgtccaatccactcagtggcggtggttcttggggccgacagatctatgcatgagaaggcataggcttggcagatccatattcttcctgccgcccctttcttgctctgagctcaaagcctgcaggaatgcaggatgaggatgccaccgaggcaacttctgtaggggatcatgggctcatggcggtggcagatctggtgggtagaggacattgtggaataggagaaatagaatagggaaccggtggccgagatggagaagggagagggggaggcacagtcgcgcagatggttgatgactgataacgcatcagtaggctggttgcttggccatggtctgcacactctctgtttttatcaacctacgtttttgttgcaactcctgtggttcggttcttgtagctttcattaagtcattataaattcaatttcctaataaatcattaatcatgacatcccaatcttgttttatgtttattatacagatatatccagaggaattgtttcgaaatatcacaattaatctgttcaaaacaatattaccatatgtacaactcatatttacccatagcaaatcacaggtaattagctagtatttccaaagttaaaatgactaatctaaggtatagattggaaaacaagttttctatctgtatctcaaattattgtattaaagttttgttgatcaaatgctccactgatattcagggaggattcaaagaattttgtcgtgtatatttctctttcaaataatagctttcaagctttcactccaactaatcatgcaggaaagaaggggacaaatgtgattgttgccaccacagtttctattggaacaatactactagtggctgtctttattgccgttttcatctacaggagaaagacaacgaagacaatgataccaccaggtatgacatgcactaaaaaaaaatccattttggaagacgaacccattttactttacagacggtacataagaacgtctgttctatacatctgggcccgtagtcatggaacgcttctacacattgatttttcgttttctgctgccagattactagtataccgatattaccataagataagtctaaatctagaatctgtcaaaataattatctcgtactcaaactcatatataattcgcattagatccgctcgaaagaatttacataagcttacataaacataacataagtttacataagctgacgttatttaaatttaaatagtatgtagaatgatgattcaaatgtaaaagtaatatgatgtggtttatgagagaataaaagaaggaagataatttagatcatacatctacgggctaaaaaaattaaaatgatatggcttaatgagagaagaaaaaaa

SEQ ID NO: 27568 - DNA, 1464 bp, Oryza sativa
atgtcgccggagtatgcctactgcgggcatgtctccactaagtcagatatgttcagttttggggtcattgttcttgagatggtgaccggtagaaggagcaacgggatgtatgcttccaccaagtcagatacttatgaatctgccgactccacgtctctactgagctacgtgagtacatattgaggactaatagctttagtttctaactatgtttagagaaaaacgtacgtacatgctctagcttccagttcatgaacaacgagctccatcattgtgcaggtatgggagaaatggaggacacgatccctagctgacgcagtggacgcgtcgttgggtggccgataccctgaaaacgaggtcttcagctgcgtgcagattgggctactgtgtgtccaagagaatccagccgacaggccggacatttcagctgtggtgctaatgttgagcagcaattccacgtcgctgcagactccttctaagccggcgttcttcttcggctctggcagcatcgcaagcttggatgctgctggtggacatgcatttttcggtggccggggttcagaagttgcggccatcagcagtaacaagatgtccagtaaccccgtttcagagaatgaggtcacgatttcagagcttcaaccgaggtagaagaacaaatgcgtctgcatcaattgtcagtattcaggacacttgatgtcccccgaatatcggtggtaatatggcaataatgtccaacagataagttagtgttcagcgtataaattattacactaaagcctctccaaatctctctaagaatgcattcccggtatgaaactaatggaaaagctataatgatatcgattagatcgcacattttgatattggaactactgaaatccttcaaatgatctgagtcgcaaatctcctcgtacgggacatagatgtcatgtccataaattaagccaatttttagactgtcttgtgtatgtctctattcaggaatcaaattaagataaacaaaatgataaattaatatatagatttaaacataaataaaacataaatactttacaaaagaaacatttagtcctcatccaaaagaaaacaacagtacaaaagggacgatttaagcgggcttcagctctactctacattaaaaaaaaaaaactcaaatagggtataaacattggtcctctaaatccttctatagcttagaagcacaagtcttctgaaataagaattaatagtaagattgattacaaccatcatacttatcaagcaacactaatgatgcatacatgcaagggaaggcaaaggttggttatcactatttgcgtaaaggccgttgtgaacatcttttagtttaaaatagtaaaatagttgattatttaaggcaagattaatcttcactaaacaatgctacaccacgttgaacattccaaccaaaccacctgaactacaccagttcactaagtcaaatta

SEQ ID NO: 27569 - DNA, 5700 bp, Oryza sativa
  unsure (1)..(5700): unsure at all n locations
atttgcttttatgcatgaattgaatgttgtacgaaaggactgtcaacaatgttaccatgtctggttggacacgtcatgatgcaagtgattctgacaaaaccctttgcataaccctgcgctaaccatccacaccacgccgatgtttcacctacacccctaaaccagggtgggcaacccccgtatgccgcccttaaaccaaggccaacccaactcaatcacgcccatccttgcctagatgtctatgatagggttgaattatactacaggtccagttgttgtccactcttgcttgttgttgatagtcgtgaagtaccaattttgaccaccaaatatcataataaataacaggagaattaacatttcttacacgtatatcagtaatgaataatgtagttgtactagacctggagaattaacacgaattaacatggatgcgtaattcatccaatgggacacgcttagatcgagggattgggatagatcagtggctgcaccgagacagtataaatcactctatatctaaatgcgccctgaagcagggattacgcatgctgacagcgtagatgatggagcaaaccaaacctgcatcagctaatactccgatactacctcatgctaagataccagcacagataaaatatataaaactgaaaccaatctagcaagcacaatgaactagcagatcgataggaagcttaacatactttaaaaggatgggatcttggtatgaggggcagatttagacgatccatgaccaaatatggaagtaaaatgactaaatcaagtaagatcggctgaaactctgatactatctctattagtagtcaaagaaataactagataaaatgtttcaaaacagtacttaacagatcgaacctaaccgatgcagcattaagcgtggggagaaacataagacctaattaaatcaatgaaaactcattcaagatggtggatataccgtgtaatctatcctaatatcaaagcctaagcctatcggccttctccgatgatggaggctagctaatgaagcttagataacgagatcaatctagattacgtgatatatatgataactcggcggtttgcgtggacaagattagagtgtcacgaagatgtaagcactaatcccgagaacgtaagccgtcatgacaagatttacctcttcgtcggagatcgaacttgatgcagcccaactcgaaagcaaaaactcgtcgaaacaatgaaagtagaaaaaatggtggtgatgcgccgaagtgtattaaactgtcgtcccttgattacatggggatgggtcatatttatacccggagtacatgataggtccttgctagacatgactcttatctctaacgcaaattaaaatgcgaatgagtccttcaggtggacccttaccaaaatatctctaaggaaactagaaaatgtcctattaatagatacaattgcctcttttaggacgcctatcctttgtggcaatagctatgaatggcttcaactaaccggacgacggtcatagggccaactttcccgatactggttgcatcggtttggcttcatcggatccggtgcttagccgatatgtcgcagtcgataccattgtagccgattcgcgtggcagctgatgctgtttgtaaccgatgtgtactctgctttctcgaacgtactttttcaaatcggctttgttcccaatttcgaatccaatccatggtattaccaaatttggtcgttaacagtctggtagtccgggaggtggaagatgatcctgtcaatagcggcagcccttgtaacggactaaaatttttagggaaaattttttgcgaaatattttaagtcatgctcttctcgattcttcctttgagtaatttcacttttgatcttttctttgacttgagtctaaactttatttgctaagttaaaagctttatttaaaatcccttggtaattttacaaaacctttgcatttattttttttaatctctaactttggctctagaatatatttcctttgactccttttccgaacatctccaacatccacaaatacccatttaatttccgctcaaccatctctagagcacatgaaatatcaatctctttagtgttaatacctttcatttagagcttgccacaccaccatcaaatctagttttatctctcaccaaataccctccttttgatctctaaccaaacacatgaaataccaatttttattttttttcccagaatcaatacttttcttttggatctccacctaaatattcccatagtccataaaatatccttttcaatctccntgagtcaatatacctatcctttagaagtatatcaatctaccacaaatttcgttcttgtagaaattcccatccacatatacttctgaatccagttctacactcccacaaatatttcccctttgaaatccccatttttcttctttatacaatacctttcataaacccctttaatattcccaaactctcctattttaatcaagccacccatttaattcttatggcttgatttcctcctcggcacaagaataatattatcacaatatttagagtgattgctcttgtgctaagaaacctatttccaatccttttcattcagacaatataaatttcctttagccacaaataattcactgagaatccataccacatattttggaggctaaaatcctagttatttacctccatctatttttgccaccatcccaaattcatccaaagttagaaattaaattattgcctttccttcccatttgattatttttgtgacaagttttatatttggttcttattgaattttataaaattggagcatctttatttttaccccttatcaaattttatatctcaaaataaatatctttgattttattttaaaaatatttcaaacccccttttgcttcaaaaaccttatattcaaattccttttataaaagttcaaaagaccctcaaacatccctcttttaaattttatctcctttaaaacctatttaaagccttccattcaaaatttccctagttttcaattcctttgaatcctattcaaattccttgaccaagattcaaaaagtccacatccatctatcctttagttttcatctcctttaaattccattccaaatcctctatacaaaattatcaaaacttcctttttattttgggccaatttccctttcttttggcccattccccttttcttctcctccctccttcttgggctgccggcccaactgagccgaagcccgccgagccggctcacagccgtgccgcctccttcctctctctctcgatgggcgccgccaccgctcgccccttcccgatgcgccgccgtcgacgccgtgccgtgcctttcctcctccgccgcaaagccaatccgccgccgccaccttgctgcaccaatccgctgccgccacgagccgccgcgagccgttgccgaccaccgagccgccattacagcaaattaaacgccgacacgcgtcgccgcctttttctcgacgacgagccgcgccgtcgccggccatccttcctccaccgcctctccggcctataaaaggcgaggccatcccttctgtttttgccctatccgagcttcgagctccctctctctctctctctctctccaccatgaacggtcaccaccaagtcactggccgatctcctcccccgtagcctatcttccaattcccttgcaccactagcttcccctcactccggcgaatccattttacccgttttccccttccttttcctcttgaatccagccacaccgaagctctctttctcctgaccggatcacgcaatatcttcgccgttccggccatcttacccttcctctctaccagccactacccctcctaggtgcgcgatactcgggaacacgcttggacagcgccgtcgaggccgttcaaccaccggagcaccgacgccctgtctccctctctctctgttgttgctcgggaagaagaaacagaaagagagaaggaagccggaagaaaggaagaagaaaacgagaaaggagaagacactgacagcggggcccactgcacagtaactttctttttcttttatttgatttttaatctttaggagcccatatctcttcaaccattgatccaattccaaaaaaaaaattctgtgacctaaattcatctaatttcaaaccctctcttttgataccaaattttctatttttaaaattttatttaaatttgtttatttaaataccttttcttatttatttatttaatttctaattttgaactattttgattaacctttaaaaattattttattcaaatacctttacatccctttaattttaaatttcttgttttatttaaaaactttaaattatcctttaatttctttaaatgcccttttctttattttaaaataccattttaaattttaatctatttttgaattcaaattcctttaatttatttttaaactatccatataccatcttttagcagttatgctaccaaccttagcatcggttaaccacttcaaatatctaaccgtcgtgctactccattctagcaccggctagaaaaccaaatccaccaaataaaccccacctatccaaaattatcctttcttcgtttttattcaatttccaacctatagaaaccatcacctctcttttattttcaaattaaaacttattttgaacccattcctttttcctctcgcctcgctccaattttatttattccttagtttttatcgtttctttgtagcaatttacttataggctttatttgctatctttttcgtattcgtacgttagaccgtacagcaagttctatcggcatcctaggaactgacgtggacccagatggctacgctgaagccgcgggaaatcttaaggcgcaaggcaagacataactaaaattttgatcatatagaaaccttgatataatcttcatatttaaatttgatgcatggttttcactcttttaacatctcataggtagatgttatacttcagaataacattgtgataattattaatgctttctagcattattacatgaggttattgaaaaggtgcatttaagatcattttatgtggtttattattcaaacaacttttcaaacttaggaatctggttaaaatgggcatttatgtaggggcgaagccagaatagatggtcaccggggtcactattaattaacgatcctaacaattggctatagcttctaataattttaagtctattgttgtagtagtagttaccttttacatatcagggggtgtttagatctaggggtgtaaagttttagcgtgtcacatcgtatattatatagggtatcacatggggtgatcgggcactaataaaaaaaactaattatataatccgtcagtaaacaacgagacgaatttattaagcctaattaatctgtcattagaaagtgtctaccgtagcacaacattattaaatcatggagcaattaggcttaaaagattcgtcttacaaattagtcgcaatctatgcaattagctaattttttagcctatatttaatacttcatgcaggtgttaaacgttcgatgtgatatggcgtaaattttttgtgtgggaactaaacagggcttcaattacaaccacatcattattgtactaggttacactatttgggaaaagaatataacaacctcttatatggtgaaaatcacctttgttata

SEQ ID NO: 27570 - DNA, 772 bp, Oryza sativa
gttatattcctgttaatagtgaaatttggtaatcggcaaagacgtcatcggcttagaatcattatcggctgtagcatctcggaatcagccgatgggagttatcaagtcgccaatagtcggattcctgctatatttggttaaggaaatcaatctactaaaggaagcttattcctaagtgaccgagtttaaagagggtgcggcatggcagtttatctattaattaggaacagtttgttagtttccttttatctttaggaaagtatgtttagtgtccgataaggactttatattttcattttatctttaggttagtttctttcttgtccgacaaggacctgtatcaacccatgggtataaatatgtacacccggggtctatgtaatatatcctcacgatcaatacaattcggcgcatcgccacattttaccttttctactttattttatcgtccggcgggacttggcacctgacgcggggctgcatcggtgttcgatctccggcgaaggggtaagtccaatgtttcgtcggcccaggcaattctcatctacgtcggcgtcgttcaaggctgcatcaggacattcgacctcttggattactctggtttggataatatatttgcttggatatttatcatatgtctatgttaatccagtcctagcatctcaatttagctctatcggctgtctctcgctttagggtttctgccggtatcggttaaatcgccttgctagattagattagcctaggcatctaccaccctgaaaatcagtca

SEQ ID NO: 27571 - DNA, 2951 bp, Oryza sativa
agccctgcaagtagtcatttgttgtattaaaattaattgatatgtataattaatttgttagttaaacatatggattatgcagtgaaataaactttgaggcagcaattgttatacgagcaagatggttaaaaaggagtaggcggaatctgataaacgcaggtaaatattttgtcatatttatgtacgatatggtttggttgtattgttttaagtattacatactcttttacttaaattaattgccatagttatgtttaattacgtgttttaattaattaatatgtattaattttattgtcatgtgtttatttttttggtcaaagttgtagtaaaattataaataataaattgcgttgtcatgtattcataagtaaataatttatgtttacataattatttatttataaatttttttattacaagtacatgaattttttataaataatatggaaatataaataattagttattgataaagatttttttatcaaaaaaacagtatgcgtgtaaactaatttttgtcgtgaataggacacgtttgttctgtaagacttccttacggagtagtccgtgttgactgcaatggtaggaatgtcggcatttagagtgtatttcggtgaaggtgaaattatgaaaatgaaagtggtctcgatctgagcaactttaggcaatgcacgctataccatccaaatcctgacacccttactatgcccgaagtttggtactggttaacatgcacattttctttagatccgggtatatatagtgttaacgtgagggttatgtggagccgatcggctaacaacataagataggagttaaaaaatgtgacacggagtaaggcctggcaggattggctcgctggctgtaggagacggggatatgaatatgtcatgctggtgctagcatgtcaaggaagagtccctacggagagcgctgcagggcaatccagcaaccgtgaggtgttggggtctagttcacacgaagaagatgaagttgtagctccccatcgtggtggcgatgttggtcctgacattcaaaatctatccatacaaggagatgaagtggtcaaccgccatcctactggtgaagccgatgaaggggaggacatacctgctatagttgaagaaattgagagggtggaccgacatgcagtcgaagatgaggaaaacctcactgctgaagagaatgatgatgaagatgaacaagaagttgatgaactacctatgcttgcttcgtggaaccttgaagaccctggttatattgcagaaagctcttgtcatgattcaatatggttatacggggatggccaaatcaatctgggtgcaatgttccgtgacaaaactaggttgcaagacacagtgaagtcatggtcattccaaatgcaaaggcagttcagggttgtgaagtctaacaagactgagtacacggtcgtctgtgagatggaaggttgcaccttccgtcttcatggtcacgtgccaaagtacgagtcttactggattgtgtccaaactgcaggaacactcctgtctgattcggaacactagggagtcgcatcgcaacctgaccgcggcatatgtcacgaacaagtactacaaggaaattattgaaggtgatgacctgcctgtgcggcacataataaaactggtggagaaaggtgaacaatacacaattagttaccacaaggcttggagggcgaagcagaaggccatggagaaaagatatgggacatttgaggaagcatatgacacactgccacagatgcttaacattctaaagagcaggaaccctgggacctatgttgctgtgcagaatcgggagtcaattcgtcctccaaattattttgtgatgcaatgggcattctttgcattcggagcatgcattcatgcgttccagtgctcgaggccgatgctgtgtgtcgacggtactttcctaactgggaagtacagaggctagatattaacagccgttggtgcggatccgaagataattccagtagcttttggttttgttgaaagcgagaactacgaaagctggttgtggttcttgcaacatctaaagtggggagtggtgcaaaaacacacattgatatgcatcatacatgaccagaatgctggtctgttgaaggcaatcaaagagctccaggaggatggtgatggtgcatactactggcctgacatgcacagccattggtgcatgcggcacatgggagccaagtttttcaaacaattcaatagccgacagctgatgaacatgttcaagcggttgtgcaaggcaaatcaacctacaaagttcgatgagctttggaaacaacttgacgaggggacaaagacacatatccggtcaaagcagaccaaccacaccccgaaggatgtacatgtcacccaggccctggaaccaatggatgatcttattccatcaaatggaaagaagcgtaggtcatcaaagaatatcaaatgttttacccattggattgagtgcgagccgaatgataagtgggcactcctgcatgacactaatggggctaggcatggcataatgaccactaatcttgcagaggcgtacaatgcggttcttcacaaattaaggcctttacctctaactgcttttgttgaaggcattatgcacaggacaacgatgtggatgaggacgaggcgggccgcggcgttgcaacaaatgtctaacgcacaaacacctttctgcaaaaagatggcagagtacctccaagagaaggctaacaaggcaagatttctcacggtcattaccaatgggaacgtcagacgaaggtgggaagtcacatgtcgcactaaggggggttttggatcttctactggggtcatcactcatgaagttactctagggcacgaatctgataacaaatgttcgtgctcttgcaataagccgaagcttcttcataagccatgtagccatgtccccggccgcgtgcgctaa

SEQ ID NO: 27572 - DNA, 8026 bp, Oryza sativa
ttcgcagcacaaccggaacgagtacccccacatagctctacgcccatcacctctcaatggtagggtgggtttacgtcgtttgctggtacaggatagctcatcaatatgctaattttttcccaattgtttatgtgaaatgactaaatgatgttttccaattgatgacagagggaatgtgaatggtccgtcttgtgcctcatatgcctcctgcaaggccacatatgattcctcaaatggctcacgatgtgccaacctcactctggcaaggaggatttgcaccatttgcaggtccgtgtacattcagtaccatattggcatgcatatgtccactcgtaattttactttttgctaattaattgcatatacagggactagccaaggtatccctaccataccccaattgtctgcagattttatcagttaaggagggtttacgtcgttaggcggtcagtctccacttacatctaatttcatatttttattatttcaatttattaattttgcatgtatatgaatcttattgacaatttacttcctgatattaacagggcctactcagtcggttccactgcatgcacctacatatggcaccaacccatggcaaggacaatccatggattacggtggtacgctcagccatcattctccatacacatatatcgatggcactttcatgccatacatgactcccacttcaacttaagacaataactccgtgacattttatatggatgcaaggcacgtcgtttggtggtggagtacagggttatatggacttcttgcaacaaggtgattggctatttggtcaatattcctcgcatcctaatgaaattccatatatgcaagcactgtcaacaggtttggattttttttgtgttattgttgtgtgctccagctttgataatttcattgatatctacattgcttctgtagggtcatttcgccctaaactaatgtcagggtttaggccttacactgcatcataaggcgacatgtccagcttcggtggagggtcgtcatcggtacccaacgagcttcggacttcacaaattgatgatgcgccccatgtgacacagcccacacaacaagaggttggcgaaggaaacgacaatgacccgcgtagatctaaccgtgagctccatgagccaaaccgtctgtcactctcaggccctcgacatgccgcacgagcaagaaaaaaaactacaaaaaagcgagctggaacatctaggactacgactgaccatgatgatgatgacgagtagaagtgaacattacgtctttcagttcacctggcaaacctatctgaaccttgctgtgattttggctttctattactagcaatgaacattatttttttggactgcttattcttcatgttatgtaccatgtttcgtaggtcataaatatctcatatttttatgccctattttgtatccagttaacacatatgatttttggtaactaataatttttcgtacgagagcttacaaaaaataatagtctcacaaactaaattaatagtgcagtttcgatgttactcgtgcggtaaaaattgcatattacttttactttttactaatatgacttaaattacccacttatgacttaaattacccagtaatttcttttcacagagatgcaatgatacgcacctaaaatggcatcctctctttccaatcacgggacatgccacagagaataaaatcattcacaattaaactttgaagattccgttgcgctgcgccgaaagtgacttcgtcgctttgtaattaataaagcaaacagttatgcagcatgtgccgccgaaagtgatgctgttgctttgtaattattaacttcacgagtgaaacagtccgacgctattgaattgattagtctgaagctagcagtccgacgcgccgtcgttctctttctaataattgagattgcgcagcttcttgccatcccctataaataacaaccaaacgtagcacacaactacatctcttcttcataaacgttctgctggttccaacttcgtgttgcatattcttaggcctggtcttgaggcaggaactgagtagttggtgaactcgctctatgttgttcgttcactcgcgacgcggttcctgtcccaagaccgagtctgtgaatatacaaatgtgatttttttaatacattcttacacccactctttttttcaagttctagcatccgtttgtgaatatgacctactcctgcaaattcataaactcggtgttgcatattcttaggcccggtcttgtggcaagaactgagtagttcgttaactcgctacgcggttcttgtcacaagaccgagtctgtgaatatgcaaaggtggttttctctgtgaatatgacatattctaaattcctattctttgtcaactttataaaaattgctcccgaatgatctctctactcctttatatatttttaataaatatattatcaatttatatttttctataggtaatatattgtttctttctctgatatcattattttgcaaattccaagatatttatttttcttctcgtagctgtgtacacaatctttgcctattttcaatataaacatatttctcatattcatttatgtatatatatgttgcacacataataaaaaaaatatgaaaaaaagttatactttctactccctccatcccaaaaaaaacgaatctagtactacgttggttttttatgggacggagggaaaaaaattatgaaaaaaattatactttttactctcttcgtcccgaaaaaaacaaatctagtacaaggttggttttttttgggacggagggagtacgtaccaatggcgacatgaaatattagcgatttgcacaatggattaatgtaattagctgatcgctctcgcgcgcggggagagccatatcgctcgcggtctcgctctttcaaagagcgagaccgaaggcgtcgctgtcgcactgccgtctcccaggattagcagatgaattaggggacgtgggccacgccgcaacggtatcgcggttggaaagagcgatatcgctggcgctctcattgacacgtaccgcgagactgactcgctctcgctatcgcgtagcgcgagaccgctcctgtcattcctcgggccccacatgtgtcagtcagcacacgccgctacggtctcgcgcagcccgactgtgataccgcacgcgctatcgcgcccttgaagagcgagaccgcttcgtgccccacgtacgtcaggcggcgtcggacggaccacggtatcgctttacaaaagcgcgagatcgcctcgctctcgtgctttcggagcgcgataccgatgcattagtgctccctcactccaaattagtgatagcgccaccgctttcgcgcacgcattacgcgatgccggtatatttccacaaatcccgccctaatcagcttattcttgcaattccattcaagaaaacgattactttcaaaaaattttctgtgtgggaagttgtcagctagggactaatgtcagctcatgcccagagtttttccatttaggccctgtttatatccactgagaaaatttaacaccttgtcatgttgaatgtttggacatatgcatgaagtattaaatatagatgaaaaaatagctatttacatagattgcgtgtaaattgcgagacgaatcttttaagcctaattgcgccataatttgacaatgtggtgctacagtaaacatttgctaatgacggataaattaagcttaataaattcatctcgcggtttacaggaggattctgtattttgttttgttattagactacgtttgatacttcaaatgtgtgtccatatatccgatatgacatgccaaacttcacacccctggatctgaacacagcaacaaaaagctataaatcgaatgtctgatattttgcaaaacatcgaacaatgttgcattgtattgtttaaaatgtttcacatgttgcactcctcaatgaaaaatgtttcagatgtttcatcaatcagggaaaatgtttcaggtgtttcatcaatcagggaaaaatgtttcatcatttcaacaaaagtgtttcaatcaaatgcaatcgaaacatatcatttgcaagatgaagaatcaatatatgcaacatcgaatcaaaacaaaatgaaacaccttaatacaaaaaagtgcaacacaaagctaaacccacctctatcttatttttcaactccggtcgccgcccccggacgattagttgcacaaagtgggcgacctcagctaggactagccgcaacagcatcaaccccccatcggtggccatgtccagtgccatcgctaccgtgtcgctgggatgacgctaagtttttgtgtgggcaccagctgcaaggctgttggtatttcttaacgacattactagaaatataattcccagcaatggcgcataaatactcctggtatattatggttacagagttcatccgcaagcgcatagatataccattataacatttcacccgagagtactccaagggtatcgtatttatttaatcctgtgggaagatcatagtagagagaaccgtactaacaatttatatgttacttgtaataatcagtctaagcaggggttaagataaatcaaagggtagagtgacacacaagcatggagctactcgttctcatactaaaatatctaagctaagtggaaagaaaatagaaagagaatctactcctatacttctagtatacatattatacacacactctagttatatgattatctagctaataccctctatccgatgccctcctggtacttcaagaagccacccctggttgccgagttccttacaacagcccgtcatgaccatacaaccggggctaaatacggaggagtaccctccccaggaaattaacttatgattatatacacgcgcggagtaatacccatactaagctatcaccatcagcggcccacctctcatccacagcatataaccccaaataatgatatcccgtaatctagacaccacgcctaaactaccagatactactctaatatcatcatcatgacatagagtaattgcataagtaaacattatacccgtacctatgcatctcctagataagctagcagtataatcagtataacatgaatataatgtaaagttggtattcatatacttggaaagtatttcaatactagaaatgtataaagaagagtattctaaataaagtacaaaggttacaaaagaggaaatgaaagctactagagccatacccgaactcttccggactctgatttctattctattcctactcctctagcttaagaacactaaactaaatttgagagaatatgagagagctttgcttggagtgtgtgagtgaagtaagaaggtgaagtccttatatagaggtaggtatgaaggttgtgggaggggaaatgtccgaagtgccctccaaccatcattgggatgcaatcctggacgtccacgccaaaccctgacatcaacggtttagatgggggttcggccgaaccccctggttcggccgaaccatgggctggcccaatccagcccattttcggctggtgacctcctggactttttctctttacagacttgtgaattttggcccaattgatcatgacatttttaagttgtcggcccattctacataagtctaattctcgacatcgtccaattgatttatcgtttgatttgatgtcgattctccttcactttataattattctatgcaaaaaggttagtaaacctaatactagtggaatattattattctaacacaaatatgcattgcaagcataactagttctcctctattttggtaatattggcggtcgaaattgatcgccaatgaccgtcaccaaagggctagccacatgtcaaggatgtagaggccaaatcggtcgacgaggccgtccgccgccaggtcgatgctgatgagtgccttgcagaggaagcggaagatgcactattggagcgggataaggtagctggtgaaggccggctgggtcagtcgccttgtcttcctcgacggcggcgcggagctcggtggcccagttgtgtgcggcacgatgaggaggttggtgctgaaggccttggtgcgcgtgtggtcaggctcctaggtatcgtggtagacaccgatgtgggtgccttgggtgaaggcgacgttgggaacgcatgggctgatgaggacgtcgcacttgtcgatgagcgtcgggtcaaagagcatgtgaaggcagcggtgccgaaggcggtgggtcaacgccgagaaagaaaaggaaggtgctcgggatagagataggagggagagatggaggagtttgcgtgagaggataaagttgatgtgtgcggtggataaatgctgactcgagacgcgtcgtccgatattaactcagcgtaagacgatcgatcataagcattttcgtttaaattagggttggcaactgggcaggtgggggtgggttagataggaacaaccctgccttcgatcctcgatttctccacctggccccggcctctaagcgacgaacatggcaaaatagccccctaccatgcccctgatacccgacgtcttactagggcctcgcatggtcagctggcctattgagaagactcagaattgggtggcttgggttgcagtgagaaggttccctatggacagtgacaacgaagaaggccaatgagtgttggtgccgcaagatggtgtaggccacctagatgcgtcgggccatcggcaaggagcagctcgtggtgctcctacatcgatgacgtcggccgctaagatgtgctagtgtgaggtcgcaaaaggagagtgaggataggtagagtagaggaggcagtggtatagggcaaggcgagacgggataggcggttgtggctaggccggggtcggccgatccctggctagctcccctggctgtggcctttctcctaggccttggcaaaatactccttggcccagtggtgtattgattgggcacaatttttggtattcgatgagtttgtgagcccaagactcaatgggtgaaattatccttcattttctatatgtatttcgtctcaactttggtagtttgtcacctgcatacacatatagaccaacactcgtggaaattgttagaattaaaccctaccactatgttgggtgtttcatattttctgatttatgcaagtattggcggaataaaattggcatttaccagccgccaattctccactccgcgtaaatgaactagataagtcacgcataacttatgcagactccacgccgctctactcaccggattgtttggcaccaatgagctattggcactagtacatactgatgtatgtggaccaatgagctcaactgccagaggtggttttaggtactttattacctttaccgatgactttagtagatatggttatgtctacttaatgaggcataagtctgaatactttgaaaagttcaaggaatttcataatgaggtacaaaatcatttggacaagacaatcaagtatctacgatctgatcgtggtggagaatacttgacccttgaatttggcaatcatctaaaggagggtggaattgttccacaactcactccgccaggaatgcctcaatggaatggagtgtctgaacggaggaatcgtacattgttggacatggtgcgatcaatgatgagccaaactgatctcccgttaagcttctggtgttacactctagagacagttgtgttcacactaaatagggttccatcaaaatccgtggataagataccatatgagatatggacagggaaccgtcccagtatgtctttcctaaagatttggggctgtgaggcttttgtaaaacgtttgcaatcggtcaaactcacacttaaataagataaatgcttctttgtggggtatcctaaggaaacgaaagtgtttgtcgcccgacagtgttttcttggagaaagagtttatctcaagaaaggatagtgggagcatagtgcgacttgaagaaattcaggaatcaccggaaaacgcttcaacgtccacacaatcacaataaatt

SEQ ID NO: 27573 - DNA, 24771 bp, Oryza sativa
  unsure (1)..(24771): unsure at all n locations
acctccatgcgatgctgttttgtaccatcaacgattatccggcccttggcaacctttctggccaaactgtgaaagggaaatgggcgtgttcggagtgtatggaggaaacaagaagcaaatggttgaagcattcacacaagacggtctacatgggtcacaggagatttctcccaaggtatcacccgtataggaatatgagaaagaatttcaatggacacagagatacagccggacccccgacagagctaacagggacagaggtgcacaacttagtgatgggaataaccaacgagtttggaaaaaagaggaaagttggaaagcgaaaagagaggagcacatcgaaggaaaaaacagaggagcatgtggaaaaacaaaagacaaaagagaggagcatgtggaaaaagaagtcaatattctggagactaccatactggaaggatcttgaagttcgccactgcatagatttgatgcatgtcgagaagaatgtatgcgagagtttaatgggattactgcttaacccaggtactacaaaggatggtctcaacgcccgacgagatctggaagatatgggtgttcggtcggagctacattccataaccacggaatccggcagggtttaccttcctccaggctgctacactctctcgaaaagagagaagattgatttgctaacatgtttgagtggtataaaggttccatcttgttactcattaaaaatcagagggtcgtttacttgcaggactaagttggttggaatgaagtcgcatgattgccacgttcttatcacacagctgttgcccgttgcaataaggaatattttgcctcctaaggtgcgacacccgatccagcggttgtgttccttcttccatgcaatcggccagaagatcattgatcccgagggactagataaactacaggcataacttgtgagaaccctatgtcatcttgagatgtactttcctccaactttctttgacataatggaacatcttccggtgcaccttgtgaggcaaacaaagtgctgtggtccagcattcatgacgcagatgtatccttgcgaaaggtacctggggatccttaagggttatgtacggaaccgttcacaccccgaggggagtatcatcgagagttacaccaccgaagaggccatcgaattttgtgtggactacatgtcagaaacatcttcaattggattaccacgatctcatcacgaagggaggcttgacggtgttggtactgttggaagaaagactattaggttggatcggaaggtgtacgataaagctcatttcacggtactacagcatatgactgaggtggtgccgtacgttgacgaacaccttgcagttatccgacaagagaacccaggccgatcagagagttgggtcaggaataagcacatgtcttctttcaacgagtggctaaagaaccgaattgccaggttgtagaacttgcctagtgaaacacttcagtggttgtcacagggtcctgaatggagtgccaccacctggcaaggatatgacataaatggatacacctttcacacggtcaagcaagatagcaaatgcacagtgcagaacagtgggttacgcatcgaggctgctagtgacagtggtcgtcgtgatcaatactatggtagagttgagcaaatattggagctagattacttgaagttcaaagtcccgttgtttcgttgtcgatgggtcgatcttcgcaatgtaaaagttgacaatgaaggtttcaccactgtcaacttggctaacaacgcgtacaaggatgaaccgttcgttctcgccaaacaagttgttcaagtgttctacatagttgacccgtgtaacaagaaagtacatgttgttcgtgaagggaaaaggagaattgttggattagacaatattgcagacgaggatgattacaaccagcacgtccacggcataggtcaagaaatacctctagaagaggaggaggaagaagatgaagttcaatatgcacgtgtcgaccatgaggaaggattatttttgtaatttatgtacgtagtttatgtctacatgtctgttatctgtatgactctaatatgttcgcaatgatcaatagtatattgcttatgaaatagtcaaataaaataattaagtgaagcacccactagaagtgaaataaaataattaagcaagtataagcattagaaataatataattaaagtagtataataatgaagtgcaattactactgttagtgaaataaaataattaagtataaaaaaatatgtagtgtatgtgaaaatatgttaaggaaaataaaagaactaagtgaaataaaataaaataaaattgctctaggcaaactcacctgtgacgggctctatctgtagggccgtcacaagtgacttcacctgtgacggcccaaagtgttgggcccgtcacaggtggtcttacctgtgacggctccacggttggcgcccgcacaagtgaggccacatagttggagcccgtcacaggtgaatttgactagggttgacctagggttggacatcttctagatcgatccagatccggtgcccactctcactcactcactctctcgaccgccgcctcgcctctctcgacctctctgccgccctctacgccctcctctccaccgccgcctcgacctctccaccgccgtcctcgccgccgacaaatccgccgccctctccgccaccctctacgccctcctctccaccgcctcgacctcgacctctccgccaccatctctgccgccgccctctacgccgccctccccaccgccgcctagacctctctgccggcctctccaccgccgccgactctcgaccgccgccgtccatctccatcgacctctccgccgccatctccgccgccctctctaccgccatctccgccctctacgccgccctccccaccgccgcctcgacctctccaccgctgccgcctcactcactctctcgacggccgccgggacctcctctcagtcgccacgccaggaccgtcgtcgccgccaccgggatctcctctccgccgcctcctcctctcgaccgggactcgtcgtcgccgtgtgccgcctcctctgctcgtcgtctcctctccaggtacccctctctctctgatgcccatgaatggaagaattgattctttgataattaaggaactttattaggtttagggtttgaaatttagttcaaatggaagaattgattgattggccgcagatttaatgttgttccgagggtatcaaaccatcacataatacaaaatgcatggggaattttggtggattggtcagtgtagtccatggacggaaccgacctagacaccaaaattctccatgcattttgttttctgttattctttgatgattaaggaactttgcagattatctaaacttgtggatttatataccctttttgtctatgaataggtgaattgcatgaattgttgtttatatacatgatttatatacccttgctgctgctgccacataaatgattgtgggctgttttattatctacacttgattgaattgaatggatgaattgctgtttacatgaagttagtagtactgtctccttttttttgatgaaatatatgcatatttgagatgtgaaatatatgaggtgatgaatttggactatttgtggatgaaatatatgcagtattagatgaattagtctttttgtattagatgattttaggattaattttgctgcattggttgaattttgcatgattttaactagataaatggctagtgatgttttatgttaatacacccctgccactgctgttattgtgggctacttgttaatacacccctattgttgctgcccctgtggagtatctttgcccctgttgctgctgcccaatgtgttccttgttaaatggccagtgatgaattgctcaataagaacaaattatctacacttgttctttttttatgcataagaacagattttctgcacttgctcttttttctggattgataagaggagactatatacacttgttttctgtcattctttgatgatttatatacccttgctgctgctgcccaatgtgttccttattaaatggccagtgatgaattgctcaataagaacatattatctacacttgttcatttttttgcccctacacttgttcatttatatacccatgctgttgatacccctgtggcatatatactcctcctgctgctgttttatgtcaatcatgcaaattctgtacccttgctgctgctgttttttaaatttgcatgattgattcagtggttatatacctctacacttgttctttttttatgcataagaacagattttctgcacttgctcttttgatgttatgatttcctctttttatcccttcatgcaaatgattgtaattgatgcatatttctcagcaaaactgaggccatatctttcatagtataccccgtattacattggatctaatgctatttagtctaatggtaggaaatttataatctttttcgcgaaagttaaaccatgtcaacgcccggcgcaaacccgccctccccaacacctgcgaggatccaggaagaagcaaacccagccacagaggcagttgccgaaggtcatcccgcgacaacggcggtccaacaacccgaaattcatggtaatttataggataaattttcaccacatgaccacataaattttagctagcaccccttagcaaatattgccttctgtttgtgctgcagaattgccgcatgaacaacatacgtcgatgtcgggcgggacaagtgcaagtaggtctagtagaaatccccggtcacaaaatatatggccgaccacagtgcaagttataagagaggttgacgctagtggtaggcccacggcgcccaggactgtcattggaagatggtctaactgctgcgggatagcggcacgtgagaacttcgggatcctccataaagatatcgggaaggtcacagaagccgagaaagagcgagcttggacggcaatggagaaatggttcacatttccagccgaagcaaaggataggctcaagcggaaggcattccaaaagatgggcaaagcttggaagaattggaagtcgaagctcttcaccgagtttgtcaacccgcccggcaatcatacgccgttcgatgaataccctcaaataaccgaagcggtttgggaggaattctgctctctcaagaccacccaagagtttagggaatcaagcgaggcacatcgcctactgcaacagcggaatgagcacccgcatcggctgggcaccgcagggtacatcggcaaggaggcaatatgggcccaagaagatgcagccgctgcagcagcgaatgtccctgccccgttttcagacatccctgaacaaagagctcgcaactgggcgcgggcaaggggtaaggtcaacccggacggctctgtcacatttgagaacaaaagtgatgccgtcgtctatcaggaactggtgagttcactacttaacctaactaatttccgttcgtataaagtacaagttcgtataaacgactatcttcttttctagttatgcttggttactgaacaagctttacaaagcgaggttgagtccacgccgaagaggcgcgaagatgacatcctcacaaaggcgctcggaaccaaagaacatcctggccgaactcggggaattggtagcgatgtgccctggaagcatggactccctcagtacagatcccaatacaggaaacggaaagtctccaaggaagagagggacgctcgtttgaaggccgaacttaaggttgaggtcattcaagaactagaagctagcatgaatgcaagggtggaagaaagggttaacaaggtcctcgccgacatgaatataccccgagtcacaacacctgatgtgcaaccaactcttcgtgtacaacacgacgcgagtccgtcacagcataggagtagttgtgcatccacagaggtgccggcccctggtctcccgatcgcaccactagctgcagtggaccacatcgaggtaattgttgttatccgatccatatctaataaaagacatgtacacattccaatattaaattcaaactttcaccttatgcagggcgcagcacagtgtgttctactagcgagagtccacccaactttcgctcctggagacgctgaaggcatggctttcaagcgcccggttacagacaaggtccacggcgcagacctgctagctgggtatgccaaggtgtccatcgatacaagaaagaacacctggtcaggctatccgctgcccgtgcccccaaatgatgaaatcatgactttgggcgatgcgcgcaagacgttcatataatggcccaaagaagacatagttgtgaagatgactcctcgtccaagtcgaccgacggagcttacacctcccaagtctaagctatcaattgaggctccccgtggaccggcattgtcagtacctcattctcccggtggagctgatatggacttggtagatatagctcaaagcttggctccaataaagaccacaagaaaggccgatagctccccaccacttgtcaagggccagaagcgtgaacgcggcaaggggaaggtcggggagttggcgccggagccaaaaaggggcaaggctgcgacgtcgatgccggtgagcaaatcggggaaggtcgtgagggcgccagcccaatttgagctaggcatgccattggtggaggacaatgtgttagctgtgatgggtattgcttgccgagagctacataagcaatacatggagctaagcaatgccaagcggaaaatgagggagtcatccatagttggacatcacgaccaccagccgttcctatcgtcgcctgcctatataactataggctttgatgacctcttcgaccttttcaggatccggaagttggacactggtcttctaaaatgctactccttgtaagtgcataccttctatacttgtgatatgactggactatatctcctaattaaattagttctaatacgtacatattttaaggttgtgttggatcgagagtcgtcgccatggtaatcaggttgggttccttgatccatccatggtgaatgaggttaatttacgacagagcttcactgaggtggttgactatgtcaaccggtgtttatgggcccatcaagacaaggagtacatcatgtgcgcacacaaccaagagtaagaggacaatacccttcgtgtatattgtttttgaagttaaggttattagtactaacgctacataaccactgcgcaggcgacattggattctcctagtcatcgtacctaagtggagtcgggttacctaccttaactccaataagtccaaagattatgatttcagtgaaatcaccaaggccttaaatatggcttggggcccatatgtggaaaagggtggtaggcacaaggagggcaagaatgaactttatcatgacaccaagtttgcatgcgcacaacagatcggagaccaatgtggtttccacgtgtgccacaacatgtcaacacttctaagagaggtgaaagatttcgaccctgaggttgttgctaatggcgaataagctcatttcaatatctacattgctattcaaaacgtgctaattaacctcttatttattaaacagaaaggtagagctggcttcaagatctcacccatcaacccccccgctatcagaggcgaattgtgcgcctttattcttgcagaaataatgaacaagaaaggacgttttcatgccaaatagactcatgaacttggctagataatttattgtgatgtaaaaaagatgtttttataatttctggcgatgtaaaaaattatgtttttatagagtgcaatgtaatttactttcatatgtgcaatatttatggtactttactaaattgtcatcacatttgatcaactacgatttatgttgtactattcatctgttttctcctttttttttccttattgacaggttgtgtaggtcgatgacattatggctttaatccatttggtaagtatatatgcggttctatgagcaacgaccgaaattgtggctttcaaggggtgtgaattgctgtgcaaaattgtggcatttgaactgcatatatgtgttgttggggatctgtgatgttatattgggggggtgatgtatctgtgatggatctgtgactggaatatatctgtgatgtttctatttttcagagggcatggctagcaaatgctgaggctagccaatatttagcatttattttttttctggaattaactcatcagtgaccgggtcggaacaaaaatccgtcaaaggtaacataacctgtgatggactagcaaataattgcccttcagatgtgacctacctgtgacgggcctttacttttggggccgtcacaggtagatcacctgtgacagcttctaactacggagacctcaacctctgacggcctttatttaaagggccgtcagagatgagtcacctgtgacgggtcctaactcgctcaaggctagcggagaccaacacctctgacggccttctagtaacttgcccgtcagaggtgggtgtcacctgtgacggccggccacccgtcaaaggtgactggactcaccagtgaccactgatcactgaccatgcgcgaagccgtcaaagatgagggtttaggtccgtcacaggtgaccttggccagtgtagtgactacagggtgagtgatactcgtaactcgtgaatctcactgtctcatcatgggcagtgtcgggccggctttctatttccgcactgtatttttcacgtatggagatttcctgggagtaaatgctgtactgtgcatagagatggcaagttggcaacaacattgacacgatggctgataaaaagtttctatcgtgtcacatcagatatacagacacacatttaaagtattaaatatagactaataataaaacaaattacagatttcgtctgtaagctgcgagacgaattttattaagcctaattaatcagttagcaaatgcttactgtagcaccatattgtcaaatcatggagcaattaggcttaaaagattcgtctcgtaatttacacgcaatctgtgtaattagttttttttatatttaatactctatgtatgtgtctaaacattcgatgtgatagtgtaaaaatttttgtcaggggatctaaataggcccgatatttcatcccctgttgtctgatggggctagtgatattcggccaattggcactggtagcagcttctatcgtactcggtgtactgattctcaaaatttaaggagtcctaccaaatataacgagttctacactgatttctaggatttttatcattttaatgatttcatggccacaataatattccaaatttaagaatttctaccacgatatatcactactacacaaacaattttcgctgacggtccaaatgagatttcgttggcggctataccacctgtgacctaaggccagtgaaaataaggcatttatgctaccgggcagtcggtggccaagctaagacaaccaccagcgaaaataggatttcgctagcggcactattaagatacccccagcgaaatattttttggagcaaaaagaaattgaaaatccagtcaaaaacagcttgcacagaatcaaaaattcaaatcagaaatccctaatcctcaagtcgccggttgccatcatgtagctgcgtcggtgattgagggagctcgatgcagacgtcaccatggctgccgtggttgccatcatcgctgccccaccgaagcccatgctcgagccgagccgcaaccaccaggtggccccgacccgcccgcctgtcggatctgggagaggggagggagttggaggagcccgtccgtcgtcatcgttgtgccagccaccgccggatccaccttcttgactgtctcgaggatcgcccacgccccagccagccgagcatcgcccaccgctggatccacccccacggtacctcccaccgccgtggagaagtcgatgccatcgacggcggcgtcgccgaagaggtggaagccaccgaggtcattgctgcccttcccgccgtcctcagccgagccgttgagaggaggaaggagccgagtcttgttctccccaccaccaaccaccgttgccaccggatctaatgctatcgaagacagccaccaccggatctggagctctcgatgcacgccgtctctagatctgccaccacagttatcctcctctttatcgctggctcgcctcgagtagggtttgaggatggaggcggccctccccttcaccgacgttaatgagcccgctgccaccggatcggacgggctccgcctcctccactaccacaacccaccgccaccatcgtcgtccttctcttcatcgccatggaagatgagctcgcctcgagtaggatttgagggcggaggaggcactccccttcaccaccgcccttcgcttcaccaccaccaccgcactacacttcaccgccaccgccgcatcggaccatcaagaatggagagaggagaggaaggaaagattcggaggaaattaaggaagggaagagttggggaggagactgggtgattggcgcgcatgacttactctgctatttaatgtcgtgatttttttcactgtcggtgctctttaggtgcaccagcgaagatagattttcgcaggccgtcacttaagatgtccgctagtagaaataactctttctgttggcggatgaagatcgattttcgttggcggtttgtgaccagaatccctctaatatatttatataaatatttatttatttaatccgtcagaaaaataaaatggtaacgccataaaaaaccctttttctaggaatgtatcttgcactgatttgccgtctatcattttaatgattccacggccaatcagatatttggaaaataaaatcaacaaggtatagctggtttcatatcaatttaagcatgtgttagatgatgaattcataagtgtacgagtgtgatgttgcaggtgtacataatctaaggaaccagtttttgctaacattaatgaggctactactgtccagatggcaacaagccaacagaactgacactattggctagctaccacaaatcacaacaacctaagcatatgctggacatccatggcccgtgggctagctaccacaaatcacaacaacctatatgctagacatcgcatctgctgacttatcgcattacggtaaaataagataaatatgaccatattagatggagaaaatatatgagtaaaacagaaagggaaatgttggggagtgggagtacgtgactttgcatttgttgttagatttcttatacgcagaagagtatgtatgttaacaaagatgaataacttacgatcatcgttttaacgaaatgataaattgtaaattaaacattatttataatgaatttgtatcctataatgtattctgagtgagcttccactttatccgaaaaatccagttgttgattaggttgatcgtagtaagcagtctgagtgaatttattgagagttgatgttcaataaaacatcacattgcaaatatctttgactgaaaaataattgtcagtcctaaatttcaaattaattaacaaaagttgtatccatgtagggccacaattaaaaattttataaacttcattccggaattatgaattaataatacaaagttgtaattaatggtcttttgcaatgaatgttgtaattaacactagcacagaacactacagccgtaatggctgataactcacatttataacggttaaaccaactgttacaacctaacctaacagttacagatatggagacgcatctgtaacgactaaagtgccattacagatgaaagttatctgtaacggcacgtgaaaattcaggtttaaaaaaaaggtgaatattcacaataaaaaaataaaaaatcaccccgtcttcatcctcactcctagcatgctaccatggatggccgctgcacggtggctcgaaggagtcatccgtttatctgggcttcctgccgccacccgttgaagccggatacagtgatcttgtagccagcctccgccggatctgaaggacccgtgccttgcagccgccgaatctggtggtccaaaggcatgcacgccaccacccgcgccagccaccaccgcctgcaccatcgtcaaccgttgccaccagccacgaccgccaccacctgcacagcctcggcggccacccgcgccaaccccaccgagccaccagccgcgaccgccgccacacatgccagccccgctagccattgagtcgggagaagagaggatagagataaggacagagacgaggagagattgagggggaaaatggtggggagatgggggaaaaaggagaggaagtgagggagttaagggttttggctaggatttttattttttatttaagttagtagacctagaaattatctgtaacggctctaaatgtggagctgttacaaatgagtgacatatctataacagttttaagttgagagccattatagctaagggaccgatatttgtaacggctcttaatggagaaccattatagatgagtgggtcatctgcaacggctcctagtgagataatggagcttacatctgtaactgccctcggttaggagcagttacagatacgggggcttcagtaatggctcaaggttgttttggtcatcggtaacggttgtctatatcagccattacagatgacataatctgtaacagttttattggacccgtcacaaatgacctgttacacatgtaagaatatgtactagtgtaatattgactattcttttattcttaggaaaaagttcgaattaccaccctgaactatcatgggcgatcgaattaccccctaaactcaaataccggatattttacacccttaactacacaaacctgacaaataacccccctagctcaatctggggtggtttcagtcctacgtggcagtccagtcagcaattttttattttaaaaaatagtgtgggccccacctgtaagactctcctctctctctttcctctcaatccctctctactcgctcttcctaaatcccatcccccctctctctctctccttcctcccttgctgcagcgagcggcggcggccggccaacaaggcacgatggcggcacgccctttctcttctccctccccttgctgcggcgagcggtgccgaccagccggcaaggcacgacggcggcacgccctctctgtcctccctcctcttgctgcagcgagtagcagcggacggccgtgggcggaagcgcaagacgcggaggtggaggtcggagctgggtagcgagtggccggcgacgagctatggcgagcgtgacggggagggcgaaccggtggggagcctcaccgccgccaatactgccccctacacctcggccttctccacctccgcctcggccgtgactgtggtagctgacgtcctgcctctgctttgcgcgccaccgcccatcgtcggccctgcacgtcaccgtgcgtgacgaccaccgccaccgctcgacctgtgccagcccccgcgcgtcgctgtgcgcgttgactaccggcgccacacgacctccaatcggcagatggagaggatgccggcgacgggtgcttgttgccgacgagcagcccagtggacggaaaggttgaagatggcggaggcgatgtcgacgaagaggcaggggactgtggtggtcgcggaaaactggtagggcggcagcctgttccaagcgtgttgacgaaaaaatcgaatacaccggcctgggagatctgcttaactcctgtgcaggtccaaaaattggtgagatacgagcgtgccagtcagtttgatcctgcaactgacaagatatgcaaatagtagatcaaaacagacgatcgactgacaagccgatggagtagttccagccgatagccgataatagccgatgccgataccagccgatagcgatagggtttaagcaatcggctatatgtccaatgtagatactgatataaaggcaatcggctgacgacgatgtaataaaataacaatataatccagtataaaccaatcagcaaataatgatatgataaataagcatcgatccgaaggtcaaagcacacatcggctggaggtccgatgtcatgaaatccacaagattagattaaacagtgaagcctttgttgtcatcggctaaatccaacttatatgtatatgcaatccttatgagccgatgcaacgtccagataactcaccggttgaaaccccgatgaaacccttattgacaatcaagaagcaggctagagattatggttctaagcatgacttagtagatcaaacttaactgatgcagcactaagtatgaaaacaaacataatatctagacaatcaagccgttgactgagttttcagggtgttagatgtctaagctaatctaatctagcaacgcgatttagccgataccggcagaaaccctaaaacgagaagcagccgatagagctaaattgacatgctaagactagattaacagagacatatgataaataggtaggcaaatatatcatcaaaaccagagcaatccaagaggtcgaatgtactgatacagccttgaacgacaccgatgtagatgagacaattgcctgggccgacggaacattggacttatcccttcgccggagatcgaagacgatgcagccccgcgtcgggtgtcaagttctgccgaaatgtaaaaaacaaaagtagaagtaaaaagggtggcgatgcgccgaattgtattgatcgtagcgatagattacatagacctcgggtgtacatatttatacccatgggttgatacaagtccttgtcggccaagaaagaaactttcctaaagataaaaggaaaagttaaagtccttataggacactaaacacactttcctaaagataaaaggaaactaacaaactattcctaattaatagataaactgccatgccgtatcctctttgaactcggtcgtttatgggtaagcttcctttagtagattgatttccttaaccgaatatagcaggaatccgactattggcgacttgataactcccatcggctgattccgagatgccatagccgatagtgactctaagccgatgatgactttggccttaccaaatttcactgtcaacaaggcggtagtctgccagatcggcgaggaatttgggcggtggcgacgagcaagctccggcggatggtggaggtcgatggcgtccatggaggagtccctggaggggacgagcgacggggtggagctccagtgtcaccacgcatccccctgtgccactgcccaccgcacgtcctcgacggcgccgctcgtcctctgccggcgcgccgccgctcatcacccacagccgcacgccgccgtccaccggtcgcccccgcgtgccgccgtgcacgccttgccagccggccgccgccgctcgctgcaacaggggagggaggagagagagagaggggatggggatttaggaatagagagtagtgtgagatttagaggaaagagaatgaggagtcttacaggtgggacccacactattttttttaaaaaaattgctgactggactaccacgtaggactgaaaccaccccggattgagccggagggttatttgtccagtttgtatagttaagggtgtaaaatatccggtattcgagtttaggggtaattcgatcgtctatgatagttcagggggtaattcgtactttttccttattcttaagctaccactccctcgtttcaggttataagatgttttgactttagttaaagtcaaagtgcttcaagtttgactaagtttacagagaaatataataatatttacattaccaaattagttttattaaatttgtaactaaatatgtttttataataaatttatcttaggtcgaaaatatttcttttttttataaacttggtcaaacttgaaaaagtcaaaacatcttataacttgaaatggaggaagtatattttttctgaaaaataatcaacacgttttaaaaaaacattacttattgattatatatgtagtacagggttagtgactagtatccttgatctttgcgggtactgttgcctatttatatgaccatactgtttgctagatatctggtccctctgtgtcatcaaacaaattaaccagcccactcaggccaagccctgggcaagtagaacatcatgtcgtgtaccgagcaagagctgagcacccaggacatgcttcaagggccacatcgatctccaccaccacctgtacggctaccacaaatccatggcgcttctctgcgccactgatcttggaatccctggcgccatccaccgccgtggaggcgccgccacaatctccgatatcgtcgccgacaccatgatccccccggccaagctcccgcaccttcgccggctcatgcgcgtgctctccgtctccggcatatttgccgttgaagaagacgtctacaagctcaccccggcatctcgcatcctcgtcggtgataaggcctcgtgcaacttctcccctctggttcacctcgtggtgagccctgcgatgctcaccacattctccagcctaagtccgtggttcagggatggacgaaacgccagcccaacggcgctcttcgagatggctcatggcatgccaccgtgggagatgatgaagagggacgacacgatgaactcggccctcaacgacgcgtgcgtcgccgacagcagcttcctcatggagatcgcgctaagagagcgcggtgatgtcgtcttccgagggcttagatcgctggtcgatgtcggcggcggccatggaggagccgcgatggccatcgccaaggcgtttccggacatcaagtgcagcgtgcttgacctcccacatgtgatcagccaggcacccgacgatggcacggtgtgttttatcgctggcgacatgtttgaggatattcctccagccgatgcggttttactcaaggtatacattacactggaaaacttaatttatctatccccttatttttcatgtcacttaaaaagtcataaaaaatttgaaaaaaatattagtttagatcaatatgtgatatgtcactttacaaacatgcaaattcaaattcaacttatacaagtagaaacaaaaataacaaatttgactatgaagaggacgtttaattcgcggttaaatttgttatttttttcgaattgtataagttgaattttaacttgcatgtttgcgaaaagataaatcatatattgttatatcttgacaattttttttgaatttttttgataactttttaaacggcatacgcaaaatgaggggatagatatcccctcgaaagataaaaatccatttcccattacattatgttctccgtgttttctccattttatatggtactccctacgtcctaaaatatagtaaccttatattggttgggatacattctagtacaacgaatttagacatactgctgttcagattcgttgtactaggatattttccatctagtactaggacgtttcccatccagtacaaggttattatattttgggatggagggagtagcatatatatattgatggataattagtttgtatgtacggctttcagcatgttttgcattgctgggatgcggatgactgcgttaagatagttgggcagtgtaagaaagcaattcctgtaagaggtgatggagggaaagtgatactgataaatccggtaattgggtatggggtgaaacaggacagtactctcaaagagacaagtgctggctgatatgaacatgatagctataggaggggcggagcgagaggagcatgaatttaaaaagattttcttggacgctggtttcagtgattaccgaatcatgcccgtcttaggtttgatgtccatcattgaagtctatccgtgaaactattacactccggaaatgggctcaattaaaataagcatgaagatcatatcaagctaataaaaaattgtgtatcgtaaacttgagtcgacaatcatatatcatgcagctatttaccaacttcgggtaaaaattcaccaatatttcctccgtttcacaatgtaagtcattttagcatttcctatattcatattaatgttaatgaatctagatagataaatatgtctagattcattatcatcaatatgaatgtggaaaatgctaggatgacttacaatgtgaaatggagggagtagaatttagtagttgtgagggttttaccttgtttggtttttgttagtttgcttctatttttggttttgttatttttgctacatactcactgtttgagtttgcttttgtgtgaaccttataataaatggctgtgattcttgagcaagaccaggatatttaattctattattaaaaaatgatgaagatgctgtgttaaagtgtcgtgtttttgttgactcgaaagcttacatgtcggaaaatatcagtccggtggtggagttatgatgcactgcctaccaaatttcagatgtggtggcaaatttagccccacataaaaattttacaccctatcacatcgaacgtttaaacacctgcataaagtatattaaatataggctaaaaaataactaattgaacagattgcgactaattttcgagacaaattttttagacctaattgccctatgatttagtagtgctgcagtaaatatttgctaatgacgagattaattaggcttaataaattcgtctcgcggtttaatgttggattctgtaagttttttttattagtacctgaataccctatgcgacactctatataatactcgatgtgatacgcataaacttcacatctttggacttaatctaaacaccccttacatattcatgcaccactccacccataacgggtcaaattaattatggtgaataaatttgcagggacgggtgtgtacttaatagaattttaaagatattatgcttttatgttagccccagtctcactaaaagtgtcaccgcagaagggaataaaaatttatgttgagaggtagttgacctctttctctctctgtcggcgatagctctttcaggcgaaaacgaaggtgttcgctaccgctccgtctgacccccttccacaacttcgacggcttcggtcgctttggattgaagtaactaagacacatctagcaggcaaaccatcactttacccagtaatccacactagatatttattttttaggcggatataactctggaagccaaatagccgcctacaaaaatataaaatagggtgaaactcgttgtccgcctgcgaaaattaagcagtccgcctgcaaagatacccttcatttttacaagcggacctcttatatggtccgcctacgaaaatagatttgaaatataaatagagcaacctaggggctattttttctaagtcctccacttcccctccactcctctcccacgtccctctcctccacacctctcccctcccctcccctcccctcacctctcttcctctccccggccgccggcggcggcgtctcccggcggcgggcagcaggtggctcccggcccctccctcccagatttggccagagggcggttgggggagggcggcggggcgcggtggggcggtcggcagcatggcgcggcggggcggtcggcggcgttatgcggtgggtggaaggcggtggggcggacggcggctcccctccgtccctccctcccagatctggccggaggggggaggggggaggaggccggtggccagcgtctcggggtggatggcgggcggacggcagcggctcccctccctccctccctcccagatctggccggagagcggaggggggagattggtggccggccagcggcccgggggcagaaggcggcggcgactaccggcggtgacggcaaactccctccctacttgcctctcaccccggccctgagggggttcagagagaggctggcggcggctcggcgacaagtaagctcgactgctctctcacctcttctcttcttatcctcacttctctctaatcccggtggtggtggtttaggtgctgcatccaggatggggcagtggtgatggagtagcacccttggatgatttttatttgaattttgttcatgtatggaggattgtgttgatgaatgaattttgttcatgtatggaggattgtgttggattttgttggaggatttgtaatttgggggtgaaaccgagggcacggccgggggctgggttggggggggggggcgagggtttggcgccagaccctatcttcgcaggtggactactgtaccacatgggaagattgatgatcttcgtaggcgtttaggtacgggaggacgatatgtccgcctacgaaaatttgttctgaccgcctgcaaaaagtgtttttctagtagtgccatgtcgaactcatccaaccattttcggatagccgagcaggtgaagagtacgtgacaaatctccaatatctaacttttctaaaatcaattacttagaatgaatcatcagacagaaaagcctccgagcgaacacttgaaaataaaatgaatttgtttgtgataataaaagagtactctcgccagagccaccctcggctaaatagagtttgttttacccttcctagtctctagctgtcttgatggaaaaggcgggtttccacaagtgcagctctaatcatataacaaattatgccaaagcagcgaattcgtagccccagccgtgaagttaggaagaccaattaacgattacacagcttggtttgaattaatgtttaagtagtgtcgggtcccaaaattaaataattggaaatcgacaagtattactatatcaaccctggatcattaacattgatacagatattacaaccggatgttcattacacatgtacaaattacaagaggtataatattacatagagagttttagctagataatatttgatacaaaccatgatggatgaggttctactttattttgactagggaagtagaaatctttagtagtcataagggtcctcctcttgactcacatctgaaaaagtaatatagagcaagggtgagtatacacaacacccagcaagttattgcaataaatataagatagttatttgcataaagctaatttggaaatattgaatctggtatgctcatagagaatttagcaaagaataaatcttaatttctaaccaagataccaatgtgagtctcgctgctcaattcccatgagtacggctatctgagtagattcaataatactcttactgtagtagatgtacgatgtacccgcaatccatgacgtaccaattaaattgtagttttgtcatggcctagtttttcagctatttatcagtagtggtacctgctccatgaaccaaacttccacatacaccttgaatgtgtattggagctcctggggtctcagaagaactgattgtatgcatgccaccatgttatcgcaatcagggttcacaaataattcgtgacatcacaatttatcaatttatctcaaataaatatttacccgctctcagtaaatattacgattgccttgctcgacaaaaatttgcctcctcttcaaggtcctccttgaggactttaaaaatagaaccagtatgcagaagtaccacttttgttaaataacgtaatccactaggtttatacccacgtgagagttgcggccgtactcattcgttcttcacatgtacttgataatatcttatatcgatcgaaacaatactagccacccggaaattattcttttctagcgtaatgttccaatctaagtttatttcattcaaccatatttctgagcactgcaaaagctcaccgggatttggtcggagaatgaaatgcaactggtggcagcactcgaactccgaaacagagcaagttggtagcgatgaaggatcaaaacagagcatgtaagcgatgttcaacttgttctcggggctgggaaaggattggagcggcggcagcgtgatcgcacactaagaccagtgctccacagcaaccttagcaatgtatggagatgtagagctttggtgtgatggtgtggtgatggttggtggataacggcactcggctgccattagtgccgtggatgagtttagtgccattaggaacagagggctgagagagggaggagaaggtgaaattggatgacgaatgatctattttaagtggtggcggaagggatttaaatcacggcctagaaggcggcggcgaggtggcgctctcctagtgtgacgtgcaatggcggcattgaggaaaacggccggctcatcggcgccatgtttggggatgtgagagggaaaagttatgtttctttgagctctgaaaggtgatggtttggttgggcttctcgctgggatgtctccatgtcgaaggatggcggccagcggaggaggagtggcgggcacggcacgcacatgagatcgctccgcgattggcttgccggttccatcgcgggaagattagtgcttagaaagtagggtatccaaggcgcggtggatagatggatgttgcgccattgtggttgcacgcgcgtgatggaggagggtgtcgatgcgcgttggcgtggtgtgggcacgacacggcgcaccgtggcccacaaaatccttcgccggtttagggagcaaaggaggacttgaacaagctgatttaggtctctagagattaaatttagttaaaaaaaggttttggatcaaaatttgggccactcaggtactctttctcgtttttgacaaaaactagttgggaaaatagtggttatatccaagattggataggttaagggtagaaaaaggtttctaaacctatttgaggtacttaagagtgcactcatagaactagttcagaaaatatttgaatttgcaaaggatttagaataacacctaaattagaaggagtttggattttataaaggaaatttagatttccccccaagaaggaaaaaanacctttgagatggatgaatagaattgatatttttgcaataccaccaggcaggtttggtaatacgattgaaagggagatacttgaactatataattcaattcaaaccctcttttctctttttaaggtaaaagcttttaaaaggatttttttattaaataaaagattatgaataaaactcagcatgatgcattcaatttttacattaaaaatcgaggatgttaatggtaggcctctgacatgaccaatctgacatggacgtttgaccatgcgtggcccgacaagctttatcagtgccaagcgtccccggccaaggtcaatgagaccccgaagcttgtcagactaatgtaatgggacattaggatcaacttcgaaacgtagtgatataagaagagaggatcaacggataaatattgcacatttgatatatacaaacacttatagaattgatacggcggatgctgaggcaacaaccaccctggtcaaaaaccaagtgtgcagtcatactcaacaaattgtagaggtggtgatgacgctctctctcgtggcctgattttctggtgaggtggataactctcgctttgattgagtgcaacgtttacgacgtgggtaccaaccagaacaagtccaggacgccgtgcaatcgctacaccacaaacgatgtcatactaaccgtgacgcgcggttgatgatccctgcaatgcaaacgagagaacactgcaagaacaagatacgatgtaataaaagtattgtgaatacatgattaatgtaccccaaaaagaaatagttgcgattgaagtggtagatctaatcgactcggtaaatcaacacaccaactattgggggctctaaatctatagtcactgactaatcgaacaaggactagagacaaggtgaatggcacttggtaaaatttaactaaacaaaacccatttgttttacagggtgtacatagacatttatagaggaaaatagatctagggttaagtgcagggagatacttctgagatgggcctagtctatttcaaggctcaaggcccaagttcggtttcagcaacaacactgtattgttttgacgattcccgtcgatccggaatgaatttgaatatgagaagggatgcgtttgaaaggtagtgagataagccttccatcaagtccaagatcacccaaatcagagttggcatgaaggcgctaggtctgtttcaatttagtgctgtctcgggaggtcgaattggattctaaaactcattggactttaatatcatgtagatcctccattcatccgatgtattttttggcaatggtttatatttctcatacttggttgtatgcatatacttaatgcatatcaggtggtggaagaatcgttacaaccgctagtcgaatgaccaggtgtagacatacctcgaccactcgtaaatctggtaggaggaccgctacgactgctaatcgagtaccatatgtagatatacctcgaccacctatagatgttctagaagaatcactacacccgctggtcaagcactaggtgtagccatacatcgaccacctgtagaggattccgagaggtaaggagaggatcgctacgacagctggttgagtaccaggtgtagccataccttgaccacttgtagtgaactcggagaagtggtgagaggatcgctacgaccgctagtccaggactaggtgtagccatacctcaaccactcgtagagaactcggagaagtggtgaaaggatcgctaagaccattggtcgaggaccatgtgtagccatacatcgaccactcatagaggcgcttgagttggttgttacatgtgcatctcacgtggccaacatgactcacatacctaacttataagcatatcac

SEQ ID NO: 27574 - DNA, 1581 bp, Oryza sativa
tagatatcatataaaaaatatgctttagataaccacaataaatcattaagttggaaaatgtataataaatcagatataaaatcttgggcgtacctttgtagatatatgccagatatttatatatcaaaattagtagccaatttaaaaatcaatttttactaattaccttagataatggtttttccattataaaaaaaattaccgtagataaggttgcactgtacatcacatatcacggatatgtgcacgtggctgttgatttgattctccgctgtcatcttttctggttcctttgattagagttgcacttcacccgaggcagagcgcaagtgctccgagcagagccatatactccttatttaagggacttgcttgcgctgaatgctccggttcgttatgtccgagtagaaattggaccaagaggcagcttgtcggcggtgtgggctgatgatatcggactcgatcaacgacgacagctagtaccctatcgcagatcaatggattggttggtacgccgcgtcatggtcgatcagtttgaggtagtagaactcatgacgcgacgatgcatgtctcgaagctttattgatcttaatagattgaattgttggcggcgatgtactctgtcggatcatatatcatactatattccaaagctgttgaagtattcttcgtggaaaaaaatccacagtggtgatgtcatgatagagatggagatgacaagggtcccgcttcataggagaacgcactccggtcggatcgtatctcccaaagccgaagtcatcaaggaggttgttgtcagaaatccgtcttcttgaaacccatctcgcctaaagcaccaaggctcctatctaacgcgtcactatcgacgttggatatcccaaccatagtatttgtagagcacggggatcgttggtgcccgggtgtatgtgaaattaagctaaaagagatggaagacaaatatttttatatagatttaggtcccttaactgataggtaatagctctactcttgttgaccaaagccggtgttgctcttatatatcagtaccacacgagtacaatacttaggataacctaatctagtcggcgtcggcttgacggcatggatcgccaacacgcaatcgactactagtgtagtcttctttctcgaatatgaactcagaagattagagatagtactagatcccttatatcggtaactgtggctctggattaagtatgtctaggcttgtcttttattggtgtgtattggcttctatttagcttgttcgcgtgttgtaacgccccacaaataattatagaaaagagaaagagaaagaagagagagaaaagaagagagagcaagctaccagcccagcagcagcagctgcaggccttgggccttggccagcccatgcaagcaaaacagcagaagagtgtagtagtagcagtgcggcagcagccgcgctacagtactagctagaataatcccacgccgctaatttgagaagagagggagcagcttaaatataaaaggttgaccggtcactgtaactcctattctggatttttttttgtagagcgaggacgaaaaacacagtga

SEQ ID NO: 27575 - DNA, 2521 bp, Oryza sativa
ccgtaaatattaaccagatatagagaatctgcattcagctttgagatgaagtgtaagactattgcatgatccgtttgaaggaagattttgccatcaaacatagagccattccaaccttagaaaacacctcctaaggcaccacttgaaggagactacacaaatttatcataacatctaggtgcaattttttcgacaaagccatatcaaagccctcttttttggtttgttgaagagaaaaaactgaggttagggcatgtttggtagagctccaactcctaaagttagctccaggagttatgtctggagtggagttgtggagcagccaaaacccagctccacctctctagttcattgccctcatctggattgaaaaaactagggggaagaggacgcagggaagagattataccactttgttcagcaattaactttagtatttttgcactcttcccccttgccttgccaattgcaacattgggattaggagacaagaaacccttagtcaacttgtttaggcgagcactcctttatctgtgtcaggtatgacaacatttgctcccttggatttcttgcactttttgagcgaaggtatacttggaatattatctggaggaaaaggatcagctggcagttcaattagggtggcataaggagggatgcatgagattggatccaccagcataacaccttcaaattgttgggtctccactcccaactgggccgaggttgtcactgggcgtatatgtcggctttccccatgcctttcaatcttagccaccagtagcagaacaacaacccaacaaagcaaatgaacaatgtgtgtcaccagtagcgagtaggaaacattctgcatattagattctggtccttgagcttgtgtccattgggaagagtgagcaagcatagcaaagtgacaatgaggtagtcccccaagaacaccagttaggattacagaatcccataacacaagcacattctgaacagctataagaaacttccaaaaattaggattgactaggaatctggtctatagaatcaactcaaaatcttctacccccatctgatggaccaccacgtgatgcgaaccagaaatctctgagaccttactatgagactgagattgttgctgctggttgtctttcatatcttcctgcatgttatccccatgctgctctcctggctattcaggttgatgtggaggcttaggaaattctggctcagaaatgtggttaacatgcgggaggtcctcatcccaaggcatgacagcaggcaaatctctattgttgttgtttgatgatgatcatgatgttgttgttgttgtggacggtacccgttgttgttgttgttgttgttgttgttgttgttgttgttgttcatgaagaacacttcctcataggactcagggcagtcattccccgagtgcagtatcgtggcatgtttcacatgtcatttgaacttcaaattcttgtgcagtaccggacacctccaccttatcacaagcacgttcatccaagcgcttcatgaggagatccattttagcgacgagcatgtctgtttcattaactgtgttcatgccctagtgatgaggtgggagtcgttattcgctcctcccttggttggagaccatcctctcaatcaaatctgtagcacaagcaacaatcagtgagaagaaggctccttcaacagcactgtcgatgtgatcataggctgcaggaatcatcctgttgtagaagttctggacaatgagccaatcatccatcccatggtgcagataagccaggatgtactcatgaagtgtttcccatgcctctggaattgactcatttgctacttgctagaaggtcgaaatatttccccgaaggacgttggatttgcccatcggaaagaactacatgaggaacgttgttgatgacttctctcatgtggccacgacacttctcttggagtagaactaatgtttcgatgtaccaagtagagagttgaaataattggagtcggatagcattctgagtaactaccctgatgacaatggtatcgtagagttccaagaattgctggagatgagcgtatacgtcctcatcggcttttccacaggatgagctagcctgcatcagtatgatgagacccgtcttgatctgaaagtttgcatctccagtgtttgaaaatgggtctgatgggcacgttggcaacatatggagccaagtaatcacggaggaccgcctgagccattggcttggggcttgacgctgcaaatttgaccggattaggtgtcgagagcttcatttgcaaaggaacaacacgaggctggactcttctcgcaagttattctggattatcggtaaaattttctggcaggttgaaaccagtcatacatatcgttttcaaatgaagggaaaacaatcaatgttaaccagtttctttcttgacaatgatatcaaaaatgtttggtgttatttgatgatcatagatgacttgtattgatagaccgcaaaattagctcgtcatcgacgaggggtcatca

SEQ ID NO: 27576 - DNA, 1280 bp, Oryza sativa
gcgattttcatggggtgtccacttttggtcatgttgtggtcgtacgagctcttctcgttcggacgtccatacatgagtgtggccgtggcccacaaggacgattacactgacgcagttgatgatcgtcctaccttcggtactcgctggtgctacggaccggtacgtatgcttgcattaaaggaatatttctatcatttcaatgatactgcattactaaatctacaatctctgatcgtgcagccatagtgggcgagaatctaggtgcacaatgtgtatgagtacttcaccgaggcgttcgaaagccttagggaaaacgaagttcgatggattccgtacacgaacgaagaggccattttgcgtgcaccacatggagtaagcatcttatgctaccgcgatgaagcgtactggatgacacgaaaaatactggtgtacgacatattcttcgaggggtataatgttcaaagggtaatgcgtcaaatgggattgtaccaacaagtcccagttcctgttgggcttcaccttctaccagatgtgcacacgtatgttgttatttcaatcctgtctaatttctgtgctctccaaaattgtcagatataactaacaactaattgttgtatttttgttgcagggaaaagaggcaagctgacaacaggtatcatcgatctatgcactcagggatgatcccatggatagaggcgtggtcacaggccttgaatgatgtcgtccaggagaccaaggcatacgaccacaacacttgcgaacaatacatggcctagtactcatcgcagactcgcatccggctgcttgcacccgaggatcccgacgagcgaggtccaccaacaattgatcaaatatatgatatgcagctagcaccccccgctcacttgacggtactactagcatttaaatattttgttgcatctgtgtgtccttatacatagggttccactttctaacattgttgctacgcttcatgcagaccgacattgcaggggagttagtaagggatgcgaaaactttgtgggagaagtttagagatggaatcgtgagtaccaaccaggaagttatggccgcggttgactccctccgtagaaaaggtaagcgaatcatgtggctcgcgtcgtgccgacattcctcggacgtctatactccggcaacatcaagaaggacgttcaagccaatgctggagcgtccctcttacctcttccctgccgtccacctcagcccgcccttcagcctccgcgcgacgatccagcgacggtcgtgctgcagtaaggtca

SEQ ID NO: 27577 - DNA, 5026 bp, Oryza sativa
ggggaaatagagccagggaccacgtcgagcacttagagtgcaatgaacagtgctattttctatttaacccgattttagtttatcccttgtataaatttcattctataaatcctaatttttacataaataaggtttgcccaatatatgttttaatttagatgaaagtttaccaaattttaatataacccatattttattcttatatatatatttctattgtattatttaaatgaggtctaattctaaaattagcctagataattttggaggctttgagggttctaaaatatcctagtgtggcccttattattacaatagcacattgaatgaacttatatcaatatattttacacggataggttgaatctatttattctataaatagtatattaagactcggtacaacattaatctaattttaaacactcacatattcttgtttatatataaggattaatttatttatatgaccattattttatatgagtgattttcatgtcatgagtaactcggcgacatgttgcaagtatcaatctatatattccggtgaattacttatttataaacacgatcactatagtggtgatcatcatttcatgtgttcttatatttcatgggagattcgattcaaatgaattagatttaatcttactatttctttagctaattgtgacatcaagctatcaatcatggttcgaatatttaatacctaatttgtaatttgtaatagaaattaatatttgacttaactatcttgtgcataattatttgtaggattaaatatattctcgtaaatcatatctattgcttaaatgtagttcttttctttaccttcttggtgatcatttatggtttggcaagcaataggaatcataacaaccagcatgatgcaaaagttttaaaaagttcgaaattttagtgatttttattgttgggaatttttaggatgttacacgagaggccgaccgcgcgggagtgatctctccggcctcgggctgaggaagaggaagaagagggcgcgcccggagtcccctttccgcgtccatgaacgcaccggctctcccggcgcttggcgatggacggcggaggcgaggcagagcacgggagcagcggccacggtgaggaggcgaatgggagaggaaaggaagggagggggaagaccggcttaaatgggcggcaatgtcggtttgagagaggggaaccgacatgggcggtcaagccggcgagctggcgctccggctagcgtccaaagcggggacaggaggtgacgccggcgagaggggaaaaaggggaggaaaagagaaaagagggagagaaagggggcttgcccctttgccgattcgggaaaaagggggaggggagcggcggcgacgcggcagagagaggaggggcgtggcctcctttccttggcggcttgcgcgcggagtggcgggggccgggcggtgacgacggcgatgaccgggggatggtttggagcggcgcgacgacacgggcgacgggaccgggcgacgcggacggcgcaaacgacgcggctcgggcgggaaaccacgcggcgcgcgcgcgagcaacggcgcgcggggccggctttgcgagcggggagctcgcgcgagagaagggggcgctcggcgcgggcgactcccgcgcacgcgcgcgcggcgcgcgggcggagcggaggggagcagagagagaggcgctcggcgcggctctcgcacgcgcgagcagcgagggggggaaaacgcgccgggggggagagagagagagagagaggggggaagagatgggccgagcggaattcggcccatcgaacccgggggaggcaaactagacttttgcggagggattcgatttggaaggaattggattcggaattgatctcgacgatcgatcgcggattgagatcttgagatggcacggacactagacaacaagcaaagaaacaaatttcgcaattagggtttttaagagataattttcccgctaggcgccacgacggaacgggcgctacacttgggctatgctcggcgcccaagttttctaacgttcactctctctttttcatgcatacgttttctaaactgttgaacggtgcgactttttttaaaaaagaaaaatataggaaagttgttttaaaaataatattaatttatttttcaaatttatttaagctaatactcaattaaaaatgcgctaatggatcgacccgttttgcttgctggggagtggagctctgaaaaactaaagatataaggcagtcaagcggcaggggggaaagaacttacgccaccctgccctaccagcagagcaagggctcttctccctgtctgcaagcttcacccttagactccagaatcaacactccaacagcatacaaaagcgacaagattatgtagtgcaccactatctagcaaggtaccggagatcgaggggatgactggagttcgtattgaagaagccttgatgcaggagaagacaatccatgcaacaatcgcaaggaaacttggagtaaccttcatctgtcaagaaggtgattctcacataaaccgttatagcacttagaagaaattatttccatttggttaggtctatctcactaatgaaagaaatgtagccaaagtgccaaaccattcactttgcaggactccgatccgagaaaataataacactagattgaagcacaggttttgggttaaatctaacaacccaatacttgagagtatcactagggagtaggagcacctacaacaccataacaagctcgtcaccgagcatcatgtccggccatggcctatgtcaccgtgattaccttctccatccaaccagccataggaccaccagtccaccacccggccggcagctagcttgaagttggggctgcacagggagtagtacgagagcagctggcgtcggcatccgtggtcgccggcggcagccgtgctgcagagtagagtttggagtagccattagcagagataggcgaggccccgtttggtaggaaaccaaactccaatttctagctctaaactccactctaatgggagccggcttgagtggaagttggggactagctgaagagagaagagttaaggagagagaagagtaccgtagttttggttcacattagtgtctgcacagctgagaataaagtctagcttaaatcaagctcttaaataatctggtagtacagctttcccaggttaataaaatttctcagtattatcaaagcatgtacaatatatatcaaatcgttgtttagataaactttcctaacattttgtaatttcagaacataatatagcgtatggaatatgctacacggatgattgattgattgcagccgaatttaatttaattgggcattgatcagctcaggcaagtctctctcaatcccctgttgatagtttatggtaattttatctatgctaaaagtatattttaaaaactataattcaaatgtagtgttaaggccaaaataattcaaagtaactgtgggtgaagtggtatgagcagcctagtgctaaaataaaccttcgtcatttatgcttgtgtccaaagtgaagactatggagaactaataattattaaatctattcaatgttatgagtatagtttagttttataaattcctttccgtttgacaaaatatacatacaattggtaacagtgtaggatataagtgtagtatataggttatcatattattaatcactcgatccatatatattttaaacatactatttattattgaattgctgaatacgaaagttgtcacccttactgtgtaaccctatataggtttcatgcgttacaagtataagacattgaaaatatggctataacacttgatgtcaaagttatattaaaggtagtttttagctatttgtataatcgttctctgatgtggcaaaacaataatttgtttaatattaattcataatctgaaacattgatcttttgggttaaaattgtggagtgtgatactcgcccatctccaatgctttgtttttcacaactacatgtccagatagctatatagcaaatgcaatatatagtacctttctatagacaccgaaaaattgtgacctttgctgtgagacacctgaagatcgtgtatttgctcgtggacactgtaaaaaagtggtaattagctgctggacactcctcccattattttattatttccgatcaaaaaggagagagaaactttggttaaagacaagtttgcccatgggtctacttgtcaatctctctttctctgttcatcttcttcctctctttctctgttcatgtcttcctctcgctgtcacggcacacctcgccgtccggcctcatccgccggggagacgacttcttctccctccgcgacgagttcgtccgctccgcccacgccgcgctcgccgacgcgttcctgccctgcgacccgcaggactgggagaggaagcacgatgtggtcgccggcgtcgtctcccacccggtggcgcgccgtgttgaggagctccgcgtcgccgccatcaagtccgccgacgggccgtcgtccgacaaggaggtctcggagatggaaggggagttccacctctccctcagtggcagcacccagccgtcggagacgctccgcgtgctcgacctcaccgggtgcggcagtttctccctctccgctggcatggtgttcccgcggctgacgacgctgcggctgcggctgcggctgtgcgtcgtgcaggtcaaggacctgcagggcgtcgtcgactccgcgccagcgctcaccaccgtgcacctcgagtccgtcttcctcgccgggccgaaagaagatggctgcgccagcgcccgcccgggcagtgcaccacgtcggcgtgcgtcgagagagagaggaaaagaaaagaagagagagagagagagaggaaggcgtgtgctgggatgccgccgtgcgctgtcgccgtcagagtgaaacccggcgatgcgccgccgctgccgtcgcccgtcgagaccgagctggctgccgtcgcgcctctgctccgctgcgaggaagaagggg

SEQ ID NO: 27578 - DNA, 14049 bp, Oryza sativa
ccttcgaggacaaccggctgtggctgcgccacctgcagaccctcgtcgtgcaggtgatgggtgcttcgtatgttctctacaagtacatgcccggcaaggagaccctggtcatggcggccgccgtgctcatcttcgtggtgggcattctgaagtatggcgagaggatatgggccctccgggaagccaccttcgacaatatagccaggtgtttggaccagcaggaggattatgccagcgctcgcgaacgcgaaagcgacgatcttctccagcatgttctacaaggaaggagctctatggacgaggagaacgttctgattggagcacatggcctgctcgacatttgccgagggctgttcatcgggtcacgcggtgggaggcgcggctacctcaggcatgtcctgctgtccttccaaatgtatggccgtcttgataagctgatggagttggagctgtccctcatgtatgacatcctctacaccaaggccaccgtgatccacacatggatcgggtgctgcatccgtgtcatcgcgcttgccgccacggtgaccgccacgttcctcttcctgctcagcagcaaacacgggcacagcaggaaagatctcgccgtgacatacgtcttgttggccggggccttgctcctggaaatgatatccatggtgagggcagtcttttccacctggacggtcgtcttcttgtacaagctgaaatggtattggctctatggcgaggttctctccatccgccgtgttttcagggtggctacgcacaggaggtggtccggcacagttggccagcacaacttcctctgggccagcgccaatgccgtcgacgccagcgccgccgcggaagcgaaagaggaaccgccggccagcgaacccacgggttactactgcttggacacaatggaccgttgctgctgtcaccgcaccaagctatcagactctaccaaggagcagataatgaggaagatactagagatgcacgagaacagacaggaaatcgggtctcaacctggcgtgcgcgcgttcaaagctctcggcctggacggcagcctcggctggaggaccatccaagacatcggcttcgaggatagtatcatggcgtggcatctcgccagtgacatctgcctcttcagtgaccgcagcaacaagctggatttgcacgagggggtggcggttctgtccaactacatgatgttcctcctcgtgcaccgccggtacatgctgccaggccccgtgcgtcgcacgcggtacgagcaggtgcgcgacgatctcaacaagtttatgcatcgaaagggccgcgctcgctcgccgcaggacttgttcgtgtgggctcttcgcaggggcctccatgatcatctcaactccgacgatcctccggcgcagtacgacaccggagtaagacttgccgccgtgctctaccaccggttggacaggcttgatatcatctttggggtgtgggtggagatgctgtcttacgttgcttgcaactgcagcagagagtctcatgccaggcagcttagcagcggtggtgaactcgtcaccatcgtctggcttatggcgaggctcgtcgacatgtcttgaaacttttcatcctcataggctcagactatattcatcgtacatagagataattatgaatccttctgtttctagcaccagcagcttcatctctcctgtgtttaagtatacggtagttgagatgtattaggataggatttatttagatcgtagctttccttatctatgatctttaattatctctactcatgtaatttctataacatactagctctatgtgactataaaattgtgtatgttgcgctctcttcaacttacactattcagcatgatattacagcgggcgacctagggccaccgctcacgcttccaccaccgttgcccccgggagggttctaatctccaaggggcggccactcatttattttttttctttgtcaatgtcttcgtgttttcttcgtcatcttagcatcgtcatatagcagcaggagcacttacctctggttgtcaccacgggactcattccgtcattctatccaatttcctcaccgataaagaagctgtccttaaaataaataacggtaatcgaataaatgccaaaacatgtaaaaaaatgaaaatgctctaaaatgctttaccctgagatgaggatttccagctacttttccctccctttccactaccatagagggtgccatacgagtgttagacttgatgatataagatagcgctatggagctttgtttcaggagctctgcctcttcctcactgcaccgcgcacagttcattgcatgcaaggtgtttgttagagcctgttttatttccgttttttgtggcttggttgttacagaatgagtcgtgtcttgtaaagctggattcgtgcaagttcacgacgaggcgtagtgtagcgagtcgtacgctcacgttctccgccatgtgggatggcacatgcacaactggaggaagtgggagtgcaaagagttggagacacgatcgcatgatctcgttttcgctttccataaaaagagatgaaatatacagaaaagctgcgcaagtttggtggcacaaaaacttctctcgtgtgttcttctcttccaccattcatcatcaagtattgttgatttctagggattagcgaataggttgattctgagtttttgccaacatctggtatcagagccatgtcgcctccgacgccacacgtctcgcattcgccgcatcgtcaatcccgctcgcctcctccgcgccgtggtcgctgttggcctggcgccgcttgggacttgggtccggacaggcgcgttgtcaaggaggtggggggtgatgctgcaggcgcgcggcctctaggaagctatcgacacgggtgacgtcgacttccaggaggacaggatggtgttggaggccgtcctcaaggcggtccccgctgatctgctgccggtgctcgctgtcaaggagatgacgaaagacgcctgggatgccatcaagacgatgcgcgtcggcgtcaaccgtgtccgcaagtcaaaagcgcaggagctgcgcaagcagttcgatgcgatcgagttcaaggaaggggagtccgtggaggaattctccatccggctgagctggctcgtcaacaaccttgccgtactcgggatccagcttgaggaatcaaaggtctgtgaaaattttcatcttgttgttcctgaacatcttgagcagattgccttgtccattgagactctgctcgatctcgataccctgtcgcttgagcagctgacggggtgtctgaggaatgccaaggagcgccgtcccaagaagaagtccggcgatgagagcgacaaactgtatctcacggaagaacagtgggccactcgtgccgaggaacggcagtccggcgagggatcgtcgggcaagaaggcgggcaacaaccgccgccgccgcggtgggcagaaaaaaaccgagggcgctgccaatggcgagcggggcgcgcgcgatcaagggcgcgacaagtgcaaaaactgtggtcgtctcggtcattgggagaaagactgtcgccagcccaagaaacaagccgaggcacacgccgtccagggtgaggaggaagatgacgagccggttttgctaatggctcacgctgttgagctggcgcaacctccaccatcgccaccaccaactgaaccgttcgacctcgttgagcccaaggtgttcacactgttatgaaaatagatgcacaacggagacacgaattttacgtggaaaacccttgcgggaaaaaaccacgggcgccgaccggcaatgatcactatagaggagttgattacaaacgtagcggaatcacaatgggaacgtcaccccttcccatacagcttacaagagtatatataggggataaaagaaagacacctaataggaactcctactaggaaactaaaccgaatatattgtggggcccaaaattcggatcacatatttaacaatctccaccttgagacgaatttcctcttgtagcatgaaaaacatcaaacaccaaaaatacctcatgtaggtaaaatcaccgtgcgccaaatagtctctaggactatactgtaacaccaaccaagcttgagcaaatctcaaacttagtagcaggattcatatcagctgggttatcatgagtacttatcttgcataccttaacatcaccttcagcaatcacacctcgaataaagtgatatctcatatcaatgtgctttgttctctcatggaacatctgattctttgtaaggcatattgcactttgactatcacaaaatatatttatgcaagacgtaactccacaaagttcagtgtacaaacctttaagccaaatagattctttacaaactttagaaatagccatatagtctgcttcagtggtagataaggcaacagttgcttgcagacttgccttccaactaacagcacatcctccaatagtgaaaacataacttgtgagcgatcttctcctatccaagtctccagcaaaatctgaatccacataaccaatgagtccatttctagatctcccaaactgcaaacaagcactagatgtaccacgttggtatctgaaaatcaattgaacagctttccaatgctctttgccaggattagccatgtatctactgacaacacttaatgcatgtgataagtcaggacgagaacataccatggcatacataattgaaccaactgcacttgaataatgaactctagacatgtactcaatatcacaatctgactgtggacataaatctgaagataatctgaaatgtgcagctaaaggagtactcactggttttgcatcatgcatattgaaacgacaaagaactttttcaatataacttttctgactaggatataacttgcgtcagaatgtctttctctagtaatttccataccgagaattttcttcactgcacccaaatccttcatctcaaattcactactcaattgtgccttcaactttgctatctctgatttgtcttttgcagcaatcaacatatcatcgacataaagaagcaaatatatagctgaaccatcagcaactttgacataaacacagctatcataattggatcttctaaacttttgagaaagcataaaagagtcaaatctcttataccactgtctaggtgactgcttcaacccataaagagatttcttcaacctgcatactaggttctcttttccaggaacaacaaaaccttcaggttgctccatataaatgtcctcttctaactccccatgtaaaaatgcagtcttaacatccatttgctctagttcataatcatgcattgcaacaatactgagtaaagtgcgaattgaactatgcttcacaaccggggaaaagacatcattgaaatcaatacctggaatctggctataacctttagcaactaaccttgctttgtacattgcctcatcacttggagatatacattcctttcttttgaagatccatttgcaacggataggtttcttctcctttggcaacttcaccaattcccaagtatgattcttttcaagtgactccatctcatcatgcatagcagttatccatctattgcaatcatcagaaacaatagcctcagaatatgtagaaggttctgcattaccttcaatttcttctgccacactcaaagcataagcaactatgttcgcttcttcaatatatctttgaggaggtttagtacttcttttgggcttttcttttgcaatagaacgttttggagactgctgaacagtagaagaatttgtatcttcaataacaggtgcatcttggtgaacagtagtgaacccttttccatagactttggaggcgaatcctcgtcaaagctgcaccttgtgatcttcccatggctcgcgttcggccacgtgctcccttacctagagctcgcagagcgcgtggcatcgcgtggccaccgcgtgtccttcgtctctacaccacgcaacatcgcgcgcctcctgccggtgagccccgccgtggcaccgcgtgtcgacctcgtggtgctgccgctcccgcacgtcgatggtctctcggttggtgccgagtgcaccaacgacgttccctccgacaagttcgagcttctctggaaggccttcgacgccctggcgccgccgttcgccgagttcttgggcgccgcatgtgtgggaacccgagcccttccggcaggtggtgacgttcatgaaaaagccgcttgtccccctcggccttctgctgccgtcgcccgacggaggacgccgccgcaccgccgagatggtcgacgacgccaccatgcagtggctggacgcgcagccgccagattcagtggtgtacgtcgcgctggggagcgaggtgccgctgcgcgtggagctggtgcacgagctggctctcaggctagagctcgccgggacacgttttctcttggcgctgagaaagccctgtggcgttgatgactcggatgtgcttcctctcggctttctagagcagacgcatggccatggacatgtcgccatggggtgggttcctcagaccaccatactggcacatgccgcggtgggtgcattcttgacgcactgtggacgcaactcgcttgtcgaggggctcctgtttgggaaacctctcatcatgttgcccatcgttggggaccaagggccgaatgcatggtcaatggagggtaatatggtaggattgcaggtgagacgagatgagaatgacgggtcattcgatcgccatggtgtcactgctgcagtccgagccgtcatggttgaggaagaaaccaggagtgtgtttgttacaaatgccctcaagatgcaagagattgtagctgacagggaactccatgagaggtacattgacgggtttatacagcagcttattttccacgtcgctgatggcaactctgatactgctgccccagatccttccagctgagacttagtttgctggttgtattatatgtctcagttactgtaattcatgtggtaatagcaacggctgcatcacttgtttatgtaaagaatgggggtttatacttcctttgtccaatcacgttgttctatcttccttatccccacgcattgtttatactttattagagtatcacggggataaatggctaaaatttagctccaacatacactggtggagaaaccatctttgcccggtcaaccaaaaaccacaatagtcccggttgcaataaaaaccgggactaataatggtttttagtcccggtttataagcagaatgggactacatgatctttagtctcagttggtaacaccaaccgggactaaagatctaaagatcatctttagtcccggttcacatgctgtcaggggttgtcagggccctccttgatctttagtcccggttggtaactccaaccgggactaaagatcagatctttagtcccggttggtgttactaaccgggactaaagatcaaaacgcactatataatccctattacttatcctcttttcccgtccacacaaactcctctatcccttcatctctaatccttatctcttccttcctccttatttcttctcttctctttccgtcccgaagggctgaactgcgcagcagttcctccttatctcttctcttctctttcagttatgcacgctgagattaactgcatcaccatgcagttgcgcctaaggatagggagaaaaatctgcatgcgagtagatcacgacaacaactgcaagcgggatgggtgtgggtttatgcagccagaggagggcgggccgaacgccggagggcgccgcggcggcgcggagggccgcgcggtggcgtggcgaagcggcagccagggaggaggggaggcggcagcggctgagccagccggcggctttgctttgtttcttttttttttaagaatttgtgatccatgtatagattgagatgaagaatttgtgatgtatatgatttgtgtatttgggatgtttctttgatttgggatgtataatctgtggtgtatatgattgatttgtgtatttgggatgttacgttgatttgaggatatgcatcccacctaatttgggagaaaataaattagagattttgatttgaggatatgcatcccacctaatttgggagaaaataaattagagattaagcggtgagtagcaataaatgaaaaaaaaaactaaccggtactgccgctgaatctttagtcccgaaataaggatctttaatcccggtttaaaatccgggacaataggggggttacaaaccgggactaaaaacgatctctccaccagtgatattctcttgtcagttgctaaaaatttggagttcctttctctaggtatttcgctctccatttgtagcggcgcgcaagcccgtgttagtgatatgccctagaggcaatcatagagatgattgtatcacacactatgtttacatatttatccgactttgttccttgaaagagataaactcattattggttaatgaatatgtgattctttcatgagactctttatgttatgtgttgctatttctaaaggatccctgatcaaatatcatatgtagaacaaatatgtttagatgatcagcacatatattaattgatgatcatgtcttatggatcatggtatagagataccaaattactaatgtggacacatgttggtgaatatgttgttggatagacccaacatgagacactgcaagagccatatgtgttgtgtcatcagtgatcccatttagtgttggtgttgaatccttagacctgagattatcatggttcccaacatgtgtaatagcttacttagggactgctaaacgctacttcgtaattgggttgttataaaagtagttttcgggtatgctatgaaacatgtagtgggatatgaataatcaagatgggatttgcccctcctatggagagatatctctgggcccctcgatgttgtagattatggaagtgcatgacaatgccaaaggtgattgagaagtcaatcacaagttatataatctatgaacacgttcgagtgaatgattgagctattagaggatggcgcatatctagccttgagcttaatagatatcgtgaggcaaaggggttcatacaagtatacactagaggttcagccgatatgatctttatgtatgcctggtgggtcaatacgttctgctaggggccgctgttgacgcgtggaccgaaaaggagttttcgggttatagccgagtatatatgaacctacagggccgcacgcttaatgggccggaataaggggattggatgaagatccaatatgagcttaattcggatagggatccaaataggagtcctatgggccttggaggcccgagtgatggatcctatatattcgtgaggggtgtgaccggtggaggcattccatcacgtgagaaaccctagccgtcacttccctccccgagcaaaaccctagccgcgcgcgggtgctagcacatctgcgcgtggcgttccgtccctgtacgtgtggataccggtagagtcgccgctggtttgcgatgctgatcggcgtgggagtacggcgaggagaactcacgaggaggagaaggtcgagccggtgcgatcgactacttcctctacatcgacgcgcgctacttcgcgagagttccttcgacttcttagcgttttcttccgctgcgcagcacgtcgagtggtaacgatctatgatctaatacttgcatggttcctggtttacgcgatagaaaattttgatttttgctatcgtagcctatgcgtatcccaacagcccgaacacaatccctcacaatcttcagctttccactgcttcgactcactcattcccgcggcggtgccacaaatgctcccgccaggcaagtcgtcgtgtacaaattattcgccaccgcctcgacctgctcctctgctggtggcatcttccccaaatccagccagaaatcatccgcttctccccaagcacctccgccggcctgacgaggcccccaccgccgcctatacatagccgccgttgtccagggacacacgggcgacattgcagcgaggtgaccacccaacaaccatcttggacgaccatatagagtgtcacaactcatgatgaccatgactcggccggagctgatctgtcggcagatttgtcggttgtgctgtactgaaccagatctctgtatgtaataaaccatttagaaacttcttttgctccctgtggtagtgaaggaactgttggaaactttcatgttttgaacaagtcaggacccctatcgctcagatgacaagttttagagcaccaagttagcttctggtgattgctgctgctgctgatttttgctgccgttgctgctgctagagaagttttattgttgctggtggagtttgctcctgattgctgctgttgctgctgctagagattttttgctgcggctagagtttgctgctgttgctgccgctaaagattttctgctgctgctagagtttgttaattactggtttctgctggaattgctgctgctgctgccgtgaactggtatcaatcgtgatacaagggcgcgcgacgtacagcgacgagccactcaggactcaggaagagtaataaaataatctctgttaatttctgttggtagttttgtatatagtccacttttttcgtttcagggagttgattttacccaatcaaattcccccaaagtttcaggatctgacactactagagtagcggtgaggagcaaaggccggtggtggcagggttcaacctttcagtttactgacttgtatcggctgtcaccgaaattccgaaattttagaaattttgaaaatattgtgaaaatttcagacgaaattttttgaaaaaatttgaattcaaatttagaaattacggacgatggctccggaaaatgaaaaaaaaacagatagcaacaaaagctctgttcggcaggcatacaagctgcagctgctgcatcacaaattcacaaaatacatccaaacaaacccactgacactgacagtgacagatgataaaatgtaggttcaaagtctgaacagcagcacatcaacacatcagccaaacgcacccgctgactagcagcacagcagatagtgaaaacaaacaaatgtgaagaagaggataattacgaaccccggaaagccaccgtcacccggagtgtggcagtttggctggcacaccgccacccgcgcgcagtggcgcagcttattttccacgtcgctgatggcaactcccatactgctgccccatatccttccagctgagacttagtttgcgggttatattatatgtctcagttactataattcatgtcataatagcaacgcctgcatcatctgtttatgtaaagaatgggggttttatgcttcctttgtccaatcacgttgttctatcttccttgtcctcgcacattgtttatactccattaactggtcaacttccattgggtggcctctttcctttttctagagaatagattttcattaatccataaagaatatatacaaccaaaaagatataagagcacttaggctctgttcatttgcctgggttgggaacccatccctccagcacggaaaacggagcagtccattagcacgtgattaattaattaattatttttttttcaaaaatggataatatgaattttttaagcaactttcatatataaactttttgcaaaaaatgtaccgtttaccagtttgaaaagcgtacgcgcgaaaaactagaagggggagttgggaaaaggggaaacgaacttaaccttatacacacatctcaacaagaagaagaacatgcacccataaaaaacaaaaaactacaaccccggggcctgctttccaacatcatcttctgaaatggccagatacgacgagtttaagtcacctagtcaccaccgcccctactgcgcagttgctgcgaaactctgctggtgccatcttcatccgcttcaggtgacctgacgccacacgccgccggttagcacaccttcatccgccgtccatcgtcgttcagtcataactaactgaccaaacacgagccgatgggatccacttccacttcgccggattccttcaccacccatagggctgtggggacacccaatttaggcttggtgccccgaaaatccactcgtgatcgtccaggatttcgatgacgcacagattgatatacagaacagctttcaattatttacacaaatttgtttatacaggctaattatacaattgttaaagggtgaaaagatccaaactaatacatcattatttgaaaacaaagaaattcaaaagtgctaaactactaaactcctaagctctttaactactaaaactacagctaataaactccaaagaacttcaaagaactccacagcaaaaagctcgagtgtagactagcctagaagaaaaacttgtcgttgccgtagatctcgcttccttccagacttcttgttagtttaactatatatcaatttatgcaagggggagtacttatgtactcagtaagacatattataaataattaaggtgaagagatatgaatacataaatcaataagaaagtaaatgagtaataaaatcatatatcaatcttatcctcaaaacttaaattttaaaactacttatacttcaggagtaggaatcaccctgatgacacaactccagaaccgggagtacggcacattcgaatgatttaatttacctctgcagagactgtccagctttacccacacgatgcccacagctagctaggctgagaacaacagagccgttcgaaggtcccacttactactagttactgcacgagtgggatattgatcagtcctagcagtcgggcacttgctgggcctaagcaaggctacttggtcgctgctttcatgggttccaccgttgtgaaccatgcccccaacctccttacgcatgcgttcaccccaatcctgttcctagtgagccaaccaacagtctttcatatagtgggacaatgtactaggctaagtccaattacttgatcgtgtggatggacgcaattatgtcatttccatggtataagggggtaattataatccggttaaaccacccaaaacattccaacctccccacaccaataaacttcatcatatatcaacattcataatcacaacattcacaatctcaattcataaatgcaggggcgaagctatagcaagttactggggtcagtagaccccgatgatttcttctgagtcccttatactcctttttattttacagctatgaccccggtcaaagaaaacactagaccccggtgattgtttcgttaaagctcaactggtggcaaggaacgataccattatcagctagcaaatagaaaattagttagcaattgtgattatatatcagtctacatagatatacatatacgttttagactggcgctcataaagtggcccttatttaggattaattgctccagtagccaactaatcctattattatttcttgattatcatcacaatttggttgaacctagtctctcaagtctgaatttgaggaaattagagttttgcaatataaacgtctgatttttcaagttcagttacatgatcatgaggcatgagcctgggggaattgttgacgaaaaaatcgaacacaccggcctgggagatctgcttagctcttgtgcaggtccaaaaattaatgaggtgcgggcgtgccagtcagtttgatcctgcaactgacaagatatgtaaatggtagatcaaaacagccgatcggctgacaagccgatggaatagttccagccgatagccgataatagccgatgccgataccagccgatagcgatagagtttaagcaatcggctatatgtccaatgtagataatgatataaaggcaaacggctgatgatgatgtaataaaataacaatacaatccaatataaaccaatcggctatcaatgatatgataaataagcatcgatccgaaagttaaagcatacatcggctgcaggtccgatgtcataaaatccacaagattatattaaacaattaaatcttattgcgatcggctaaatccaatatgtatgcagggggatcc

SEQ ID NO: 27579 - DNA, 738 bp, Oryza sativa
cttggctattccctccaagatctcatagggattaaccccgtgctttgcactcatcgtatccctattgaccccgagagtaccccctccaagacggctcaataatgcgatgcgtgaagttgtaatgaaagaggtcctgaaactcctatatgccgagattatttatcctgtaccatacagtgagtgggttagcccaatccaggttgtgccaaagaagagaagaatgacggtcgttgcaaatgctcaaaatgaacttatcccacaacgaatcgtaaccggatggaggatgtgcatagactaacaatgctacgaaaaaggatcattttccgctaccattcattgacgaaatattggaacgcctagaaaatcattcctttttctgttttctttatgggtattccgggtatcatcaaattcccatccatccggaagaccaaagtaagatgacgttcacatgtctgtacgacacctaagcttatcgtaggatgtccttcggactatgcaacgctcccgcatcttttcaaagatgtatgatgtctattttttcggacatgatcgaggatattatggaagtcttcatggatgacttctctgtctatggaaatgatgtgaccatggctactacggatacatccgttgctcaacgtctcgtacggttgtagtcggatcgtcaacgtttctccgaaatcgtagttatcatcaactcacagaaagatcaggccaacaacagccttgagtgtc

SEQ ID NO: 27580 - DNA, 1721 bp, Oryza sativa
tatagctatttttggttatgcatatggacaagtatttgtataggttcatagctataaatagctatattttgggacggagggagtaggataaactttgcattttcgttaataactttattttttgtctgaatagctaaccaacccatacactactacactagtaccgaatcttttgtggagtccaataaatattgtatctttatcatttaacacataactttcttctttttatttatggttgcagctatcataccagattgttgactcctttgtttggcttggtattcgggatattataaatgatcttcggaaaaggaagttgaagttaagaccagttacgtacctaagtagcgcacatgcttattcaaatgatattcctcatgcatatatctggagtccttaccttgtacccaaaccaaagggtatgtatctcttggctctttattgcactaactaaacacattctctcactagttagctcatcatgtttgttggcacagccataaatatggtgattgtatgatgtagctgcaagcatgactactaaagtatccaatatgtatttaattatcaaaaggaaaaagtccattttgctcactcgaactatttcgctggggcacttaaccctctaaactattttgtctgctcactttaccccatgaaccactaaaacgggtcactttttctatcttatggaagctctgaaaaaatattttgaagggagtaaaatggacctttcctttctcacaaattgtctgtatattatatgtttatatttatattccatcgtaatttccatggaattaacggttatgaatgagattaaaaatatgatgttctcttcctttacagactggggacccaaaattgacgttgttgggttttgcttcctcgatcttgcttcaaattataaacctcctgaaccccttctcaaatggcttgagagtggtgaaaagcctatttacataggttttggcagccttgtaagtttagcatattttcttgtgttttttttctatcatgtccctagtctctacatatgattattctataagttcaagtatgtttccttattgtcttcatgacaacgttagccctttattgttgggtcaatttcatccgtttactttgtccttttttgtcgtacaaggtgaatggataatagatttggcagatattttatatggagctgattcaatacacttcttaagcaaacaatcatattgacgtttgtgcaattgccccatttattaggaccttgataaatttgtatctagttgctttccttttttttttaaatcctgaatttacttgtctaggaaattgaaatgtagtcatgttttctcaatatgcctatattgcgcccaacaacatatggcccacatgtcgacctgccactgctactgttcattaataaggaatattttctcactttccatctcctttgctaatccactagctataaagcaaggtctaaagttaaattagataagctagaagcctagaacaaatatgtttaaaaccctgggaaaagctaaagaagactggtctggagctcaacaaatacatagctgtgaatcctgaagcccaacctgagtgctgaccatcagcatgttgcgcacagtatagcaatattgcattctcagtacaaaaacaaaataaaaacatagcagagtccaccaatacatgtataagaagcttataaccagagtctataacat

SEQ ID NO: 27581 - DNA, 13212 bp, Oryza sativa
gaccaccgtgtattggcctggttagaccgcagcttgagggccggtttgaccgacggcatgtggtccgtcagaccggcagagtctgagcccgagtttgttttcgtcgggtcttgggattccttattcgggaggctatgtttcgggtttcctttggtttctatcctgagttggacgtggaggaggacctgtcggaggcaagaccaacccctctataagggataaggtcggttcaattgaggacacaatctacacacaagccaatttagccaattgaatcgctttttcaatatttcaatctagttcgcccatctttgtcgatttgcgccgtaaatcgtccgccttcgctgcgagagtgcgaaatcctttgtaggtttgtcctgtaaaccttccgtttgcccacgagacaggtagttatctattgtttcatctaaatcggctccgctagccggtttaatctatcaaaacccatcttagtctagctttttgctagattagggtggttggcgactccttatcaccgcaaggcgtctaggtgtccgatcgtgcttgtctacttgtcaaaaaaagttgccaacacccacttaataggatggtagccaaatattggtggggcgtagaagagtagtaaggtctctggtggtaccaaggaaacacttttttttcccagtgcaaatcagggagtcttgggtacttccagtgggaaataagaaatttctgttgttttgagcttccttacgtattagttgctaagattttctctgctttcgtttataactgatgactcagtaatttcagccaattccagaaccagataagttgacaagaatcatagtggaagcacttgaaattactggacagagaggtatcattaacaagggttggggtggccttggaaattgtaagtataaagtcgtaacagttctttggatttgacatattaacttgccatcattattcatgctctctaacatttcttattatgccattttgcagtagaggaacctaaggaatttgtatatgtaatagataacattccacatgactggctttttttgcagtgcaaggctgtggtaaggctttctgctatttcctgattgttatatgccgacaatctagtatcgcgactgaacatgctgcaatgcttatctagacaaactgggtagaaaactgattatgactagctttaaattcaccggagatttatgttaagcttgaagtcactgattaacacgattgcatacatactacataatcagggggggttctggacttctggtattctgatttagcagttttacttgactgcatgctaaataccttgtattttcatgcaccgccaacagatagaatcatagaagtcatgcgtgctgtgacagtggaggattttttttttttttacataaaggggagatttgattaaaacatgagttgtaactgtggaagacaatgcttgatttttcttattaattttctaatttactctgataatagttgtagccttatttactttgaaacctactttattgagatatgaacacttttgcactacttcaagttttgagtatgatattgtttttgtttcaacagtgaaaatataacgtgacattattttgttcagtcattttgcatagaaaagaataagactgcattcttttttgttgactgctgttgtattcccttttcccttgtcaggtacaccatggtggtgctgggacaacagctgccagtcttaaggctgcggtactctctctctctctctctctctctctctctctctctctgtttgtgtttgtatgtgtattgtggcacactgctaaatgtctccatttctaaaatttgtagtgccccactaccatcgtaccattctttggagatcaattcttttggggcaacatggtgcatgctagaggattgggagccccacctgtccctgtggagcaattacaattgcatctactggttgatgcaattaaatttatgatggatccaaaggtatgttgcaaattttgctagttgctgattatttgtatttttatcgcaagttattcactagtgtcaaaattgtcaagtagcaattatgccacatatagaaaaaaacaacaaaggtatttttagttgtacgttctgttgccaaaaaatggaacttatgatctctttttttttggggggcttccattagaagtctagtacttttattgatgtcattgttaaatcaaattttatgtgtttctttacttgataaacaatttcctacaattgttttggtttatgttctctacgcaaccaactcagtactgttcaccatttgtcattttttgggttaataatcatgtgaacaactcgaaagtgaaaatcatttacctgtgagctgggtacttgcattcttgtctgtgaaagagtaggaactcagaacattcttgtctatgaatgcttcttatcctacattcagaacattcactatcttttcatggttgaattttatacatgcaaaaatttgatcattcaacattctatattggttgcatcactgataagatgattaaaaaaattatcaactctagtgcagtggtgttgtgtgaacaaagttactgtttcttatagtgaagttgctatcttaccatcagaaatcctgatatgttcaggtacagtagtacagcaaacagagttgtggctttgtgaggactccctatgcggaccccttgaacagtttacaaaagtacctgtgattcttttcaactagcactcaagtattatttttagaaatttagaagtagctagatataggcatcatacccacatgaacttgagtctttgctttttaacctgtaattctggaaaaactaattgaagaaaatgtcttcttgattatagcttgttgaaaacactaacaagaaatgacaaggaactagggaaaatatagcttataatactttcttaacaagggcaaggttgcacacttttcaatttgagttgtggtgttttgatcaatgccaggtgaaggagagagctgttgagctagcaaaagcaattgaatcggaagatggcgttgacggggcagtgaaagcatttttgaaacatctcccacagcccaggagccttgagaagccgcagcctgcaccgccatcgtcaaccttcatgcagccctttctcctccccgtaaagagatgttttggcatcgccacatagtccgttgctctcaagcaatcgtgttaatattttggcaacacaaccaacaaccatgttaaaagagaaatgctctcctatagtttttgttcgtcacagtatagaatgagcggtctcctgcagttttcttcaaacgtggagagattgttcttaccttaatttaacacctgttcagctgttatagcttgattcatgattggtttgtatagcagcggtaacgggctcgtttgtttagccttaattgtacagttggcagtcacaaagaatgttgcttggcactgcactgttggaccccttatcttttttttttctttatgttcttgaatgcttttcctggtactaatcatttctgtaactacatgacaccccgtgttgcggcggaacttgtagaaaacaatcaggatgaggtgctttttaaaacaaattaacaagaataattgcacacaacatgttaaggttgtggcttcacgcatgttaaggtattggtttggttgcacaaaacaataagtccctaggggagggagggacttatgtttttgagagaggggctctcccaaacaccccctagagagagaggatttgtacctggaaatgacgaatcaatgcgtccatgtcctctcctgaagagtatttacactggagcagaccaatgtggcataatttgtttacgcacttctcttcctaatttacgctttccccaacacaaagcgtattttcctagctttactcttttcccaggctggtgtgttttcgaacctcctagttcggatctcgtccctcatcaagaaaagaggtaacccgtacatgattaattaattattagcttgataaactagaaaaatagattaatataattttttaagaaactttttataaaatttctaataaaaaatataccatttaacagtttcaaaattgtgcgcgtgaaaaataaaaaaataaaagttataaagggagagtatataacccagccacctacccaaacacacatgcttctatgcatgtttggtgaggcagaatcatcctacgagagagaatttttcccatccaaagttgcaaacagctggtaggtacttaagctggtaagtcacagttaagtgaacgtttgtttccaacttaggccctgtttagttgcggaaaacttttgggtttggttatcaaatcggatatatagacacagtctaataacaaaacaaattatagattccgtcaggaaactgcaaggcgaatttattatgcctaactaatccgtcattagcaaatgtttaatgtagcaccacattgtcaaatcatggcgtaattaggcttaaaagattcgtctcgcaatttacaagcaatatatgtaattggttttttcctacatttaatagtccatgcatgtgtccaaatattcgatgtgacagcgtgaaaatttttattttgtgaactaaacagggccttagcatgctaatggacagcggtgaggtgcatggggctgcctatctaccacttgtgacttgtgtgcgaattagtaggagacttgaccacaataatgtgtctgtcgatcagtccatgatggaatgagcagctttccaacaagcactcaaataaaacccctcaccaacttggcatttccggtccgtgttctccatgctgttttttttcacagccacatgcacgtacgaagatcatcaattgaagtagcacccccatcatgatgacacttgtctcctgttgcaaaggaagccgggaagaaagcagccaaccatgggaatcgatcgaccacaccccactttcacctcttctggtgctggtgtggtggtggtggtggtggtgtcccaagatccgctgcagcgctgttttagtggccaccaacgcggcgcgccatgtggaggaaaggaaagcacatcgaaggtgaactgaaaagcatagcgtattcaggtggtgtactctttttagggcgctatcatgaagtttcagctgagtactgtttttaacgtcaaaaattgtggtagagagtttctctttctcgcggagctcctggttgtggtgttttctggtcggaccgctggtacggtccaatgccaataactatggtttctcgtggaaaagggttttcgctagggggacattggtagttggggcttgaggcccacagcctagatccataatcccattataattctacgaaaatataatatagcttttaaagattactaaggtcatattaggttggtcctaggtttgagttttttctagtttcaccctacttttttcacagagcataactttaataggaagaacttgttgcatgcctaatgactagaggaacttgtagtggatggtgttctcttttgagaatttggaagttcctaactttgttgcacaagaaaaaaaaaaggaagttcctaacttcctaagttctaactttctcttaaattgttgtaaagcagaaattgccctagagtagcatatatgcttgtggttgtcttaactcccaagtgatgtattgcatgagttgttgacaaattaatttagtcatgcactttgtataaatggatgacaatgttttatatgtattagcatgattttcttttaaacaaaggactatgcacaactggattataatataataataaattgttaccagtttatggtgatagctagaggagcagaggtgaatgtgatgaatggtgatgtagctgtgagcaatcaattcctaaggaaaactggccgcttactggtttttgcgaacaaaagtttgaatccaactttttaaattcaaaaacttgttgtaggcggtaattggctgaactgcccttaactatatatccggttcttgtttttgaattcaaaattataaattcaaatcctttggcataactaatgcgtaactttttctagatgtgccttgcaaaatatattagttctccacacataagttgcaagagaatatgttgttcaaatgatttcaaatccaaatttacatttcaaatataatttagattgttttcactactaaaaaaatagtttttacaggcggccaaaaacacttttcacaggcgggggagagaaccgccagtatcctatcgcctgtgaaaataggtgattttcacaggcggttccgcggctcgcctgcgaaaataatttcagggaacaaaaaataaaatccggtgctacccgccagcatcggcatccccctccagccgacggctctccacctccgcccggcgccgctgcccgagggcgaggagagcgctgcctttgccgccactgccgaccggctcccctcttccgtccagatctgggagaggagcggccggtgctgtctgcgccgccaccgccgtcggcccctcctccgccactagcatctaggggaaggaagggataggattggtgcccagagccgccgccgctcctcttggccaccgcctcctcctccttgcgcgcgctgagatgccgacggccgccagctgctcctctccttgcgcgcgccgaccaggccatcggttcctcctcctctgacgtcgctgcggctgtcacaccctgattttcgtttcaggatttataaattatttaataaattattattagaatttatattaaatgttcattaatttacaagagaagttaaatgtggaaaataaaatttcccaaatataaagcatggatggatttaatttttattaaattctccacggttaattatactctctggaattttctcagatttttcggagctcaattcctaattttaatcatacaaagagcagttcagcaattatttaaatattaaattaatcattaaatgatctgattttaatattgttaaatactttgagtgtccaagtattttcaggatttttcttgaaatcatttgagcattggaagtatttttaacaattcaaagatcatctcattgattaatttattaaattggaagtcctttgttgctcccttccggcccagcccaaaaagtctattctacgtctctctcgctacagtgtcgtcttccagctccaggcagagcccgagctgccgtcctgtgcctgttgccgtcgcctcctcctccatcaaatccggtgcatccgttgatccccttccaaaattggttgcaaaaacggattcctctctatctcctctacctaatcccgaagaaacccccatcaaattcgttatatatctcacgaattttggccgtttatattcgggtgaactcggataaatcctaacttctttcaccaaatccatccgttcctgagccgatctcttcagtccaagcctataaatagcaccccctagtcgccctctttcgttttccccatctcccgagctctctcgtcaaccgtagagccgccgccacgtcgtcttagccgccgccgtcgccggccgacgaacagccgcctcgcgccgtcgttttggccgtcgccgccgcctcctctcgccgccttcggctgcgcgtggaagaggggaagctcggccgccccctccccgccgtcgccggtcaccggagagtcgccgccgccgacgaccgactcgccaccgccgcacaagctcgccgccggccgtcatccgtcgtcgttcgtcgcgttggtgagtatcgttgagatcgcgtcgtcgtcctctacgtgtagatgcccttagatagcccagccgacctctctagctccggcgaggtcgccacccatgccgtggctgccgtcgatgacgtcatcgtgacatcatcatcttttctttttccctttttctaatagattaaatcttcggaaaatcataactaaataatcgtagatccgtttcaggtggttcaagttggtaaatttttctaaaatcgagatctacatgttaaaaatatccacatgtactgtttgtgcctgttttttactgttttgttgattttgttctttcgctttagtttccgacgttccggaggagagcgttttcgttgaggaaggttcagaagtgtttgcggaaggtcaaggaaagtcacacagatcccaaacaaccctttgagcatgttgaacccgtttaaaactattgttttatttcaacttatgcattatttttgaatgtcatcgggtggtgaaccttttcccgaataattaatggccgaagatgaccttattttcctatgggttataatctgattagctagaaccttatatattggtttggttcagctaaatgctatatatataattgcttagccatgcttagaaacattagctcattaatgggatgaatcatatatattatattattaattatggttatatttaatggtagctcacgatggttaatcgtgttatgataattaattgataattaaaacttgtcaatggtgggttgtgagcacatggttttgaaggtcgtgctcatggcaattaaggaccggttcgcgagctactgttgtgaaacatttaccgtaccaaccacaagccagcatgtgcaacggctttatcttttgtatagcatgatttattatggtgtgccagactgtgaagcggcgagaagtccgtgggggtcgctggggagtccattgcctctggttttgagaggaagattatgatacaggaacggtgcactgtggtaagttgtgttgtgcagagggtattgtcacagcctctattcgggtactttccagtatcgcgacgcatggtagacatgatgttgaggttgtgtcttgtgggtatagtggtacacctctggccagagtaaaattattcgaatagccgtgcccgcggttatgggcgagttgagcaatgtttttcgtgattagtctcacactactcattaatgttaataatgtgataattaatttgactcctggtttggaatggataattcctggtttggaggttagatctgtacgaccggggttgattgttcaggtttggttgggcctgagcagcatgggtgtgttgtttagtgttgattaaaattgatgattaattactctactgttttacttctcttaaatgtttgctaaatgctgctttcgcaaatgaaccatatattatgccatcctttggtatccttgtgcacttgcatatttgctgtgtggcttgttgagtatgtcatatgctcattcttgcaataatcatcaaacctcggttgaagaaaaaggatccggaaggagatgacgtttggcttataccccagttgagctgcctgtgggagtggagctgaagccatcgctagaccgttattccgttgctgttttcttttcttttgtaagtatgtaacgttattattatgatggatttgtatattaaattgtcagtttgtgtacctcggctgattcctggacgaggattttatgcacaaataagttcggaaattattagtgaatttcagggcgtgacagcggcccccttcctcccaccgctgccatcgccgcacgcgtggccactgccctcccctcgcccccctcagggcagatctaggaggaagtgtcacgcccagaaatttagcccaaatttccagactattttgtgtattaaatccctgtccaggaccagccagggtacacaaaacgacaagtaatatacagttccaaacgtaaataaagcgtaaaatacttacagaagaggcacttagtcctcacaccgaaacaaaagcagcagcagcggaaaaggcgatcctagcggggcttcagctccactccacaggcaaaactcaactggagtctgagccttggtcttctaacttcgtcttcagctcagaagcactacacttctgaaaagagggaataatagcaaggctgagtacaaccaccgtactcagcaagccacaccaatgatgcagacgtgcaaagggatacaaggacggtttgtggctatttgcataaaggcggttgtaaaacattttatttagcaaacagtaaaactgttgaataattaaggtaaattagatctccactgatcaatgctacaccacgttgaacaggcccaaccaacccacctgtactacagtgcattgggtcgatttattaagtgtgagactaatcacgatgaatctggtcgatcgcccataaccgcaggcacggctattcgaatagttttactctggccagaggtgcacaactgtatccacaagacacaacccaccgacatgtcaccgcgtcatcatgtgcccatgacgcacacgtcaccatgtcgagtgattgtgacgagacccttcgcataaccctcccctaaccatccacaccacgctaaggtttcacccccacccctcaaaaggcagtgggcggtcccctcttgcgccgcggtgaatccggcagctggacaaccagacaccccggccgacccaactccatcacgcccaccctcgccaccggtgcctaggaaagggtcgagctatacttcagatcaagcagttacccactcccgcttgtggtaagcactgtaagtcttctaggatttcccgtgaaccggtccttaattgccatgggtgcgactcacaaaaccatgcacccacagcccaccattcagtcgcattttagttggataattacgaccatgaaacatggccagatgtctcgagcacgcagctcaacaagatactagaatgtctaatactgcaattatcccatcgactgagctaatggtaattaagcatggctaagcataacgttctagctaggtcacataagtaacacaagctagtcgatttatcacccaaggttgacaaaggacagatatcaagtgaacatggcacaagcgagcagaaaggtaaaccctgatcccatgtaattagcaaaacatgcatatttatttgcaaacggtaaaacatttataaattaggatcaacatgctcaagggggaatgtgtgacttgccttgcttcttcactttgatcttctgcactcttttcctcgcgaccgcgatcttccgaaacaacggattctacacgttggcacgcaaaacgaggaaaaacactaataaacaccaaggaaaaagtacataaaaagtaaacaaacatgtagaactcaattttagatgaattttgcaagttgaacggcccaatttggagttcgaatgaattagatatgaattttagaagttttgagccattttaatggatttctacaattattaatgatttattgcgcaattatcaattattttctcaaaggaaaaggcattcgctgacgtcagcaaggggcgccggcgccgacaggcgagccccacacgtcagcgggtcaaggagctcggtgcaccgtggaccgggaccacaaggacggtccaccgccggtccacgggatggacggcctagatcggctcaagccgatcgggcggctgaggagagtggtggctgggcacgggcacagccagggctggcccgaccgaccacagagggcggcggcgcgcagacggccggacaaccggcggcggcggcggtgcaacgcggcgctgggacgggaggcggccggcgaagaggaaaaggaggagggaggcggctcaccgagaggcgcggcgacggagggagcggccgcggagggaggcggcggcgctccttgggtcgacgacgcggagggactcacggcggtggatggcgagggcgaggaggcagacgaggtgcagcacacgacgacgaagccgacaaaggtgacggcaagcggcgaccgcggctatggcggtgatgattgccggccggagacggtgaatggatgtggtggctcgggtgtgtggtgggaaggtggtttcggtggtggcgagggagagaaaaacggtggccgagcttgggcttgtggcgacgaagccggcggtggcggcggagcagtgctgcggcggttctagcgacgggaggcggcggccggcgctcacaaaggcaatggcggcttgggttggcagtggaggtggcagcccggtggtggattgggggagtgtagcggtggacggcgtgcggcgtggagtggtgatgccgacggcatgggttgcgcggcacggcgatggcgctagcagcgacgaggtgcggctggaggcgacgaatgggtcggcggcctcgggtgcacggtgaagaggtggttccgggggtggaggagggaagggaaacggatgccggggtgaagcgtgggacggcgatgccgatggtggcgacggcgctgcgcggagatggcgagagcggcggctagaggcgaccggagctcgccggagagcggcggcgcgcgggagcggcgtggggagagtgggagaaggcgagggaagcgccggcgaggaggggaaacgagagaagggagcccggggatggattttataagctcggggagggaaaaccgttgccgggcgtggcggatttggggcggcaatgaccggcgacgtgggtgacacgtgggcgaagtggagctcgatcccggcacaatttttgggggaaacgtggggagagtgtagaggaggtggatgggaaccgatttcatgcggtttgggcgcgagggcgcgagcggaagaggccggaatcgtgggcgacgtgggcggcaatggcggcgcagcggtttggatgagggaggctggaggtagaggaagggtctgacaagcgggtcccacggccccacttgtcggcctgaggggagggaggaggcgcgcaaggacgcaaagcagacttggggaggggaggcacgctgggccggcggcccgaggagagaaggaaggagggggcggccagcctgagagagggaggaggcgcgcccaggccgcgaggaggcaaaggagacttgggccgaaaccggcccaagggaaagaaggggaatttaaattgttttctttttattttaattgataaaatgaactttgtattattgtaattatttcttgatctccgaaaattcacgggaaattttagagagtattttagggcacaaagaatattgcaaaatattcccggccaatgatttttaagggaaaattttaattctcccaataattcacttgattaaattgctttaacttttatttaatttctagaaaatgcattattaattgatttttaatcccaaacgaaaatcggggcgttacaggaagcgagggaggggagcgtcgccggccaccaccct

SEQ ID NO: 27582 - DNA, 3831 bp, Oryza sativa
tggaattattgtttatttttttacttactttattatccaaagtactttaagcacaacttttcattttttatatttgcacaaattttttgaataagacgagtggtcaaacagtgcaagcaaaaactcaaaatcccttatattatgggacggatggagtaataagcatatgtggatgtgtatatgttttgaattcctgtgttttaccttttttatagtgtgggtttgtgaagggaagtgtagaggtggccatccaaggtagcctcctgcttgtttgttagccgatggtgggacattggtcggtggctgtacgtcaaaagggtttggagggtggggctagctgctgctatatccacagagacactttggcatgcgagggttgggagattctgagcgaaagcctagtcctttcagggccgacagtgggatgctcttgagcatcgtaaccccgttggggggcactgtcatggtgtctcttctctccatagtggaatcctcaggtgaaaaccacatccttgtttcctagggcaagcaatggcaacgccatcgacatcgtatattcttcctaaagacgtcgcttggtggtacatttccgacctaacttttgtccagactttgtcctcttgtggcatcctaatcgtctcaagttgatcacgttggagcgcctagtgggagagagcggatccattcttctctcttaccctcttccccttcaaccctaagatgtggatggagagaagtgtgttgggtatcgtgccttttgctcccagtaattggtgtgtcatagacgcttagtttgattagccatttttgtttttcctaattagcctcccaggataactttttatattttctcctactatattaatatgaaacctctattgtctcgtacagttcgtttaaaaaaaagaaaatataacctttcttcataatatacataacattacatctgcatgtgtatgtgtgcagcttttttaaaaaaataacaaagagaggtacaccatgccaaggatagaagtggtggatgttatccacagaatatctggtgtctttttcaggtgaatgccttcccacttcctatatcaaaatcccccatcatttgcagcatttgcactccctctccctctctctctctcttcccactaaactctttcaacctggagactgggacaaggtggaggagatcaaggtggcaacccctgcaggtgctgagtgcaggaggtgcatcctccctcccattgtgtgctcctcctgctatgcacctccagcacccagcagctgcagcagccatggctgctcctgctcccccagcaacagctcacctccagcagcagaagcctgcaatggcagcaggcagcaggctcatgggacagcagcagctcctcctcatccagaagagaagaagcctgtgaagagcaacctcaagaaggcaccaccagctgcagttgcagctcaggaagagaagaacagggtgtcgttggtggtgagcaggaaggtgacctggccggatgctcagggcaaggatcttgcccatgtcctggagttccatcccaggtaggcatattgaaagaaaaagcccaagaaaaatgtaatttagtggtaattaaattggattgtttcaaggttcagacaatggtctgacatgaatggctggctgctattttctgaaatatgattctttttaggctcattatggcatataaattcaaagttcatgattgatgctaagttatatactggaactgtttttcttgatagatttgtcttttggattgcatggatcgactaatggtttaactatttaatttttcattgaaagcatattggaggatgggaatctgaaaggagcaacaagatcctgcatttgtgtgattatgtgagctagattgaggtaaaataaatttatatatggagttcgcgcgtatatcccacaaatttgtcagaccgtgtgtggatttaaacaaaactgttacataattatgttttcaatcaaactggagtaaaatggcactacatatattgacctcttaaaattgttttagatctaaagatactggtcacttttgctacaacgctagctagccaactcgcaccaatttttggtcaactaatatagaaagctggcttgttctcttattcgcaactgttatatgacattgatgtaatatcaactgtatgtccagagtatacggaagttgagaactagtaatcgacttccagttttcgaaacatataaatattcaaaacaattaagagcaaagctcctgcttttactataaaaaagttcaaaacaatggtgttcaattatgttctgttcttattctttggtgaatttgtagatcttctgcccttaattagtttcggggaaaaaaattgtgctcttcgattatgtagacaattaatgtcaaaagagtgttcttttcaacacacatagcggtagaaatgaatccgctcagattttgtttgaaattcaagatttacttaaactaaatcagttcgtctaaacttctagtacaaaaacctagtactgtgaacacgtgggctgaaattaatgtactagacgtaggagtacctcagattaatggcccagtgatgatccatcaacatctctctaaggcacagacacagctgctgctagctggtctttgcaaaaccgacaacgagctctcttgtcggagggtcccacgcgccagacagctagatccccttgcccctctcaaacttcaccttcatgtcatccttccatcatcgagaaaaatcaatgatggaatgcctgtaatttcttatgggattgaaagttataaaaatatattgttttatcattgtttttaaaataaatatgaatattagttaggtatgtatgttgcaaaaaaataatcgctttcactttatcatgggctgagaccattgtttattttaaccattcttatctactccaaaaacattcatcaggaaagcttagggcctgttcatttgttatgctattttcaaccttaccaaatttcggtatagttgccaaaaaaatggctacatttactttgctgccaaattttggtaactatataagaaatcctaccaaaattttggcaagtcaatgcaaaaatttggtaaggtattttttggcatcaaagtgaacaggcccttagactatctctatagttaaaaatataagttctaggctactactttctaatttctctgtatcgctagtctaaggccatgtttgattcagattaggattattataatctggattattaagagtaagctgaaacaaccaggtagattattatgatagattattataatctaataatctcctttggaggagattttttcagattattgagtggctaaagactcactacccttagatgcctccaataatctagagaaacaaacaactcacagcttattctatatcagcttattataattcagcttagagtaatctgatttaataatctagattataataatcttaaactgaaacaaacagggcctaaggctctttttatttagcttaaaattattagaatctacagatagcttattataatgtataagctaggttattataatatggcaatccactctaaaggtgctttttttaaattattgggtagctaacagctaacaaacagctaataatccagataatcaaatagctaacagcttattctatgtcggcttattataatccagcttatagtaatatggctcaataatctagattacaataatcttagggcccattggaatttgatttggaggaaaaacatggggattttagaggatttcaatcctataggaaatgtttctatgaagcccctt

SEQ ID NO: 27583 - DNA, 15334 bp, Oryza sativa
tcctccaaatcaaaggggccctcaacttcttggtaactttcctttgagtctatctatctcatccaattcttaggtttttcctacgattcaatcaaacggttattcatgtgtttttcatgcgttttgcaatcaactattttacacttacattcctatcaaaattctacgtttttcatgttttctcaatcctacgattcaaaggtacccttaaactgaaacaatcaggacctaaatctactctctatctctcagctctcatagcaagaggtaagtgtatttgaatttttcacaaaaaaaaaggggcaggagtggtagtggcaaccgccaccagtaccaagtatataaatattattgttgaatttatacggagcatttttttaaagaaatttctccactatttttccattagaatatagcgattatttctaacaaataataccttgactttattaatttgaccggataaagtctaaggtaatagttagaggcaaaaatttgcttttctgtccacatgattaaccatgttgaaatttcagtattcagatgatttgtttgcattgcatcaggtatgtgagcatgagtcaaagcacatctcgcaaggcaaaaggagaaggtactgtttgtctgaatgcatgagctgatctggttctgcatgagaagagccaaaaaagccaaagctttccttgagcaccgtcatcagtgcctgctcttccaattaactgtatgcgtgtgtctcctccgtggtttacatcctggcatgtccaaacaaattacttcagtgctttccgtcctggccaccaaagcaaatgtcaagacttggacaatctagagagagaataacatttcgccgtctgcaactatctttatttattttaagagataattataccttggcttgggcgtatatttttatctacttgcttcgttccaaaatataaaggattttgcttggatataacacattctatgtccagatccgtagtactagaatgtgtcccatccaaaaaaaaatatgttatattttgggatggagcatgtcagaatttggatggagagaagatcttctgtagtattacatatgcagtactgctcactaatatgtgggtcccatagaccctcgggtctacatgtccagtgcgcaatactgcacatacattgatatagaggatctcaatctatctatctatctatctatctatctatctattatctatctattatatactaaaagtccattaatcttcctacaaacactctcaaaccgccacatggacatcctataaacgctcctagatcgccacgtggcaggaaaaatccaaaccttctattttcatttaagtctgtggacccattattttagaccgttagattagatcttttaaaattccaccactcctaatcttcttccgtgtacgtaatagggtgtagaaaaagaacctccctactaatctactgcacgtgcacgtatgacacaattatttgtgtgcgaatttttcgttttgaacaactcttatgcacaagaagttttgtagaagttggtctcggcaagatgaacaaacctgccttatgaatatcttatacatataacaacttagcacgacgcataatctgtgcattaatttgtacacctatcgaaaagtatccatccataatcacagtacagaattgtagtgttgtgcccattgtcaatgtcattagcagattgaagtagtgtctgtgcgatgacaagaaaaatacgtacaaaatgtttgctagataaaagccaaaaaaattgcatacatacctaggacacaccattctccaaaaaaaacatatataatacctacctatgcaagatcaggaaaaaaataatgatcccctctcgatgctcagattaaaagttgttatgtttgtatgcttatgatctgtccgcctaagcttacatacttagtacaagctattcgctgaaaaaaaaacatatatggatgctacctaggaatgtactattgcacggggaaaaataaagaaaaataaacaaaagttcggatctataataaaaaagatatatcaaaacccactaactcctatgttagtgagagattgttactcgagcaaatatttttccacatggtactcggtagtgtcagccgacttcacatgttagggagacattcacatttaattctaatcgtattaccctattaattggtactgatggttatctataatacatttggacataagacatggagaactatatatgtctgaagtattcgtgatttttttattgtattactaatgtgttaggctctttttatggtactaaaacaattccatttattaaaagggacccaacttttaagacaataataatctgtagtggtgataggtgtgataggtgagtttacatgtaagcaggactaagtgattattgtttgaaatttgagagacattattatcatttagtgtatcaaagtctatcatctatttcactttcacggtataagtatttttttcttcttttttagttctcattatatgataatttaccatctcctacagtgaatatctaagatgaatatggtgagataatacttcttttttagtgttctttttatcatcaaaacataaaatacccgcgcatcagcgcgggcttccttccttgttgatttgaacaaggggtagagagacattttcacttaagaccaggtaaatttgcataaggtttcatcatgtacccttctacatcctcccaaaatctctcccttctgccttgagctcgctacgccggtgaacaggctgccacggttgccggcagaggtgaagggcggtgtgcaccaccacactacgctagacaaatagcaacagtcgcgagtccatctcctcttctttagcttccttctcctcaaggctcaagctagcttgtgctggtgagcaggccccttgctcgtaggctaagattaagcatgcgagtcggtcgagttcaggtgtaggtggacatggagctcgcctttttatttctagcctgacctctcactcaagatctggctggaccggaggtcgagccaagcgcctacagaggagaggcgaactggacgaaccttggcaacgaacaaatgtgatttggagcttggaaagagtacacccaagatctctcatcttatcaccgaacacgaattacaaaatcatctctcaacccaaaaggccaaaaccagatacaaaacacatcctctaacttccaaacacaagtacaaacaaggtctctcagcggtattatccatgtttttggctggcatagcgtatacgtggctcctttgagtggattttcatcacacgtaacattgacaaggtgcttacatggcattttgatcaggaaagaaataataaaataataaaaaatggtggggtccattggtcagatccccttcttccttttctctcatcttcctcaatttcttgcgcaagcagggagaaagggcagaggagtaggtgacctcgacggcagcggcgctggggattggagtggtagccggcggcaggtggctcaaaggagcaccaacgacaacggcggtggggagagtttgaggggagagagtgtgtggaggaagctcctcgtgggtctccagcgtcgctgccgttgatgaatccatccatccattgctttctggtcgcgcaactctccagctcgttggctcaccccataggccacagcatcgctactattggaaacgataggctactgggaccggcacgactctagatcgggggcgggaggagcaacctaggttgtgtggcgatagcacggcattgggaaagagcagctgtcagcaaagaggaggtgggcatcgatggcggcgtcaccgagcccatgaatcgggagctcaatgacgaccttgagctcgaggccgcattcgaccacggtgagctcgcgggggtaggagtggccgggagaccgccatgctccttccctgccgaccgccggccgcgcccgcgacgccgtccctcctccccattggccgtcatcaagaagatggggacggtcggtcgagctcgatgacgccgtcatcggcgacacccaactcctccagggccagccgtgctcctcgaaggggaggataggagaagagaggaagagaggtggtgagggagaggaagtagtcattgacatgtggggctaacatggatcccacgctaactcagctgccacgtcggacaaaaccgtctaagtacctagagtgacctggttttgtaaattgagggatgccatatatttgattttttggttgaaggacgattttgtaattcggtaacaagatgaacctccgatgtactttttccttggagctttagaccagatctggagcaacacgtgaagatggtaggccacgggctgatctcctgttcaccaaggctgtagtctgtagacgcatgaggatagcagcagtgggcaaatctccaaaagtcggcaccgtgaccaaggttgctcgccgacgtgatgagcttgactgctcgaggagggtgaagggagtgaaagaggggagatgtttgagaagaatggcacaaagaagtggcacacgtaaatgttgaaatgatatgatctatatgggaatatgggatttggcaagagataaaaaaaatagctgaaagaaaccaaacatggtgtaatagtcatttgtgctctaatacagcacaaatgaattgagtttgattttgagagatcttataacttgtacctattctactaatgatgggagtttcatccatcgaccctcccgtcgcatcacacacagataataacccactccaaaaactgatccaaaaatatcaccacacaacaccaagaacaatgccaatcagatcagctaacacaacccactcctgcataaaaactggcactccacatcctcacctaacttgttgggtggcaatagaagaaaaacaactatatttttacgtatgttcatatgtttctactctcttccatcataaatactactcttttgtgttgtatgttcgtggtccgcatgaccgtgaggtgctaaccttatctttttattttgctacaagtttaggtacactaaaatttaggaaaaagtccaaatatcccccctcctaaactttagatgaaagtccgtctagcaccctgaactttaaaaccgaacatccaacccaactgaactttgccatactatccatattaccccctaaggtggttttagatgacggttttgtatattttggaagtttaaacgaacaattttgaataactaatatatcatatttacatttgatcagttataaatcatcattttattcttatacagtaatatcatgctattattatgttggtacttgtttggaagcgggaggtaataaggagaaaaaacatttaagtcaaaattttaatatatatgttcaaagtgtatgacatgtaattaaactcatccaacttatatacaaattagataaaaaccattatgcaaaatcatccttgggggttatataaacggtattgtaaagtttaggaggcaaatgtccggtttcaaagttcagggtgctagatggactacttccatccaaaggttaggggttatttggattttttccctaaaatttttaatataatgctcatttagaagatgtgttaattacccaataaaatgagatgcttaatctgtctgtcaaagaaaaaggatatcactatattatttttaatggtggaaagttgaggttaagaatgcaattttaatagtcaaataaaaattgaagcggaagaggttttctagacattgacatgggaaactattttgatcccaatgtttcctcatttgtttaaaattactggaatagttataaaaaatctttttaaaaaaatttaacggcactcacacaacatatatataccattcaaaaaaaaactctaagtccaaactccactcacacgacatatgaaaaaacaaattcaacgtatgaatagtaacggtactattcacacctaaattttttctcaatgtataggtcaaatttaaacttaaattttagtggactaatatatgtcaatatactttatattggcattttttttgaaaattttcacaattatttgcattggaattaggggaaaagatacacgacataatatcccctcaagcaattagaatccattccccattgacatccaagtttctttttatgggaattactatcaggctttgcccaacggtatagcttttataaaaaaaatatttatctcatacaaagaggacatagaaaaatatgaagaaaattacaaagtttgtaatcaatcaaacactaggtgtttaaggaggtccttcattctacacatatgcaagagaagttctctcctgaactgaatcctccatccttaaaaaaatatcaaatcatttatctgttaccaaaaatgccaataagctataaagaaaatcccaaggaaacccttcattacaaagcacattcttgccaaaactatcatctcgaagaagttgacattggtgctccaactgatacccaagtgctgccaacattccaaacaaaatggacaaacaaagaaaagacgcagtcttgtttatctcctcctttcagagcaaagaacacaagtaagatcatcatcttttttttcacaatgcctacggtctaacatatcttttgtgttcagtcggtccatcgataaaagccaagcaaacatttttattttcattgacatccaaggtgatgtcgaggttgagaataataagataacaataactatgaaaaaaatgatagcaacaattaaattaatatttggttttgacaactgtgggaaatgaactaaaagcagaaaggggaattaagtgcatggtaaccggatgggagacttggctaagctttcttttgtcatcagaagccaagattcccgcactcctagggttcttctttctctatttgagagggggaagcgtgtggatcttactatttcagtttcttgctagtaaagcatatactaaacgatccaatacgaaaagtcgaccatgtcatcatgcattgcaagcttgcacgatacaacgtgttccatttaagcaaaggaacgaatacagcaacgaactagtaaaagatacgtcgtcataaagaatggacacacacacacagaagcgatcgagtaaactccaatgcaccgatgcacatcataatttagaggtccaatgcacatctgtaagagaagctaggtcaagccaacaaagaattgcattcgaaagtgacggtaccgaagatgatatttaaggagcaaagttttgcatctagactagactgctggataatatacattgatatatagcgtagaccaactaaagaaaaataaatttgagtttggcattactatttacaaggatagctttggctgtttgccaaattaatttatacagcaagagcaatgctgctttagatcaatcacggatatgatggctcctgtgggtgtatctcaaacgctgccgtctgggcacaaatgatgggtcatcaaggctcctgttgatacctgaacgatggctactaccattcggctgatcaaatagctggggacgaaagccatgatagtcgctgttgttcctgtagggtcgattcaacaagcctcgacgcgctaggctctgtctactcggccgtcggatacggtgccaatctgaccgtgagctgctcctattggtgaacgaaaaccggggcaacactctgttattctgaggctgaaaccttggcagtccatgcctttcatctgcccagattattgatgattctggagcttcattcggcagagcctaggggagttatacctgttatcaggtgattctattgagtcgcgccaccactcatcgttgctttcatctccagtgttttcatcaggagacatcgcatctctagtctcaataacatagtcaccaactattattgccccaggattctgtgacctaattgcacttatgacatcaccaacctcctgttcacgctcaaggcgatcccaagtccttttcctcgaaagatccacatgtgcaggctttgcaagcaaatgggcggttctagcgtgttcacgcagctgctcgtaggttccaacaaatttgcaggaatcatgagaacatgttctcaacttctcgttaagatacttcctcacttctccagcaggaatccagccagatacagaacctctacagagagggcacttcaagtcagctgaactttgcatggcatcatgacattcttccattaaaatgctatcttctacgggtaatgttgaatttgcaggttcttggttattagcattattgacatgtcttcctagtcttgggctttgtaaatgtctgggaatcatactatagtgagagcttcgttcaacagttctgttattggagtttgaaatcaccgaagtggttgagtgtgaagcacggaccttactatctccattcatttttctgaatcgatctaggcaattagagtgtcgatgacttgtgttacaaatgtaacatctacagccattcttgtaggaactgcatacaagtaaaacagcattgtggggttgctccatacaaatagggcaagaaatcctgtcccattccatatgcagagcagtgcatgatgtgactgtagatctgttacttttcctacttgtcatcttgaaatcaactgtgttgaattcacttgatcgttagaatttttgaaaaggaaaaactattcagtgtctcaaacttagcatttacgcaattagtgaaaaacattaccttgctaaacatatccttatatactcattaaaaaccatcaattttataacaacaaacatgaatgatccaaattagaagtgccaaaacaaaataccaaggcaaattagtcaggtctaacacaattattaagaactgtataaaaatgaatttcagatcatttagcaggcatcagattttagttttccaaataaatattagtcctaaagaaagtattgtggtgactagtgaggacgatctcatgcataaaataattagaaaaaaaaacgaaacaagtgaatgagaaagtgcagctaaacaacaactattcttgaatcattatatccatggttcctaaacaaagattgcactaaaaaagaacaaactgcagaactcccccctaaaaacattattttcggtcttctatggtgtatagaaatcaagaaagtttgtttaaatgcagaagaggtgttggcaacatgtacacaaacaaacaaaacaacagatgaaaaacgaacaaatgggacatcattaagcatatacaaataagtacatttaacttatctttggacagaatgctagtactaacctacagggagcagttgtatgcactgaacacttcaaaagaacaaaggatggttatggtattcacgataggaatcctgaaaaaaaatgtttacagttagtaaaagagaaactaggtaagcagaatctacgtaaacagaatccagtgacgagaataaagaatccaaaacaactctgtacagacacaacaataggtatcagcacattgtggttcatctggaccaaacataaattcaccatactttctatcagtttggacaggagttgcagaaaccattataatcaaacatattcagctgcaaacggctaattttgtagccattctccaatttatctcattatgctagacacaggagttaccgtaagaaaatattagatctccttcaatacattatgtacgtgtatgcatccatctatttcaaacgttcctaaccaaatctacacgtacgaactagaattaggtaaagtttcctgtaggaaaaatgaacaaaggtccttgagccacaacatttagtgagcacgcatgtacagcgtgcgtgagtttattatagcattcatgattgcataaagattcagcactacataagttttcatcacatgtattacggtgaatatctcctaaattaccatagaaatggactattttcaaccacaggcttctatataaacactaaaaagcgtaaaatcgcgcagtgatccatgcacagttggcatcaagcaaacttggccctaacggattcatatgtatcctggatcgatcatcgtcagacctccgtacaaatcaatacacgaacgaacgacaaggacagcaacccacgaaaggggagaattcctgacgctcctcgttcatcgatgccttgaaacgatagaaattaatccccccgcaacccactcttgttacaatctccgaacagatcagaaccaaatcgctgcccccccccaacccaaattcacccaacgagacctaccccaacgagacctacccaaatcagcgaccgatcaccgcaaaccgaacccttccccccacacaacccaccgatcgatcgggacggatcgaccgaccgatcggtcgatccgcaggcgcagatcaagaagcaggacaccgacggcgggggagggagagagagagagagagagagagagagagtggaaagaggggggaaattttacgggggggtttgacgcgactccagatcggaggacccccgtcgccgtccctccgccgctgcctgcctcttcttctctttttcttccccctttttttttttcctccagttttcttttcttctcgaggaagaggtgggtggggggtggcgtcgcttgctgcgtttgcgttgcgcttgcgtttgtgtggtccgcgcgtgagagcataggtcgcggttttatagacgggggcgaggggaagggaggaggatttgctttcttggtttcgtttcggattttctttctttttttttttccccttcggtcggttataggaaccgacgatatgttcatgcgccgggttaatcgggttaggtgtaccgcctctctctctctctcgtttgcgttctgttctgtcacgcacttgtagtgggtccgatggccctaggcagtcagcctaggggtggcccacgcctcacatccgacggcctttggtttgatttgattattttttttttcgagggactgtgtaagcaggcgtaaagtgtaaaaaaacgtgattaaggttatcctttatccgtctcaatacaagtgcacatacttcatagtacagaatgtgacatattctaatactataaatctaagtagatagatgttaaattatgaaaggagtcaacactgttttcgtaaaaaaaaaaggagcctagcaaaaacccgtaagggttaaattaagaggtttgaattgaattcaatttattctcattttggaacatgtcgtaactcaaattttaaatgcgctatttcacgaaaaaaatgatggagaatgatgcaaaaggcctcccattcaaccctacgctatgatgggtgtcataactatcaaacaacagctcagcggggagattgtggcgcctaacgcaaagcgctagaaggaggagaaatggattcctgtgataaagttgtggctgtggcgcacagaatctagaagatcaaggagatctaccttcattccattcccatcaaggagcatcagatcgtggagcaacttgtgtcggggcccaagaaagaggtgataaagatcacttctatgcagaagcagacccgtgcctggtagtgcatcaagttcaagatgtttgttgtcgtcggcgatggggacagccacattgagctcggtgtcaagtgcgccaaggcaacaacgatgtctggcgcaatcattcttgccatgtttcgttgtgccggtcagaaggggctactagggaaacaatatcaagaaagccccacaccgtgtcgtgcaaggttgccgacaagtacggctctgttactgtccgcatgatgttgccacccatgggctccagcgtcgtggcgacgcgtgtgcccaagaaggtgcttaagttcgccggcatcgaggacgtcttcacctcgtcacgtggctccaccaagaccctcagcaacttcgtcaaggtatcttcaattcatctatgctctgtgaaatgttagcttcaattcgtcttcacctattgtgcggttccacctaaccacaccactgcaccatcgtgctcgtcatgaggccgccgccaacagtgcttgccttgggagagagatggagaagagaggagagataagagtcgctaacatataggtcctacctactgacttagcgagttaaccgtggtcaatatgtcacgttagcagaaatcatttatcaaaccacaaaagaaatctatttgcaccggttttgctctttgagagatgtgactgaatcatgagcaagcattgggagaggcaatatagacttttcctgtccgtggcgtcgtaagtttatatgtgctgtgctttaatgggctgagctcaaacaacgaacaaattgggttaggattttgttcaaagtgggcttatatgggcctgaccggattggattacgtcactataaagcctgttgagagcgtcggtttttttagtgctagttcagattgtaactaaaataaatcttaccaaattttagtaggatttcttacgtatttactaaatttaacaacatattaagcgtagatattttttataactttaccaaaatataatatggttgaaaatagcatcaaatgaaacgggcccttaatttccaatacaagccgccgccgctgcctccgttcctgcgacagtctcgccctccgagacgcggtgcggcatcgccgacgcggagcaaacgggatggtagtgggtcaggggagggatcgtcgttcgccgggcttcccctcgacgcgctgttcgagatcctcctgctctgtggtttggttgcccgccagcagcccgagggagatctccatctcccgccccagcggctcagcgccgtctgccgcggccgtggtcatcaacgcgcacgcgtcctggtcgagcccgtcgttcctcgctccatcgtacgtcagccaggtttaaggcgcatcaccagttcaccaccgacaccacgctgaacccggccattggtgtcgacaaagagcatctagattctatctatgtgtgggattaattagtaaaacagcatggatcagcacgagacatgatttccgttgattgctccggctggccagctgactaccagaacgtacgataagttttagatcaatcagcatatactcatccggccggagactaggtcatatttagattatagccaaaataaaccttgtcaagttttgacaatgctaaaattttagcaagaaagcaatattgtcaaaattttggcaggatttcttatgtattgattatgtattaatcaaatttggcaacaaactaaacgtagatatttttggcaattttacccaaaaaatagtatggttgaaaattgtatcaaaatgaaccggccctataaatgccattgtcacgtctaaagtaaaataaaattttggtgaagtgtatctcgtgatcacgtatacttcctttgaagtagtacacgtatatgaactttttgggtttacggactcgagcactcaattgacttccgatttcatgcatacaaatcccattggcacatattgcattctcagcggtcttatgtgtgaccttctgatttactttttgagtaaatataaaaaaactgcaattatctatattaatataaaaagaaggagttgccccttgcaatcctactggtgaaatcatcctatctcatctcatccgtccatccaccatctcatctaatctatccgtccattcaccatctgatataatctaatctattctcaatcgctgtgccaataccaccgattccacctccgaaacgagatgattccgccccgagtgcgcgatgagtccgccgcaccaatctccgccccctcctccactcctcgcatcctccctcctctcatctcatccacgcgaatccccgccgcctcactcgctccacccgattccccgctactgccagaccagccgccccctcctccctcctcctcagccgcgcgaggaatccccgccgcctcgctcgctcctgattccccaatgccgctgcagtccactgccggaccagccaccccctcctcgctcctcctccctcctcctctcagccgtgtgaatgcccgtcgcagtccatcgttggaccagcgccgccgctaccgcgcctccaccgccggaccacctcaatcgctgcacgcctcctcgcgagtccccgccgcacgccaccgcatcgtgtgcccctgcaggcgccgtggtggttctccttccctaacccgtcgaagttcaccggagaagcccggccccttctctcaaactcgctcaccagagacagagaagatgaataaacgcgtggagaggaggaagagggtgagtcgcatgctgcctgctccgattcccctccatgtgcgcgagttctggcatcacggcatgaactacctcttcggccccagggatctcatgcctgttgtgaatgtggttgtctgcatcggttgtgatccgttcacggactggcttcttggttctttctgaactccatttcttgactcgaatccacattctctgattttttttttggtcttgtatctatgtaggatagcaggagagagatggtgcagtccaccgctgccactgacggagccggccgtggctggagccaatgttgtccccagtcgccgccgaagctgaggtcgtccccttccgccgccgcactccaccattgcccccgccagagccgaggtctgccagagccgtgctcttccccatccgccgctgccggagccgatagcgtaatgttaatcatattttcgcatattgtgtgaaatattttgttgtataaattaatgtatggagtcaggagcaatatgctctagaaatacatggttatgatgctaccttcaacgtgctgctgctggcctgatcttcccttggtgatgaacaacaagatacatgggagaatggctctgcaagccaacattgttgacaaggacaggtaaatcagattcactatgttgcagcttcaatccaaaaatattatattgcacacacaattcacatatggtaaatcagattcccttgccgccgccgaactccaccgctgccacaggttttgccccggaggtgttcgactgaatgccactcaaccaatacggtttctatttattcctaaccattgcctcatatattttattgttcatgggtctatctatctccttacaatggagggatacatcgttgggctaggactaacagcttgcagcttgttcaccattcagctgtaagaaaatattgtacatggtttatccagttgacgatgatacatgttggttggttttcatactactttaaatgttgctctattaacctccagagaagatcaaggaggttgttcctacgaatacaaatcatgctcagacgctattaaatcagccactgattcacatattcac

SEQ ID NO: 27584 - DNA, 15084 bp, Oryza sativa
tgggccaaatttggcacattcctctctatcgcgaagtctagtttgcctcttcctgccggcctcccttcctccctctccctctggccgaaccaaatctcaccaagcccatgcgccggcctagcaagcaaagtggccaagttggcagcacaggccgcctctaaccgctgacgcatggggcccacaccaacactgacgaatccaggtcgcgttcgatggtgtgcccgttgacgtcctaggcatgcttggcacgcactaagactccaccgcatgcctggccttaccatcaccaaacctccgtgaccacgtccgcgtgaggatgcagttcgtcggcgtgttcgtcatcatgaccaatgtcgtgcccatcaatgaccaggactcgcgcatcaacaactatggcttcaccgaggaggacaacctctctcacctcgactgtcacgaccggaaataacccaacggacgttccttacgtgcgtgtattattccttgtcccaggaggcaaggtacaccaaaagttgatacaattcagagtttaacaagcggaagcgtaaatagttaattattacacgggcaacgagggcccagcacacacgaagacaacgaaaaacagcggaagacttgggcgacgaccacaggcgcttgacggcaggcacgagctagacaccaaagccttcgtcatccaggagctcctcttctgggtttgaaaaaaattgagcaagactgagtacaaccaccgtactcaacaagacacacccacaagtgcagagtaaatgcaaaggagtacaaaggagttataatacggggggttagggtttgcagtaaacagcatttaaaagccacttagttgctcaaggctaaatttaaacacgatcctagaactatttgatattattaaacaaggccgtgaacccacacgagcctgccttaacccaaggcctacgatgattcagaccgaaccggcaacccgaccctgggtcccagctcgtcccaagccaacccaggccaaccattccacattttagttgttaagccagttttaagaattaaaacactaacttgggtacattgctaggtttgcccataaccgagggcgcggctattcgaataggttttactctgatcagaggtgtacatctttacccacaagacacgtctttctcacgtgcaaccacgtgccacataccaccacggcatatggacggaagacatgacatagtttccaacccatcctagccatagacaagagtaccgacccaaccccacctacggccggaacctccgggacaggtaggcaggactgagcccctagcagcaggacaccagccctgtgccatgacatctcgactaccgggccgcagctcgtgtagccttcatctgtcctagagatgtccatcgacccccgacttcgtccatctccatccgtgtacttttgtttataaccagactgagtcacaaactaagccttacccactagacatgtgaaagtacggtagtgctttgcaacagaggcccgaagaccggtccttatgtggccgaggtgctactatcaaaaccatgcacccaagcccagcctaaaaccattttgatggttttgaatagagggggaggtgtgcatccaattccacaataatccaaccattccataatgtccaagcgatatgaatccccaaagtctagaattataaaatcacctaatgttgcctaaataataagagaagcatatacctaaattcagactagtggaaccatgagtagagtgcccactagttggggttttgtttattctagggtgaacaaggtaataataacaatagcaatagtaaggtcataacaaaggtaaataggcatggctaattaaaacagtgataacgcgggaatttaaataaagcggtaatgcattaatttaaatcaaaataatttcgcaaagtgggatccaatatgttcaaagatgatgtgacttgccttgctcgctttcccaaacgtcggcttcaacctccacgaagagtggatcttccgaagctgcagtgtctacacgaccaacggaaaagaaaagggcttttactgtaataaactccatataacaagcaagaacaaagcacaaaaatgggttcttgacttcttaaggaaaaattagagacttgaacggtccaattccgagttcaaatggccaagttatggccatttgaagtttatatgctctttaaatgaatatttacgaatttcttcatttaaattttaatttaaaaatggtttattgcgtcagccgagggggaggggcgcgcggaccgggtccacgggagtggggctcacgcggcagcctcacggtccatggtggaccgggtgtgcccgggctcacaccggccggcgccgtgggccccatgcgtcagccgcacccgagggcgtgggcggttgacggccgggccccacgcggcagctgctcggcgcgcccggaggcgtccacgtcagcgcggccggcgggaggcggcgcccgcgcccctatggtcgccggcggcggccataggcacggcggagcggcagccgggagagtggaagggaagggggaatggaggcggcggtccacggcacacccccgggtcgacggcgacgacggaagaggcggccggaggggaggaaggcggcggcgcggctcgggtggacggggacgacggtgttccggcggtcggcgaactcggcgaggtggtggacggggacggcggcggtgcggcgaagccggagaaggcgacgccggggtgggagacggtcccggcgagcgaggagggccggccggaggtcgtcggcgacggaggagagagagagggcgacggcgcgagctcgattccggcgaggaggaagggcggcgagaggcggaaacgaacgggagaagcgcggggagggtttaaatagggttggaagggggagagggcggccggggaaggaaggaaaccggccgggaggtccgaccgccatcaatgacgccggcgagatttgcgggagcaaatccgcccgtttgaatgagagagagagaggggaaaatggggggaaagggagaggggatcatggggagtaatcccccctattgattttacgcgggggcgacgggatgcggcagattcggtggcgggagcggcgggaggaaggggatgacgggtcggccctacccgtcagcgagggtggcgggcgggcccgcccgtcagcggcgcgcgcgcggggagaggccggatgggccgcgggggagaggagagagggggagggagatgggccggattcggcccaagagagggaagggggatttttagggcttttctttttataaaatcactttaactttgtttatttcttaataattattatttgtgctctgaaaattccactaaaatttatttacacattttaggcttttaggaaatatacaaaaatcctccaagccttaattgacttttaactttgcacattttaatttttttgaaggctctcacaaggattttaattattctaggtataatttagaggatgtattttaggattgttttgggacgcgacatcgacctcggcttcaagttttacgacctcactgataaggtgcatagggtcctcggccagactcaccgcttcgactatgtcaacaacctcagtgtcagcgccaacttgccagttatgggcgggactctctggtacaccatctctgacatcttctccactaactgtgccatcgacaggttcggtcgccacgccggcatctctatgcaaggtcaatggcagggccagttaaacggcttcaacttggtcgttgcgagcttatctgatcgttacccaaataacaatacagctaaatatcggaataagtttaatttgaagtttagggacaaaatatgtactgatcaccaacatgatacatgcatgacatctgatatttgagagcacacaaaatacatggatcggaacttcctggtcgctgtgctgctggtgctctacaccttggatcaacaagagaattggtgccgacgcctgggcgccggtagcatgccagccaacgaagatggcatggagatgaccaatgaacaaacaattgaaaaggttgctgattgccatggagtagaggacttgacggcctccaaggtggacaccaaaggtgttgctatagatggaaggcggaactcctacacgcatgcatggcaatgaaatgacacgatggacagaggaggagaaggggaaaaagaacaggtctatgagagcagccataggtgtagatcgccacctgtgggagattttgccgagcgagatcagtgatgcgccatgtgacgtgcgatacaattatgacgaatggataattatcttttaatcaaagaatggataaattgactacgtttgacaagtactgatatgcccttttgaatcaacggttcagatcaattctactagtagaataatactaccagttgagagcatcatagtgggactatgcttttttttgtttagtgattcttttgaccaatatgtttctaatttcatagttgttcaatgttcttacctgtactactctgttttcatgccttgccttatatgctatcttcctatctaagtgttaacatatataactattctcacagtcgttttgataagatttttagaacacatatgtagttgaatgagaccgaaaaatgttataaaatcaatagcttatttgattcaacaaaaaagtataagggtaaagtcattccaagacagcggctgaacatcatggtacaaatggactagcaaacctacctgccaatcttacaaaagaggcataccaagaacaataagtacccccacatactgttcaattacctacatatgatctcatctacttttgtcataataaagtatctatttagatagcagatattgtaatttatagaatggctaataatttatttttcttaggcttactcaatcccaacaaatttaatctttatattatttactcaaaagtcaaaattacatatttctatatgggattaagaattccttaaacaatacgtgatatatcttccaattgactatagagctacgagacgggcatcccatgggcaggacagcccattggcatcgcatggcccatctctactaaacgaacatccgtttttaggacaactactaaactatgctttctttgatctagtcattccgtcaacaactaattttcagacaccaccatgcacacggttcctcgattggacacttgtgggaatggatatgcagacttgcattgtgccatgcatgtacaatgtctgtgttgtctaggacaaaaggtgaccttatgtagatgcatgtacagtggctgtgttgcctgggacagaaggtgatcgaccttcatcatcgctactaagcaccatatcttgacattgagtcacccttcagcgatggtgatgctcggtgtcaagtgccctgtgcatggcctcgctacagctctactttgacacaggatcacatcagttgccattccagttatttcggaatgtttgtcctaagacatcctcatctggagataggaaaagtgggtttacaatgcctatcgccatgataataattggccatgctaagcctagtttgttggacatcttttgccgctctcctcagtgatgagcaacaatttgtcgcttggattttaatctaacaacatgccaaaaacatgaagactgtcctttgtgtatttgaacaactctcagggctaaaaataaacttaatttcataaaagcaatattttttgctttgggaataccaaggaagtggaggatcaatatagatcatttccttttagataacttggtatccccattcattatcgaaactccgaaacatcgattggaaaggcaatgacgatacatttgagagcaaactcaacacaaggaagggaaaaacatatcatatggtggaagactggtccttctaaacttagttctttcgagccttcccttgtttatgttaccattctttgaaattccatgagggggtacttcaaagattggattactataagtcacatttgttttggagcaatgatgataaaaaaagaaaatatagacaaactaagtgggaaaacatatgtcgaccaaaagaccggggggactaggtgaccaaaacatttttataaaaaacaaatgcttgttaagcaaatggcttttccaactggttaatggtgaaggcatatggcaataccttttatgaaataaatacttaatgggtaatcctctttctaaaatgttcaacgaagaaggaatttcccaattctgagctagtttaatggaagtgaaagatcattttctgaagtatcattcgtttagatgtggcaatggaactgaaataagattttgggaagacacatgattgggatcacgtgctcttaaagatcaataccctgctgtatataatgtggttcgatagaaacagtctactttggtagactgttatgagcacaacaccattgaatatttcttataggtgagccattgttggcaaaaactaatcgagtggaacgatttgattctcagacttactaatataaccctgtgaaataaaaatgattactttgtatgaccgcttcataaaagtggccaattttttgttagctctatgttaggatccgcaagaggattatatgggatttaaaggttccattaaaaatcaaggtttttgtggtttcttcgtaacaaagtaatccaaacaaaatataacctggctaaaagaaagtgtgtgtgtgtggggggggggggtagggacaaatattgtgcatctgttatgcaaaagagacaatccactattttttttagtattatattgctcgatttgtctggagatgtgtgttctttacttttgatatccctccaactcgtaatgcaacaatattggtttagaggagtatctaggtccatgaaaaagattatattaattgaaacttgtgctttatgttggtcaattaggtgttgccgtattgacaaagcttttaatgcatggtaaacaattctctaacccgatgcatgctatcttcatgtttttctattggctccatttttgacctacgatgcggccacaaaaagagcttgatactatgcacaatagtgctatacttgtgaaattgatagcgatgggtctattattttactatgggtgacatagtttcattagaattatggctgaatctatgtgatttaacactcttttttatttgttaaacaaaattatggttacttacactggtggagaaactatctttcgtcggtcggccgaattccacaatagtcccggttgcaataaaaaccaggactaaagaggttaaaaagggtaacgggcatatttgatctttagtcccggttggtaacaccaaatgctatcagggcttatcgggccccccgggatctttagtctcggtttgtgacaccaaccgggactaaagatcccggcgatctttagccccggttcataacaccaaccgggactaaagtcccaccgctatatatatgtcttcttcctcctccagcccgaccaagcttgaaaatttcttcaaaaaagaggggaggtcatgccaaaatttctagtgaatttattttggtgattatatacaaatcggaggtgcctaaaaggttagcaacttcatcctcattgtttttttgtcatattacatttggagctatgttttgcacacttttttgtctccaaaattttgttgtaagttgatgagagagaaaatttgtgtggggaagaaagaatatatagaaatttagtttatttgctaaagaaggttttataaaatagttgagaaggaaaatatagtgaaagttaatcttaaataatagaaaacaaactaaaatgaaaattaaaagaagtacaacacattaatattagtttaaaactttagaaatagtaaataagaattatttggtggaatattttataatttttgtatgaataatgatatgtcattattgtatgactgttgaaagagtttgtaattattttatcattattgtatgactgtcattattgtacgaataattatttgtgtacgattttatttcatttcatgtagatggatcggcaatggatgtacgctgaccggcggtccaaagtgtttattgacggcgtgcattattttttgagagtggccgaagctaacaggcattataagggttttatttattgtccatgcaataagtgtaagaatcagaaggagtattctgcatccaggactattcattttcacttatttgagtcggggttcatgccaaactataattgttggacatcccacgaagagcaaggggttgaaatggaagaagatgaagtggaagacgacaatattccggactttgctcagtacgctggatttgaaggaaatcaaacgggcgaggaggaaagggatgctgatggtaacgacgttgcggatgatcttggtcagatgttgcaggacgccaaggaggattgagaaagtgaaaagggggcccataaattggacaagatgttagaggaccacagaacatcgttgtacccaggttgcgagcaggggcacaaaaagttggataccactctagagttcttgcaatggaaggcaaaaaatggtgttagtgacaaggcatttggcgatttattgaaactcatcaagaacattcttccggaggggaacaaattgcccgagacaacgtacgaggctaagaagatagtctgccctctaggactggaagttcagaagattcacgcatgtccgaatgattgtatcctatatcgcggtgaggagtacgagaacctagaagaatgccctgtttgtaaagcactacgatacaagtttagacgagatgatccaggagaagttgacgggcaactaacgaagaagagaatttctactaaggtgatgtggtatttccctataataccacagctaaggcgtttgttcaggaacaaggggaatgctagaatgatgcgttggcatgctgaagagcgtcaataggacgggatgctgagacaccccgtgatggttcgcagtggcgaaacatcgacagaaaatttaaagactttggaaaggacgcacgaaacatacggtttggtttaagtacggatggcatgaatccttttggagagatgagcagcggccatagcacttggctcgttacgatgtgtatttacaacctccccccttggctatgcatgaataggaagtacataatgatgccgattattattcaaggccccaagcaacatggtaacggcatcgatttgtacctgagaccactggtcgaagatcttaaactgttgtggaagaaggaagctaggtgtccccgtgtgggacgaggacaaacatgaggagtttaacctacgagcgctgctgttcgtaaccatcaacgattggcctgcagttagcaacctatccgggcagtccaacaaggggtacaaggcttgcactcactatatggatgaaacagaaagtacgtatcttaagcactgtaggaaggttgtgtatatgggtcatcgtagattccttgcaacaaaccacccggtatggaagaaaggcaagcactttgaacatacggcggaccaccgtacgaagccaaaacatcgcagcggtaaaacaatgtttgctatggttaaagatcttaaagtagtgtttggaaaggggcctggcagccagcctatagagagcgaagatggtcacacggcgatgtgaaaaaaaaactccatattttgggagttaccctattgggaattcttggacgtccgccacgcaatcgacgtgatgcacctcactaagaacatttgcataaaccttcttggcttcctaggtgtatatggaaagttgaaagatacactggaagcacgtaatgatctgaagcatatggaacaacgcggagaccttcacccggaaccaaaggagaaatgaagccattacttgagtccagccagctacactcttagcaaggcagagaaggaaagtatgtttgaatgcttggagagcatcaaggtaccgtcaggatactccacgaatataaagtgaataataagcacgaaggagaagaagtttacaaacctaaagtctcatgactgtcacgtgttgatgacacagctgctgccagttataataaggggtatcctcccagacaatgtcgggcaacaataacaaagctatatgctttcatgaacgcaatttcgcagaaggtcatcgatctggatagattagaagtccttcagaatgatgtggtgcaatgtcttgtcagctttgagctgatatttccaccttcatttttcaatataatgacgcatctgctttgtcaccttgtcaaagagatcggtattctcggccctttgtacctacacaacatgtttcctttcgagaggtacatgggcgttctgaagaagtatgttcgtaacagtgctcgtccaaaggcaagcatcgccaaggggtttgaaacataggaggtcattgaattctgcatagaatttattgaagaccttcgcccaatcggggtaccagaatcacgacatgaagggtgactacggggaaaggggactctcggaaggaaagcaataatgacggtagacaacaatttattctgtaaatcccatttcacggttctgcaacaatcttcattggtggctccttacatcgaggagcacttggctctagttcgcgccaaaaacatcggtaagtccgatgcatggattacacggcatcacattgatactttctccgcatggctgcgacaacatctcatggttaacgagacgattaaccaacaactggccttcctggcgaggggaccatctggctcgatcacgacattccagggatatgaaatcaatgggtacacattctacacgagagcccaagacatgaagagcatgaaccagaacagtgttgttcgtattgatgccatgggacacgatggtacaactggcacgtattacggtgccatcgaggacatatgggaacttgactatggacctctcaaggtccctctgttccggtgccaatgggttaggttgactggtggaggcgtaacgattgatgacagtgggatgacaacggttgaccttaacaagattggatacttggacgaaccttttgtccttgccaatgatgtaacgcaagttttttacgtcaaggacatgtctagcaaaggaaaaaagggcaaagggcctgacgagccgaagcgccacgtggttctcccaggaaaaagaaaaatcgtcggagtagaggacaagactgacgaggattacgatcagtttgatgggcaaccccctttcacggtgacgattgaccctagcatcctcctatcaaatgaagacaccccttactcacgtagcgatcataaggaaggaacaatagtgaggagaaagtacgtgcggtcaaccgtcaccgccgatgtattgctgtaattgttgtgtacacgatgtaaactattttggatgtattgaatatctatacaaatcaattgttgtatggcatatgttaattatgtatgattattagaatttttatcaaattgaaatcatccatatgctagttatatatgattattagaatttttaaaagttttaaatcatgcacgtggtatttacatatgttacttagaattttcagcaatttaatatcatgatatgctaattatatatgattattagaatttttattaattctaaatcatgcatgtggtatttacatatgttaattagaatttttaacaatttaatatcatgcatatgctaattatatatgattattagaatttttaacaattttaaatcattcatgtgcttattatatattatccacttagtttactacagacaacaatattttttcgaaggttttatcattaatttttcgactttaaataattgtaatgcattatttactattttagaaacacatatgtaatgaaattaaaaattcagtgctattatctttagtcccggtttttaactctaactgggtttaaaaataatttggaaatagagggaaaatatctttagtcctggttggtgagaacatccaggagtaaagatatctttactcctggttcgtaagaacaaccgggactaaagatcttttctttagtcccggttgtaggtacgaactgggagtaaatatatctttactcccggatgttctcaccaaacggaactaaagatctaggggtatatatattcccggtgcgccctcgtcttctccaccaacacttagaagtttttcctccgatcgatctcggcttctccttcgccgccactgcctagggcaaccccgcgccgacgccgccgtcgtctcgcggtcctcgccgcctccgccgccgacaacgccgccgcatctcttgggggagagtcgccactgcctctctctctctctcgatctatctctctctctctccaaaccgccgccgcctagctcattgccgacgccgccgccgacgtcgacgcgcgcggccgaccccgaccccgactccgcctcccgccgatgctgaccccgtcttcgacgcggccgtcaccgccaacgacgtaacatccacgcggccgccacggtgacgacgccgacgccactgccacgccgccgcccccgcctcgagctcgccacgccgccgtcgcggcacgctgccgccgtgcccccacgccgccggaccgcgccacgtcgccgcgccgccacgccgccgctccgctgccgccactgccgcgcgacacgacattgccgaacatgaacgaacgtgaacgaacatgaacgaaccgtgaacgaacgtgaagaaattcttcaagggaatgtccacaacaaacaaggaggccttaaagctatcggactatgaccgaacacttcagaaagcctatcacaagaagtccaaaccagtccctcagcttggagaacaaccaaaccaagaggtcgagctattggtgaccggcgaagattttggcataacggatttcatttcagacaccggtctaactgtggatcagctgattggaggcgcaccaatcccgaaggcggtagtggcatacaagtttgaacttggtaaaccgcttgtcacgcctgagcagctgcagtccctaccgacacagatgtacaaattccatgaacagtacatggaaatgagcgccaagggtagagagatgttcggagcgaggatcagaaaccccgacttcttgcaaggagaagatgttctcttgatccatttcaaggatgtcttcaatctgtaccatctggacgccctcgacgtctctcttctgagcgcatggattttgtaagtatctttgagatcgatttgtttcattcataactagctccttgtatatatgtaaacaataataatttcattttatcattgtagaatggagattcaaagggcccgacggcgtggggtttacgatactgggttcatcaaatctcgaaaaatcaacaccgacatgatcgacaagtacgagaaagacacagaggacaatctcgtccatctcctaacgcaacagcatttcaagacgttcatactaccgccgtacaacacagagtgagtttttattgtcgtttgaacaaatttcgttcccatacatataagatgtacattttcatatatatctcatctcacgcatattccagattccactgggtcctgttatttttcgacttggacgcatgcaaagtcactgtgtacgactcaatgaataaagaggagaagatttttgacaaggtcttccaattgatagacaggtaatataatgccatctattccaatgtcgcgggaattctattgctattatgttgatctcgggtaataattaattaatcatagcttgcaactgcatatgtagggcatgcgatcggttccgtcaattggtccgcgggacttggaaagaaaaacttggacggaggtttcattttccagtgagtacatgcatgatccaaaattatattgaattgaatctctaattacagttaatataaagagtatattaagtctctcatcgtttctcacgtagtgtgcaaagcaggaccagggaactaacttatgcggctactacgtatgcgagtatgcccactgcctatcaaaccaaatatacaccacacgagagctcgatgtacgtatacataaaccattcaaaatttcattgtgtatcaatttgttaagttgtttattaatttcatatattgatatgtcattatttttcgaatgatagcgtattcatatgagggataatctcccacacaagaattttatcacggttgttcaagaacaactgatgggattcatcaacgaaaaagtccttaatcccgatggtgaattctactacgacggatcgacaattcataacatcggtccttcctcttctgacataacgccggcgtcgaagtcgtagctatagctagcgagcaaatgaattgtactatatatatgcatgtatataaatatttatatatgtacacatttaatttactgttaatatatattttggtaacatatatgcacataaaatgttaagtgctttaaattatacatatgtgtgtaatatatgtattatatatatatatatatatatatatatataaaatcaaccatgcagcaaacagggccatgcaaataaaaaaaatggtacaccgatctttagtcccggttatttcacccggggctaaagatagctatacttagtaccggattcgtagtcccggttggacaaccgggactaaaagggggttacgaaccaggactacaaacggtttctccaccagtgttatttttggatagaagtaagaaatgtatatcattttcattattaaaaagaagttccaaatgtgatccagatcctgtatgagccgtactcatgttcttcgattgtgatgttctgagccgaagttacgttctatttgattgatgttctggggtaatcagataagtgtttctttgtccttgagaaagcggcatgcactgatgcacgagaaattgagttgcgatggttcatgcactcacaacccagtaagtaatcattaagaaaggaatacaatcttctgtttggatcagaagcaagaggctagctgatcgatattcctttgagtcacatcagcagaacagataccatttcataaaacag

SEQ ID NO: 27585 - DNA, 9938 bp, Oryza sativa
gttttgggtcagctttggggctaggttgcgggttcggttgaggatcttgtttcgggtcaggctgtggcgttggttttgggtcaggctgtgggttcggctgaggatcttgttttgggttaggttgcggcgttggttttgggtcaggttgtgggttcggttgaggatcttgttttgggtcaggctgtggtgtaggtttcgggtcaggctgcggagatggttttggatccggttgtgggtttggtttaggatcttgttttggttcaggctgtggtgtaggttttgggtcaggctgcggtgatggttttggatctggctgtgggttaggttgagggttaggctgtggactgggctttgtctctggttgtggttttggtgttgggtcaggtttaggattgggatctgctggctttggatcagatttagcttcaatcacgcgtccattggcaatgtgatcaggaacatttgccgccaatgcaatggcaagcgccaaatggaagcacagtgagaggattgatctcatctcgttgtcactacaaactctactactcactcttgacagtacacaagctgtggtagctaggtgtgttgcagaaatggcagggagaggctaggagatttatagacatggagagccaactggcggtagacgcgtgtgatgctccctttgcttcatcggcaacgttagcatgtcactagtgatccaccttttcttcgtcgttgatccgtgtaactttcgcgcccaccagcccattcagatccatcaggaaaagcaccaaataaacggtattaatttgtgccttgtcgttgtcatcactgtggtgatattgcaggggcttcttcaattaatttacgttgtgtttatcacatgtacgctttctcaatgctaaaggggaagaaatgggaattactttgtgtgactactttatctggcttttttttttcatgtatgcatgcagctactcgatcttgtaactgatttacgcctaactttgcaagcacggctaatgatgtgcagctctttccccccacctgtgccatatatacaattagtaactacgtggttaggacgcggtttacaattaactaggtaaattatgataatcttatctgttctagctgtgatatgatgttttactattttcttgcaattaaagttgtaaaggtaaacttgttttgcacacaaaaaaaaaacttgggtgagacacggtagttcaataattttatatttgtataagtttcacacaagaatcataattttatatttttcaatccagtccttatttatggcaggacaaaaatctcaaaataacatcttgattttttgaattaaattcctcattctccagattgagttgttatatatggatacagattaaagacgatgtttatatgtagatataggatccaaattggtagatataggatacgtctcctcgtattccactaatgtcaattataatataaatttgtttggaagattctaaaaaaaaatgcgcccatgcagaatatattaacacttaccatttcaaaagaaaaaaaatcaaatctaaattcaacatacaaataagaaaaagagaagttaattatattttcatcaccatttataaccgaagtgacactttgttctatctcttagcagaactagttaggatggcaaaatttattgcaggacacttaaagttcgtggtatttgctgcaggacacctaaagaatgcttatttgttatagggcataaaaaaatggtaattatccgttgaacatcgaacatattattatattatatccgatgcaaacgtagagagaaatagtgtgaaaaagtcctattttgcccctgtgtctatcggtttgtaagtggtcatgttcgaaccaaacccaggccattctcattctccctatttggtctattgtcaatcccttggcctgggtccggttcaaactatatccggttgggttaaaaagcatgtcgtatgggcaaactcgtcattttagaaagtttctctctctgtttgcacaggatataataaaataatctgttcagtgtccaacagctaattactatgttttcggagtgttctatagcaaatacgcgttatttaggtaccctgcagcaaatttcgtaaactttgaatgttctatagcaaattttgccatttaggattgttgtagtttgaaccacccaactccttagttgaacttatcaatgaccttagcatatcggcgaactttcccactaccatataggccactctttactggaggagagtctagatgcagctggagaagaggattaggctggtccgagtccaaagtgcaacagagcaattaaaactgaaaagattaattataagtaatcagaaggaaaattttagtaataaaaagcggtccaaactggaatacactatgcgaagaaaatataacagtgaattgttcactgtaatgtctgcatggttataaatttgttaaacagcttcgttttctattcgtttcagttacgtggaagatcgtacaccactacttcgtcactcaacttcctctgttgaacaacttctgttgttgccaaaaacacatatatagaatcgcatttcttaaaaaagtataatagtttccttaagtattgaatcaatctctgcagttataatctggaattagtatgagtaattatttatgcataatattttcttatacttattttataaataataaagtttttccaataataatggggtgacatgtgttattctagttttttgggtctttgattgtctttgaggctgctcgtgtacagcacacgcgttttcacctgttttgacgaactactgttactttattttcttgagcctttgtgtccctgtctccagccctgcagtccatcacaaacctgttcttggtgagcggcacgcatgttgatttgactaatggataaggtgttcagcaaatcaccgatattgagagtgctggagatggactttgggaagaaaaaactggttggatatatcaacactaaaatccaaataggataatatacggcatgaaacttaaatagacatgtaatccaaataggtaacagcacggttttcactaaccatgcagttactgtgataaccaccttaccatggaagtggcagtaaccgtaccccacccaaaacagtttggtgattagaggggtttgtcccttttttttcactctaatgagttcttcctcatacaacatcagtataattttcactggacaagttttgtcattatttatttaaaaagtgtataacaaaatggaagagttcttatgacaaatctatcgatatagttttcaaacctcaaagcataatgtttttttatcttcgattattttagattttaagatttgatggtacatattggaaccatctatttgaaaacggcagtagtaccataccatttcgaatgtactaggtagaagatcgatatgctataccaaaaaggacaacgcgtcatactctcatctggccggctcggggcgaaaccctagccgccaccactgccactcctttcccttattttttctgccttgccgatgcaggacaatcgtgtggtaagccgggatggtagtggtagggctacatcacggtgacacatcatctctggcacgatagaggcagacaacagcgcgtggtgagctagagtgctggacgccactgcggcgctcaccggcgagggaggatggggacctggtgccgccgtggctagatcctatgttcccatggccggatcaggcacctccatgtcggattttgtcgaggtcaagtagtcggcgtgatttagagatcaagggcgatggtagggagaggatggtgtgggagacaacaacgagtggtcaacataggcgacaacagctggaggccagtaaggctgcaggcggtggaggctcacggccgatgagaatgacagagggcacaactttggcgatggccacccgcaccgacagcgggattgattgcgagctatagcgatggtagatggtgaagccgacaacatcgaggcggcacaagagctaatggagttggtttgtccaagcttgctagtcacacccttttcttctccctagagctcctcccctgctatggccatcccttttggttacggggagctctattggtgagacgacggtgggggtggttagagaagacaacgctctagcgacgaggcttcgtgggagttgtggcatactaggctgcgggttggtagaggttgttcgggtgacggagctctacggtggccacgacagctgcggcaatgcgtgctgcagccgaacttttgacctaccaccctccccattcctaataggactctccaggtgaaagccagtctagaaggatgggcgacgatggcgcattggcgcataaggcgtaatggcttccctggatgcgttgcccacaaggtatttgctccatgcctttgttgtctcctctcttgttggtctttggtggcttcttgtttataatcatcaggttgatgtaagggatgagtggttataatcctaataaaacctaaccaatcccaatcctaaactaagcgcttgagggtcatcgaagggcggtactagactagtgcaggcggcgccccaaaagatgtctgcatcttgcagttgattgcagcagccccttcaggatcaagccggtgaccgcagctgatacgactactgcctctacatccactgcctctacatccactctagccatcgacaacctcagggcaactacgacatccatggcttctaataacagtcagtgaccctaattattccatattaaggtgatcatagatggctaagaacttatgtcagtagatcaaataatctacattgccttattctgggctagcggacggcggtggtggtgtttttttcctggttatgatcttataacttttttatgttaatataaagcttcactactaaaaaagcaattttttttccaaatcatcaaaacctatttttgcatgtggttgagctacccgtttgcccgaaagtgtcagcgaaaatcaccatttttccatgcgggtggcgcacccgcacgcaacaaatccgattttctcatgcggatgcttatgtcgttcgcacgaaaaatataaatccccaaaaataaaaaccctagctaggtgaggtctgccgtcaggctcctcctactagatctgcgccggggatggttgctgccgccggatccgggcgggaacagccgccaccactagatacgtgtggaagatagcccagccgctgccaacaccccttgcctcacgccggtctcgtcccgctgccgctgccaaatctgctcagatccatgtaggggacaggcgccgctgccagatccgcgtggattctggcgggggatgaccactattgccggatccaagtgggggaggccgtcgttgcaaatctgcgcggagaacggccttgcccctaccaccgtcgcccctcgtctcccatcgggctcctcccaccgcagccgcacgggggccggcctcccgccacttccacatgcgcacgcccgccgctggctactccccctcgagcttgccaatggctactccccctcgagcctaccattggctagtcgcccatcaccgccgctcaggagggttgtccgccgtgcgcccgccgctggctacttcccctcgagcccaccactggccagtcgcctgtcaccgccgctcaggagggaagttaagggatagagaggagagaaggtgaaaaatgagagagagatgagtttgaaataatatgaggaccttcttggcggacctttaagagatccatatgtgaaaatacattttcccatgcggtcgtttaaaaggctcctacgggaaaataggcttatttttctatatggcgtcttaagaggtatgcttgtgaaaatagatttttgcatgcgggtctcttaagaaaatgtatgctaaaatgaaggtcgatttttacgtgcacaaccagttatggtccacctgtaacctctatagatctcgtacatgaaaatcgtttacatagtagtggttgtatggttctggttgtttaaataaaaacatatatattctcgatctcagaacaacagcactgaaatcagtcgatcgacgtacgaggtacaagatcgatatgcagcaccagctgtcgaagcaggagccagtagtgttcagtagtgttccttccaccgctcgtctcataagctagttaagtataaataaatactcctttaatttcatagtgtatggcgtcattgatttttttatttatttttcatataacctttgaccatttaccttattaaaaatataaataaatattatttattcattgccacttgtttaattattaaataaaatttaatcttattatttatggttttacatatttatattaaactttttaaataaaacgaactataaatgttctggattctggactgttcgttacattgcccgtacaacgacgaaatggatcgatcgacacgacggcaggcagccccagcacgcatgcatatgctctcgtggcgaggaccagccggagaagtggcgcgtacgcgtctgcgaatcatgcaaatgcccgagcgcgcgcgcgtgcgtaaagcccctcgtcctcgtgtttcctcgctcgcttaatttgttgcacggccccaggttcgttcgatccatggatttaaccgggtgcaatcgcgatatatatgtacgcgccgcctgcgccttttgatcatgaagcgaatgcacgatgaactgcgaaacggccggattttcgctaagtggccacaggagctcgatgcagatagacacttgatttgatgccattcagttaccggtgcgcgtgcttggtcgatcgatcgatatgatttaagatttacacgacaaaagtattccttctttactgttctcttagtgtctgcgtaagtcttcttttcctgcgataatgcctgattttatttacaggccttaaatcataggcggagcactgatcaactgcatagaacaattttggttgtctgcaaaaacacttttcgtagtaggtgactgaaaaagaggtctgttcactgggctagatgaattttgtggtggtccaaaatatggccccctcttactctctcatcctaaaatggaatccaattttgctatacacactcctaagtggaatacttgacaagaagctgtggtttagtggggataatatggattggcccttggacacaactgcctccactcttctgtgccgcttccaagtgccaaccatgtcttatttgttagtaaccgcagcggctcagttcaaaactacgtttttgactcgcggtgttggtgcatcggaaaatgtgttggatcattagtgtacgattaattaagtatgagcaattataaactggataaataaatttacttatttattttaaaaaaggaaacttctatatagagaagttttacataaaacgtgttgtttagccgttaaagaagtgtgctaataaaaaccgaaaacttaccatttcacattttgggaaactactgacgagtagatcaagttgttcgccagcgaagttgaacttgaacgcctcgttacttttttttaagataatggaatagtcatcccggcctttgctcaaagagagctacagcccattattacaatctagcactataaaaaatgagtgtagttcagaaatgattgaagaaatgaccacacaaaggtaaatttaaccaaaacaagatcaggagaacacattattagagtgcgctcctttttacatttgggattaggcaaccgtgtagcatgtctcaaatgtttgggaattggctgaattgtgttgaacctaggctcaagagaatattgtttgtgggcatagctgcatttctttgagcaatttggttatataggaatgatgtggtcataatggctccaatcctacatctttcttgcaggtcattttcgtgggaacacattgggcaaggacttggtctttgcttcttaagggaaccgatgaagaaatagttaagaactattgcaaagtgctggagaagcgtgtggtggaattcttctccgtgtatggctggaaccttagaagaagattggaagcctagtcttttcttcgtttgttgttcttaaaacctttgtgctgtcatctcttatgtaatgggagaggtcagttgatgcattttgtaccctttaattagggagagtcttatgtactcgtgttcggatttttggctgtgtacaccccataaaggtgtagaggccgggtttgataatcctttatctaaaaaaaaggagaacacattattgaagatcaggtaaatttaacgcctcgttactagatgtattgatgttgctcacccatctgcaatgaccaattgagcttcaattcgtacagaattaaggactttaaaagatttaattttcataagaattggactaattcttgcgaaattccttcataatttctgcgttccaacatagccttgatagccttgattgagtgtgcatgtttggctttgagattataccgtgaggaaccctggtgcccctatcaaactaatcgtaaatatttgatgtttagaactatattcgttaaatatttcaaaactttaagaatattagaaaaggtttataacaatctaatgagtttatgatttttttagataatggaataacattccgccctttgctcaatgagctacaaccaattattataaaatccacacacgaacaaactcaacacacactgatatatgatgtaaaacacaagataaaaggcaccaacacaagataaaagaacactcaattactcaaggcagagaaaagaagggaaaggagggtcagcggtggtggctagggtttcgcccagagccggccagatgagaacatgaagcggggtccttttcttttcttgtatagcatatcggtcatttacatagtacattcgaaatggtatggtactactgccatattcaaatagatggttccaatatgtacagtcaaatattaaaatctaaaataatcaaagataaaaaaaaacattatgctttgatgtctgaaaactatatcgatagatttgtcataaggactcttccattttgttatacactttttaaataaataatgaaaaaacttgtgcattgaaaattatacggatgttatataggaagaactcactcgagtgttaaaaaaaggacagacccctctaaacaacatggattgaactagggttcagcaaaccattttaggtggggttaccgccaccttcatgataagacgattatcgcggtaaccgtgtggttaccgtgaaaaccgtgttgttaccgcgaggttgaccgtggtatcacaaactacgtgataacagcgcaataaccacactgttttgcaaaccctgaattgaacccatcgtgttaccccttcacattctccctctacttgtaaactatgtttatctaaactataaatttatatatacttatgcggtaaatttcaaatattacatcataaattagaaattccaccctgtaaatttttcagtaatcttatattagtgtttacatgtctatttaagtttcataccgtatattatcctatttggattttagtctcgatatatatccaaccagttttttcttcccaaagtccgtctccagcactctcaatatcggtgatttgctgaacaccttatccattagtcaaatcaacatgcatgcatgcctctcactctcactcactcaccaacaacaggtttgtgatgggccgcagggctgaagacagggacacaaaggctcatgaaaataaagtaacagtagttcgtcaaaaacaggggaaaacgcgtgtgctgtacacgagcatcctccacgtacgacaatcaaagacccaaaaaaagaaaaactgacattgaataaaacatctgtgaccccatgattatacgaaaaacgttatttttttacaaggctgcaggaat

SEQ ID NO: 27586 - DNA, 1741 bp, Oryza sativa
agtttggaccgctttttattaccaaagttttccttctgattatcaataattaatccttttagttttaattgctctgttgcactttggacttggaccagcataatcctcttctccagctgcatctagactctcctctggtaaaggacggccttcgtgtaagtgggaaagttcaccaatgtgctaaggtcattgatgagctcgactatgttgggtggttcaaactacaataatgataaatagttccgctaaagggtagaacatagtgaaacttcggatataaaagatgaccaaaacataattaacttctcttttcttatttatatatagaatttagatttgaattttttttctttcgaaatagtaaatgctaatatattatgcatgggcacattttctttagaatcttccaaacaaatttatattataattgacattagtggaatacgaggggatgcatcctatctacatataaacatctttgtatccatatagaaccgtactttcaatcactggagaatgaggaatttaattcaaaaaaatctacatattattttgagatttttgtcctgccataaacaaggactggattgaaaaatataaaattttgattcttgtgtgaaactcatacaaatataaaattactgaactaccgtgtctctcataagttttatcagcaatacaagtttacctttacaactttaattacaagaaaatagtaaaacatcacatgacagctagaacagacaagattatggtaatgtacctagttaattctaaaccgcttcctaaccacatagttaattgtatatatgccgcaggtggggggaaagagctgcacatcattagctgtgcttgcaaagttaggcgtaaatcagttacaagatcgagtagctgcatgcatacatgaaaaaaaaattaaccagataaagtagtcacacgaaggaattcccatttcttcccctctagcattgagaaagcttacatgtgataaacacaacgcaaattaattgaagaagcccttgcaatctcacgacagcgatgataacgacaaggcacaaattaatgccttttatttggtactttttcctgatggatctgaattggctggtgggcgtgaaagttacacggatcaacgacgaagaaaaggtggatcactagtgacatgctaacgttgccgatgaagcaaagggagcatcacacgcgtctaccgccagttggctctccatgtctataaatctcctagcctctccctgccatttctgcaacacacctaactaccacagcttgtgaactatcaagagtgagtagtagagtttgcagtgacaacgagatgaggagatcaatcctctcactgtgcttccatttggcgcttgtcattgcattggcagcaaatgttcctgacattgccaatggacgcgtgattgaagctaaatctgatccaaagccagcagatcccaagcctaaacctgacccaacaccaaaaccacaaccagagacaaagcccagtccacagcctaaccctcaacctaacccacagccagatccaaaaccatcaccgcagcctgatccaaaacctacaccacagcctgaaccaaaacaagatcctcaaccaaacccacagccggatccaaaacaatcgccgcagcctgacccaaaacctacaccacagcctaacccaaaacaagatcctcaaccgaacccacaacctgacccaaaaccaacgctgcaacctaacccaaaa

SEQ ID NO: 27587 - DNA, 13571 bp, Oryza sativa
cgatcagctagcttcttgcttctgatccatacagaagattgtattcctttcttgatgattacttattgggttgtgagtgcatgaaccacatcgcaactcaatttctcgtacatcagtgcatgccgctttctcacaaaggacaaaggaacacttatttgatcaccaatcaaatagaacgtaacttcggctcatcccagaacatcacaatcgaagaacatgactacggctcatataggatctggatcgccatccagtgcatttggaacttctttttaataataaaaatgatttacatctctgacttctaccaaaaaataagtagccataaatttgtttaacaaataaaaaagagtgtaaggcgacaaacccccaactctcttatgtctcggcttctcatctctcctaaaagaggggagaaatgacgaagatacaatataggtaaaagttagtggctcaatgtgcagttcacttaattatagtataccagtgtagcactgtatattgaacgcttacaatctagtccattttccatgaaaacagacaaatgagatagcatgtaggtgatcctgatgcacttggatgtctaatatgagccattcattccaactatcaaatatttatttagattgactaacgttccgttgaaggctacatatagacaaagaaatgtaacattccataaagcagtacaatgttggcacgtatttattggatgttgtatgtaacatttgtacactaacgtggcaggcattaattacttaacacagtgtgcaacatttgaacaagagagtgtgacacctgaaaatctgtgcagcatctacaaatcaattgatggaatatcaaaaaggagtgaaaacattcaaattcaacaagtgcaacaaaatttaatagagtgtaaggaagatgggctaggggtaagtggtgagaagtggaaaagatgtcaaacaaagtgggagtagcatggccaattattatcatggcgacaggcattgtaaacctacttttcctacctaggcattgtaaacctacttttcctacctccagatgaggatgccttaggacaaacattccaaagtaactggaatggcaactgatgtgatcttgtgtcaaagtagagctgtagagaggccatgcacagggcacttgacactgagcatcaccgtcattgaagggtgaatcattatcaagatctggtgcttagcggcgataatgaaggccaccttctgttccaggcaacacagccactgtacatgcatagcacaatgcatgtctacataaggtcaccttttgtcctagccaacacagcactgtacatgcatggcacaatgcaagtctgcatatccattcccacaagtgtccaatcgaggaaccgtgtgcatggtggtgtctgaaaattagttgttgacggaatgactagatcaaagaaaagcatgcatagtttagtagttgtcttaaaaaaggatgttcatttagcagagatgggccatgcagtgccaatgggctgtcctgcccatgggatgcccgtcccgtagctctatagtcaattagaagatatatcaagtattgttgcaggaattcttagtcccatatagaaatatgtaattttgacttttgagtaaacaatataaagattaaatttgttgggattgagtaagcctatgaaaaataaattattagccattctacaaattacaatatttgccatctaaatagatactttattatgacataagtagatgagatcatttgtaggtaattgaacagtatgttggaggtacttattgttcttggtatgcctctttagtaagatttgcaggtaggtttgctagtccatttgtaccatgatgctcagccgttgtcttgggatgtctttacccttatacttttttgtcgaataaggtaaactattgattttataacatttttcggtctcactcaactgcatatgtgttctaaaaatctcatcaaaacaactgtgagaacagttatatatgttaacacttagataggaaaatagcaaagaaggcaaggcatgagagcagagtagtacaggtaagaacattgaacaaatatgaaattagaaaaatattggtcaaaagaatcactaaccaaaaaaaaacatagtccagctatgatgctctctacttgtagtattattctactagtagaatcaatctgaaccgttgattcaaagggcatatcagtacttaacaaacgcagtcaatttatccattctttgattaaaaaataattattcattcatcataattgtatcgcacgtcaccgggcacatccctggtctcgctcggcaaaacctcccgcaggtggcgatctacacatatggctgctctcacagacctcttcttttcccccttctcctcctctgtccatcgtgtcatttcattgccgtgcatgcatgcaggagttctgcctttgatctatagcaacacctttggtgtccgccttggaggccgtcaagtcctctactccacggccatcagcaaccttttcaattgtttgtccattggtcatctccatgccgtctttgctggctggcctgctaccggcgccttggcgtcggtgccaattctcttgttgatccatggtgtagagcgccagcagcacagtgaccaggaagttccgatccatgtattttgtctgctctcaaatatcagatgttaggcatgtatcatgttggtgatcagtacatatttgtccctgaagttcaaaataaacttattctaatatttagctgtattgttgtttgagtaacgatcagataagctcgcaactaccgacttgaagccatttaattggccctgccagtgaccatgcatagagatgccggcgtggcgaccgaacctggcgatggcatggtgtcacgcccggaatttctatccaaaattccaaacgcttacatgtgtgtaaaccctcgtccaggaatcagccgaagcacacaataacaaattgataatagagtacaattattactctaattaataagcgaatagaatgtcattacagaggtagatagttcctctcaatcaataaagttctaagcagcggaaaataaaaacagcgcaggcgactcctctccacaggcagcttgaccagggctacgcctaatcatccactccatcagcatcactatagaactcctcctctgatgaatgattgcaaggtgagtatatgacatactcagcaagccacgcagcaaatatgcaagtgcacaggataacaaagaatggcataatatggtctcatttgcataaacatcatttaataaatatttcagaatttaataaaacggttaaataataattaaacaatattaatccaacgctatacaacaaaccctgttgcataggcccaacccttatgaacaaccaatcccggctgcacagttctatctccaaaccaggaattaaccattccaaaccaggagctaaacaagttattaacagcatcatttaatatagtgagagatgtgaaactaatcacgaaagacattgttagacccgcccataaccgcgggcacggctattcgaatagttttactctggccagagatgtaccactgtacccacaagacacaacctcaacatcatgtcaaccatgcgtcgcgatacttgacaagtacccgaatagagattgtgacaataccccctatataatacaattcaaagcagtacaccgttcccggatcataatcacccccttataaacaaggtatggactccccagtgacccccgtgggcttatctccgccacttcacagtctggtactctactatgaatcatactatacagaaagtaaagccgttgcccacgctggcttgtggttggcacggtaaatgtttcacaaccgaaaatcgtgaaccggtccttaattgtcatgagcacaaccatcaaaaccatatgctcacaacccaccattatcaggttttagttgacaaattaattaattatccaatcatgattaaccatcatgagctatcattaagccatcattaaataatagtgaagcataagttatcacaatagtgtgctaatgtttctaagcatggctaagcaattatgtctaatatctagctgaaccattatataaagctcaactagtctaattataataacccaagaaatcaaagaataaagtaatcaagaacaaaagggctataacaaacaataagtttattccacccaatgacattcgaaaataaatgcaatagttgaatagaaacaatagctttaaacgggatcaacatgctcaaagggttgtttgggatctgtgtaacttgccttgctggccttggaattcctcaaaatcttctcctgcaagatcggactctccgggaacgtcggaatctaaggagaaaagaacaaaatcaccaaaacagcacataaataagcatgaacagtatatgtggatatttttaacatgtagatctcaattttagaaaaatttagagacttgaaccaactaaatccgagctaagatgaattagttatgaattttcaaagattaaatcggattaaatcatttatagatattttaatggaattatgacgcaattatgaattatttttgaagaggaaaaagaggattattgcgtcagcatctagggttcacggtggaccgggtgcacggcggcggctcacggaaacgaacggtcgggatctatcgatccaaaatgaacggccgagatctatcggtccacggccggtctacggcggacggcaacgatgacgtcggcgatgacgtcatcaccggcgatggcttggacggcacaagctcaccggcgaacgacggcacgacggcgcgaacagaaaacacctaaacgatgcgggcgatgcggcgaactcaccggtgaccaaagcgacggcggaagatcaacggacggcgacggcgacgaggaagaaacggcggcgaccttcggattgacgatgacggcgatgttccggcggtcctcggcgaaaatggaggggcggacgagatcggcgacggcttgacgaccacgacggcgacctccccgagcggtgacgacgaccgaagcgacggcggcgcacggctggacctgcggcggcgacggcggcgctaggcggcatggcgctagggctctaccggcgacaagaggcgaaggcgagggtggcgacgggtagcggagggcctgggggtccttttataggggctagggggcggcggcgaaggcccacggcggccggcgacgggtagcggagggcctgggggtccttttataggggctagggggtggcggcgaaggcccacggcggccggcgacgggatggaaagtttagggttcggaggagagagatcgatccgaatcgaactcaaatccacggatttccaaagcgaattagccgatgattccaaaagggaaaaggtagaagagatctcggggatcctttcccctcaatcaattcgaccggagatggaaggatgcgatcgaattggaagggcggcggcggctagggttcggcgcggcagcggcgcgaggttgacgacgggtctaacaagcgggccccacctgtcagcgacggacgcgcgcacgcgcgggcggctcagcttgggccggcttgggccgagggagagagaacggtttgggccgactttcggcccaaagccaaaaggaagattttaaaacctttttcaatttaaattattcatgaaatgcaattccatttattaaaaatacttccttagcccaaataaatcccagaaaaatctaggaactatagaattaagcaaagtatttaataaaattttatctagacaacttttatattggaatttattatttaaaattagatcttctcttctaggcttttaaaataaattctaataattccaattaaacaacaatttatatatttgggatttttagggtgtgacacatggttagtggagaagatgtcagagacggcgtaccagggagtcccacccataactggcatgttggcgctgacactgagtttgttcacgtagtcaaagcggtgagtctggccgaggaccctgtgcacgttatcagtgagatcatagaacttgaagccgaggtcgaggtgagtgaggttgtcctcctcggtgatgccatagttgttgatgcgcgagttcctgtcattgatgggcacgacgttggccatgatgacaaacacgccagcgaactatatcctcatgcggacgtggtcatgctgttggtcacatcggtcttggtgatggtaaggccaagcatggcggtggagtctcagtgcgtaccaagcatgcctaggacgtcaacaggcacaccatcgaacgcgacttggattcgtcagtgttggtgtgggccccatgcgtcagcggttagaggcgacctgtgctgccaactaggccactttgcttgctggtccggcgcatgggcttggtcaggttaggttgggccagagggagagggaggaagggaggccggcaggaagaggcaaactggacttcgcgatagagaggaatgggccaaatttggtcaaagctttagaagggattttaattactttttcatttaattaatcactaaaaggacctatgtatttttaaaattagtaattgagctttgaaaacttcgagaaaattccagagagtataattaatcatggagaatttaataaaaattaaatccagccatattttatataggcaattttgattcccctatttacttcacttgttcattaatgtgcactttaatataaattctagaaataatttcttatataatttataaatccctaaaacgaaaatcagggtgtgacagcacctctagctaacgagcatgcgtcaacacgcctctttgaccgccacatcgacaaccgcaccctactagccaccttcgccacctgtcattactatgccaccgcctcgctcactatcgcgacatctacactgaatcgcacaccaccacctgtctcgcacgtctaaacttgacaggatccactataaataggcccgcaaatccttcaattggcctcacctccaagacttaaaggaccccattgtcctcctccatttgccgcctcatttccctctctctctcctctccaccgaccgccattgccaccacaacaaatccaccaccgacaaccttccctccggtgaactctcacccaaatttatccttccatccccctgactctcactgtaatgccctcaaccaaacctctcccaagcgtccccactgatagtttagtcgtcaacagacctaagctctctgccgctcatcgtctgccaccacctgctactctagacgaaatccaaaacactcgaccacttcactatcctctccttcccccacacccatgctccccttcctccagaaaactaccaatcaacgggacgcggccaaccaccccatgctccagccctggcctcacacatgcttgggctaggccacccacttatgggctggcctggaagggtagcccaattcagccccaacggctccgtagcactgattgagcaaatttaactctcaaaatgtttctaaaattgtgatagaccttgtggcactattagttactaataataatagtattttcattttagggctttgtgtggttttcgtttatttgcgcataatcgacatcatcggaaattattttggatgcggaatttcgaataacttgaagacgaagacatgatcaaaatcctcccagttaaaaaaatgctatgttcgagaattgcattgctagtgtgcatgataaacttgatcgacctcggtttgcatgatgaatcgaaggaccaatttacccatagttctattacaccggtataggatgttgatacccattgatgaaccctaagttccactcgacactcaaggctgttgtttggtccgatctttcagtgagttgatgataactatgatttgggagaaacgttgacgatccgaatacaaccgtacaagacgttgtgttgtgccttagcgatcaatacacctctccgtgggttgttgatcttgccggcgcagatcaaccttattcccgcaagcaaatcgaagaaacaagcaagaacaagataaagcactctgaattgcagataggaatgaatacacacgataagttggggtttcgaatacaagcagatggacggtatagctgacacgcgggctgcaaggaagtagcaatggctaaactttcatctaaacaaaattcgggaaacccagaaggggtacctagctatttaaggatgtgggagaacaatcaagagggtcctaggttcgtgcttcaccaacttggggcgcaccccacatgggccccacttgagccgaggtcccaaacgaagttacaagctcaaaggcccatgataggtgacgcaacactttgtttctgcaattgcggccaaaagagatggatttcggggatgaggctggatctgttggaaagaggactctgagagctttccatcaagtactcacgggccgaaaacagaggtcatatgcagattctgtggccatttgaaatcagcagtgtagcaggtggccgaatcggattccagcacttggaggacttgaacttgatatcgtgctgttcatccatgatgtcagaaacggttgtatccgtagtagccatggtcacatcatcctccccttcttcacagaaaaccgtcctcgatttttccatatggtgctcatcacgtggtcgatttaaaacaacatgtttcatccaatcaaaacaagacaaactcgaagtaatatgattagaaataacatgtctctctagcttgcaagttttatccacatgtacaggaggttctaaatccgaacatagataaactctatgcaccaaatatatttctctatcattatattcgccaaagatatgaaaaatagcattagttggacatagcaaataatatttagcaaataacttctccttcaaactatcaagctcacaaaaatcatcacactgaacatagcccaaagtatttaaagaagaagtcaattcacattcctctacttcattagcaatgtgaataacatgcttaaaatcatcgcataaagaactgacattagaaatagcatgttcattcactagttgtggcattgatataagtgaagcattatcacacaactcttttttatcacaaggaacatcaaacaaatcaacttgtgacaaaggaatctcaacagttggttccactaatggttgctctactatagcatgaaaagtggacaaattcaattcattaacaacacactcaccttgattaatttcagcaccaataagtttacctttgatgccctcttcagatgatggaggtgcctcgactttgagtgtgaacaatgggactgatggctctttcatgtctctctcctccttgttgcagttgttcacttcctgcaaaatattagtaataggaggtatgggcacaacttgtttcttgttcacatcctcaatttgtttttccacatggcaagaaagttgtaacaaatgagcaaaagagctataactttgacaaacaagcatgtcctgaatttctttattaagcccacgtaaaaacctcaactctgtagcttcttcgcactcatctaaactacaatgtaataaacaagcatgcatatcatgatagtatgaagtaacagttctggtatcttgttttaaacattgcagtttgttgaacaaaatgtcagcataatacatgggaacataaacatctctgaaatatcgtttcaggtctttccaagattgtggtattttgttatgcctacaaaggtgtttccaatcattagaagcaagtttaattaaaacactagaggcacacataaccttttgtttctcagacaagacatgcttttgaaattcactatcaaccgctagctcccaattaatgtaagcatgaggatcatagtttccctcgaaataaggcagtgcagatttgatcttacctagaacatcgtcacttacctcgtaatcgtcatgttgatcactcctcatgtctcgacgaagatgtcgatgttgagcacagctatccccaattatcttgcgtatccctgccattgttagtagaaaagaagaaacatacacaaaaatatgtgagttcctattaactactaggtagtagcagctcaaaaatcacacactcaagcttttaaccaagctcttacaagatcttaccaatgcaagcggaatgatgacatacaccgactcaaccaagcaccctaatggaggttggatgtatcgatgccttggcaaacacttgctgtacggctgcaatcaaacctgtggaactctgggtaggcttaaatatgtagcaaaagaatagcaaatgttcaaatcagataatgcaaagttgaataattgttcaaagtcaagtaccgtgctgatcctaggctagaacgtactagagacgcgagcctagacacaaacgataccacaagatagcaccggaaacaactcaagcacactatgatatatccaagcgatccaacagataacaagtgattttctcttttccttttttttctgtctttctttcttcttttttttgtttctctcttttttttctctctcttttttgcggcttttcttttcttttagcacctttctgccttttctcacttttttttaatttcttttccagcaaaaacgactcaaggacctgaatgacagattacagggactcaaatgtaaatataaaaattatagggactcaaatgcaaaagaccaaaccaaaaattaggaccatacaaaaatggaatgctcccgtcccatagattccgttttagcaaacagatctccaatttggcattccaaaaattttcaccaaggtgtctagccactcacggtatgcattggaaccgagaggagagggagtcggagtcagggaacaacgccgacttctgtgcggtggaaaactgactatgccaagatggtaagttcggtcttagagggaaacaaaccgacccaatctaatctaatccgcaaacttcctccaataacctgatccgttatcctttctttctccttcctcgcgcaacagatcttcttccttgcgcacaacagaacagcatgcacggcacaacctcgggaccgagacaaccacacggcagaaaccctagatgcaactcaacaacaccaaaaccgaccgacagaaacttctgaaaactagaaaaatggaaccgtagcagcgagccgattccgttttcataggtcccgacgacaacagagacatggtggcggcgacgactgtggtacaaaacgtgactagaactcgaaactctaaatgaactagacgctaagaccaacaacacgacgtgacaatgcaacaaaaattcaacaaaacaaaaactgaatagaacaatgcaatggcacaaatgtggctaggtaacgtacggaatttttttggctattttctagttataggtcaatgaaaactcaccgagcaacaaaagctctgataccacctgatgaaccctgagttccactcgacactcaaggctgttgtttggtccgatctttcggtgagttgatgaaaactacgatttgggagaaacgttgacgatccgactacaaccgtacgagacgttgtgttgcgccttagcgatcaatacacctctccgtgggttgttgatcttgccggtgcagatcaaccttattcctacaatcaaatcgaagaaacaagcaagaacaagataaagcaatctgaattgcagataggaatgaatacacacgataagttggggtttcgaatacaagcagacggacgatctagtcgacacgcgcgctgcaaggaagtagcaatggctaaactttcatctaaacaaaacccgggaaacccagaaggggtacctagctatttaaggatgtgggagaatgacagggagggtcctagggtcgtgctccaccagcttggggcgcaccccacatgggccccacttgggccggggtcccaaacgaagttacaagctcaaaggcccatgataggtgacgcaacaccttgtttctgcaattgcggccaaaagagatggatttcggggatgaggctggatctgttggaaagaggactctgagagctttccatcaagtactcacgggccgaaaacagaggtcgtatgcaaattcggtggccatttgaaatcagcagtgtagcatgtggccgaatcagattccagcacttggaggacttgaacttgatatcgtgctgttcatccatgatgtgagcaacggttgtatccgtagtagccatggtcacatcacccctgatccttgtcgctccacactcatggtacgtcggcactaatgccctcgggcataggtaccgacaaacacagaagcaccctttatttgttgttatgaaaaaactggtttctacaactttgaaaacccaacacatggtttcaacgagtttgcaaaataaaagttgtttttgaaagccgcgatgcaaaatggccgcctttgtcgaagatgtaacctcataaaagggtataatctatctatatttatatttagttgccatgatgcatatctcagttgaccacgggtacctgcaattgtgtcttgggacgaataccggctacacggttccacaggagttggtacgtcctaatttccggtacgtcctaatttcctaggatgcaccctctctggtgtcaccattagtatcagggtgaggtgtgacacctattcctcatacttattccactaagggtatctctttccttgtggaggtgagatctaactttcacaaactttaccgcgacacaccgcaatccttggggttctcacaagcgactcctagtcaactaggagaccgcaatcaccaacaaaaaaaaatgcacccaaagcttgcttggaaatgaactctagtgctcgagaaataatatttgtgcccatacaagaaactcaactcaaatctacacacccaaaagccaaatcacaaagattagagtgcatttaagaggaagcaagagagctcaagaatggaaagttccaaactcacaaatccacaaagattggaaatgaagggctaaccttgtaaagggtttgggtggggatttaaataagcaacccctagatctgtccgttgggtggagattccaggcccacctcggataatctaacttctaggttgcacatttcgatctcagtgtcaggtccccaatagtcaaaaaactcgatccaaggtctttggaaaacactggaccgaatactccgatcgtaacatcagaaaatatgactttaaatcacaagccaaatagagaataaagtttggtaaaacttccaactctctgaggcatccaatagtctgactaagcatcggatatcccgatcacatcggatatcccgacaccaaatttggttcgaaacatagaactaagttcctcaaaaaaattaacactccaatgttcaatatgaggtcggatagtctgatgttgctcaagtgaaaaggcaagaacttttactttgaagtatgacttcaacgatcttggactccatggaaagcttatttcgagtgctattaaaacctatataaaacagggtaaattggaaccatgccattttaattttgtaaagtttgagatatgcca

SEQ ID NO: 27588 - DNA, 22866 bp, Oryza sativa
tgcaaaattataatggcatggttccaaatttacccaaaacatggtccaaaacctttaaaagatgttgaaaaacttgcaaagaaattaggtgtatgtgttatgacatgtgaaacaacctagagttggaattttagtttaggtttttcaactcacataaagataaatcattttgagcacttgagacaaaactaaccaaacacgcttacatccgtcttagtagtcgtcattccaatactcaatctggtctttataaaaataccgggacaggtaaaaggctaagaaaagggatgtttagcttcattataccttttccttgtacttctcttgagtttaactagataatggacatcactatctttaatcatcacttgacttgatatgcatcaacgcatgatgtaccatcacttttatttcttcaagccaattgatgcctttgaacttatggcatccatccaatgcctttttatcagtcactcttcatgtggatcaacacatgattcccatattctttctcttcatcttgaaacatatgtgatttgatctcacttgagcatcaataccatttttatttcttgggatttatttgtttaactcaacttaatgaaattgttggtcccaatgatcccgctatcaacctctacatgttgaccaaccaatcgcatgtaaaatgatatgaataaattgattaacttggattaaacatgtgctgatgtgcataacaagatatatgatatactcccccaacgtgttgcttctaccgtaccctcaattaggaaaatccccttctcttcacccccccctcccggaaccccaacccaaagtgctaacttgaagggcctaccagagttccctggagctagatgctcactaacgatgaatcatggagttcatcggagttgcataagaagatcacctaagtttggatgaggagtgggctcaccgggatgggaggaggaggagaggagagctcatggatctaggtactcagtatcattgcttgtgatggtgggggatcaagttgggacatagctacatagactagctggttccagtggcatcaaatctgataacaaatgaaaactggtagtgatggggcagttcggatggcccatcttgtaatagttgtgggcatccaatgtggtccaaatcaagggtggaaagctaagaggtggtaaactaaatggcattgaatgttaaggggtgagtgaatggggtatgttagataagcggaactgttgagatggtaatatgacttctcccaaattactatattttacacatccaaagatcattatagtatcaagaagtaatgtatacaaagtacagattgacttagagtattacacaaccatgagtatgttcttttttccgaccttagatacataatatacatcacattgctacttggttgatgagcaataaataagcaaaacttcttacacccaatcaaaaagcaaatccacatccaaattttgttaaaatgaaatatacaaatacattgtctgaataacatcaacaaaattgatgtatcttgtacaaccaattagttctaaataactcctaccagcgaagtggaaaactcttatagaagagaaaggacaattcatacatttcttacgtatttctccctacagcttgaggctcttgaggatcatagggagcccgtacttgggacgcagcgtgataacatcagtgggtgcatggacgtacttgggggacaaagtgaaggagaacctctgtaggatcatggcaatgacagccttggcctcgatcattgcaaagttctgcccaatgcatgacctcggtccgctggagaaggagagtagcgcgttggggtgcttcgctgccctcgtcaccccattctcgaacctctccggcctaaactcatccgcatcctccccccacacttccttgtcacggtgaattgttgcgatcgggatcatcaatagtgcaccctcaggcatcttgatgccgccgagctcaatatcagtgccaaccttcctccgtatgagtaagacagggctgtacagccttagggtctctaggaggaacatgttgaccatctttagcttgttgagcatgtcaccagtgggcatctcgtcaccacactccattgcaatctcctcccttagtttctcctaccaatctgggtgcgtgctcagtaggaacatggtctaggtgagcaagtgtgaggtggtgtcatgccctgcaaaaaagaaggtcttgcactcgtcgatgatctcatccatgcttagttgtgggtggctctccctgtgctccggcgcacacgcctccagcagcaacccaagtaggtcattcccatacccaactacatccttgttggcgtgcctggtcttgatgatgtccatgagcatgcccctcaccttcttgtcgagcgaccatgtcttgaagtttttcatggtcggaaggtagctgattcattttcaaaaaaaagcaccgatatattattttgtgttctttctaaatctatttgtatcgggataagttaataatgtgtgtacctaaaccctggaacttgaacagtgaggaaggtggagaaggcaagaaattggagctccctctgtgccaggaagacctgcttcccctctttgtagctgctaccaaacactgtgtgcgagatcacattggcagtgagctcctcgaaacgcctgcttagctcaatctcagcaagaccacccttcgcccctaactccgattcccactccgacatcatggaccgagagcagtcggacatggtcatcgtcatcatcttgagcttgtccatgttaaaggctgggtgaaccaccttgcggtggcgcttccactcatcgccgtcagtgagcacgagccccttgccaagtagacgcacagagtgagggttcgtcaggttcttggggtatatccccgttcgatctgacaatacgccatgtcacctaacaagaccaagtcaaactgccacgtaggcgctaaaccactctcaatactgccttaagaacaaatatgatctggttttgtaagttaagggacgtgctatatctggttctgcggttcaatgacgaatttctaacttggtgacaaattgagggatgtaaagtgcactttttatgcaaatgaaaccgccatcgttcttagcaggccgagctcatttagcccgtaaagcccaagatgctctcgttctcaccaacaagtctctctaggctctcagccaagtcaaccaaaccccgcagctcccaaagttttccaatggcctcctccgtcgtcaccctcaacgtcggcggcgaggtcttccagacaaccgtcgccacgctctcccgcgccggcgcctcctcccctctcgcctcgctcgccccgaccccggcctccgcgccgcacttcctcgaccgcgacccgcgcctcttcgcgaccctcctctccttcctccgccgcggccgcctcgcgccgacgtcgccggactcggatcccccctccccggcgctcctggccgaggcacgccacttcggggtcgagggcgcgctcctcgcctcgctgtcccccgcctccgccttctccccgctggccctgcggccctccgcgctgctcccgctcgccggccgcgtgcccccgtccgcggtggccgtgccgccctccccgcatccggcctctgtcttcgccgcgcatggcggggtcgtcactcggttcgacgccgcgctcgcctcgcgcggcagcgtgctcacgccgctccccgccgtggattccctcgtcgcggtgtcccctacactcgccctcgccggcgcacgcgatttcgcaggggtgcacctctgcctgtacccggatgatgcccccgccacggctcgcgaggtgctttcctggccaggatccccctccgccaccgtgctgtcgatggcagccacttctgccaccgaagtgtcatccccttggctgttcaccagcttcgagtcggcacggcggaactcgagcgctgtagtgacgtttgacatgaattccctctcacctgtggcagaaattggccggaaggaggtgtatggtgcggacgtggaggcagccatcccggcttccaggctcagctggcttggcaggcacaatctcctgctcgccgctgggtcgcactctggtcctgccggagtggtgggggacatttgcctctgggatgttcgggcgagcgcgactgtgccagtgtgggagttaagggagaaggaggactgcttcgcagacattgccgcatcagaggcactgtcatcgttgttcaaggtgggggcagcatccggtgaagtgttcatggctgacttgagaatgctcggtggtggtggcattagcattgaaccgtgggtgtgcattggagatgggcagagagcagcagctgcggcatctgcaggcagaaaggaggggaatggttgcaggattgagtgctatctcaattgggtatttgtggcgcgcggtggagaggttgaggtgtggacacaggtggaattggctcaagaagctggtgggaagaagttgatgaggaggaattgggtggggaatggaccatcctttgtgattgcaggcggaagtggccacgagagtgtgaaggagaagaccaagattgtgagctgggcctttggaggcagcaggatggcattggcgagggatgataagcggtccattgaggtgtgggatagtgcaccggcggctatatctttcaacccctaaccctgaatagaggaagaagactacaaatgtgcaatagtgtacgtcaatttccatttgctggtcttgttcatctataaatgttgccctgtgtcattatgtgttgtttctactagatactttgatccttaaatgcaattcaagaatatcattccattttagttgaacagagtctatggtttgtgaattgtgcctttgctccatgcataccaccagcagctgcaagccacctgcttctgctttactgcatctttaactgattctgattctcagagctgtggagaatttagtagttttggggggtttgggaacagtttttctaggcagaagctgcctgtaatctgtccaaaatgacttttatggactaaattgaccataaacaatgaattattgacactgttttaagtagctctcttccttcgtgtaactgaggtattgaaccagttttaagtagcttctaaaaaccagcactagattcatctagcatcatatatggtcatttgatttaggatctctagaagctcatcacatttgtagcatgacttgagaatctgttacaacacgcattgcagttttctgttttcagaagaggacttgatacatgcttaatcctctgcacagtggtgtccttttagattgttaaatgagcgcatgctatgtagtgcgaatgtacctacatggcatcataagaacaatttaatcataaaacattccatttctagtttttttttattggtatttggttcgtgaattaacagatcccaagatttgatatttgcaaccagctccaacaaaagctatcgaaattgacctcttaagtaaaaataaagatctggagttccatatatagaatattatgtttgttgactgcttgtaatttatatcaaaacctactttaccatcaaatcatttgattgtttaaatatttagtattttgctttctcttgtacatattcagtatgatgtttttctgcccttttcttcactaaccattaccttaaggccctattcggagcaaagaattatggaaaaattattccaacggaaaattcatgtagagaacctttggattgtttcaggtatgttataatatacaaaattttcatttgaatcttttagggactcttggaatatgagctttaaaagatgtaggactaaaataccagtatgccatgccatttcaaagtatatgaatattagtggattgttcatgggaaataaaacatcagaatactggtcgagaacgtttattaacagtatggagagagaaagaaggtctgtgtattgggcttcctaaaaaaaatggcatatataaagagaactctaattagagtaacactaagttaatggcatagcaggaattaattttgatttaattagataaacacagtcacatatctagcttgtgcttgccacctcgattctcggttgactggccactcatgctgaagtagcctgggtagctccgcaaccacttgttcgctgcacacccaatgtctctacatcaggagaagattttcttgtgttagttcgtgcgagcttgttaggtttttgaattatgcatttgtcagtaagttcaattcatggcatcttctgaagtttatgaattcttcattttagctcaatttcaccttggatggagcaagttgggatcttcaggtggtatcataggttactgcccctctacgcaccgccaccgcgaaaccatgacaaagttcccgtcacccattagtcctagtgggatctcgtgtcattctagaactgaagttcgcaagggcgatactttggtcagatatctaaacgactgaaccagaaacctccagtgcagatctgaattttgaagccgaaacttcttacctgaacaacagcacattgtaggcccattagatgttgctttgcaaagttctacaagttgcaaaatgattattttgagtaatagcatatgcactactgaaataatgatagtagagcaatatatgaattggcattaacactccagatattatgcagtaaatcaggcaacaggatcagccgattttaatgttaagaaatattatataccttatgaattcagatgcgattttgagattctttgagagattgctccatcactcttatatggttaatattcttaaccttcttgggatcgctcctatacccgaagaacatggtacattgttatatgtgttccttaatccctttttatgcctttacccttgagaatcgcattttaattttatccaatgcgagtagataatttgtggcacagcccaagttattagaagaatcggaggtatttacccgagacttttggacatctgccatttgacattgcaaagcaccaaggtgacttgatcattcctgctaaacattgactgaatcagcattagacaggaagcgataaacaagaaatttcataagctgttatatcatccttgttgaattgttgaggtttaccttgatagcctgacccctgcaatagatttaatgtcaaatgtataataatataagcaaaagaattctacttaagctcaccaattctttgctctactgaatccatcaagaacaaattggaatcagggaccaaagaaaggatttaccaaatcaagctggtgaaagaaaggagcaattaattaggatggacaaccgatttctactttatatttaccctatttacagcatccaatatggtaaagaaaaaaatttgaatcagctttaacttttttcgatccccattatttttaccggaacaacattatgctgatgatctatccaatctttcgattttcgttacacgattacataaggattgtgtgcatgcttacacgtatacgctaacagaatgggatcctatttatgtgtatatatagcaagctggaagaccgcccgggagcgtatataagctgtggcaactatcacaggaaacagaacaactccattcaggttgcaggagaagccaggacgagaatccatggccatgggcgacttcctaccggcctccaccgccgctgccttcttcgtcctcttgctcggtgtcaatggtaatcctatctaccagaaaatctatctgcaaatagtccttttcagtctgatggatctactggtcacttgtgtttctatagtagtaatatatatagttgaatggtttgccgaatcgccgtgaaatatgtgtccaaatgggccatgtatgtagaaatcctgataccggcatgggcgtgagatgcggtcctggacaacttgcttccgtgcttgcgcatggctgccctgttcattcgcatctcaggaacttcatacttggaaacggtccgttttttgtgtttgcctcttcttgatgccagaaagattctgagtaggttttgaaaacaaagtgtttctcaaaacttaaggctggttctcaaaacgacatcctgtcttttagttactcgtaatgattagagcaagtttaatagtagagctaactattgactattaggctgtgttctttcctcaaggttcccaacctcacatctctcgtttttcgcacacatacttcacaaactgttaaatggtgcgttttttgcaataaaaattccatacaaaaattgttgtaaaaaaatcatataaatcattttttaattttttaagctaatacttaattaatcattcgttaatttgtcgctatctttttgctcaaagaaatacagtcttagcctatgttagagttaacttgtataataggctaactatgaggttggctctatttttcctctcatatctctttctttcaatatgagtttaatataaatatcttgaagaatgtgtagaactaactcttgtatgagagtaaacactcctcgcttttctttctctttctttcacataagcttataattagcttatagcccactattatccttgctttcacaggtcgatgaacctacaatgattccctttattgttgactcgctgagtgttattcgcataatttttatttttcagttatcgagtgtataagcgcatgaattttttagttctttaatattgcatccaatctactcataattgacatgattataagacgtatggacgctctactcctgttttttttttttggacttccatggttcatgcttttcatgcacgtccaaaatccaaacgtgcacacacagtgatcgcactcgttccaaaacatacacgcacagtgatcactgtccctgcctctcttgatttgtttgttttcgtgctctttgctacgagtatgagataatctttgttgtacataagcgggcagccatatgtgtttcttcttcttgagatgatttgcttcttccctctgttttgcttccgatgactgtcaacccttttagtgcctatcaaaaccaatagtcacattgtaaaatcgtaactcatgcgtgaccatatacaagcatctataaaagggtattattttattcaagaaaatgaaatatgtaagtttgataaaagagcaaaatgaaatataagtatgcttgcataatcagcattcacaccatacgcatgcccgggagcatatcacgtgcagttgtgcactaacaaatgtcataaaaagatcttaaaaaaactatatatgtgtacttctaatattaccccacctatatatgaaattccaacttcaaattcgtaacgcatagggaacagaaaagagagaaatctaacaaatatatttactcttgaaattatcagattttttattgctgaaataaaataaatttgaaattgggattttatatataggttaagtaagattagaagtatatgtacatatttttaagtttttttggcatttgttttttttaggggactgctaataactctattcaagccacgttaagattcttacaatcatcctcaagaaaagataaaatgaaaaccggagcgcaggttaacaactgcaccttcctttttggcatttgttagttggtgtgatttgtgcaacgagtgtatccaaaacttttttgcgcatagtatatgttcctcgcgtgccgacactggctgtagctaggtagcatgtaccacaagcatgtgctgttccccttccagccaggataggtaattaaggtaagaaattcagctggagcccaggatcatgcaaataaccagtagtggttcatgacaaccaaactcaccatttttttaaaaaaaaatcacttgttaagtcctaaaaattgatgtatcaagatttccaacagtggattgattggaatttcgacacattattgcgaatgacttcatcaggtgcagcggccgtcaacttcacgttccatttccataacaactgcccggagaccgtctggccagcggcgctgtcctcggcgggccgcccgccgttcccgacgaccggcttcgcgctgccgccgggcgcctccctctccgtcgccggcgtcacagccacgtggtcgggccgggtgtggggacgccaccggtgcgccacgggcggcggccgcttctcctgcgagtccggcgactgcgggacggggcaggtcgcgtgcaacggcgccggcggggcgccgccggccaccctcgccgagttcaccctcggcggcggcggaggcggcgccggcgccctcagcgacttctacgacgtcagcaacgtcgacggcttcaacctgccggtcgaggtgcgcccggagctgttggagcggcggcaggagggcgccgccgccgcgctgtgccggacgacggcgtgccctgcggacatcaaccgcgtgtgcccgagcgagctggcggtgcgagcggcagatcgcggcggtgcggcggcgtcggcggtggtggcgtgcaagagcgcgtgcctggcgttcgggacggacgagcagtgctgccgcgggcggttcgcgtcgccggacaagtgcgctccgagcgagtactcgaggctgttcaaggcgcagtgcccgcaggcgtacagctacgcgttcgacgaccggagcagcaccttcacctgcgccaacgccaccggctaccgcatcaccttttgccccgccgccgccgccaaaaactaactaatttagcagcctgcactgcaggccggcgatcgatcactcaaccgattgattagtactggaaggaacttgaattcttagaaagacggtgtagtcatgacgtatacatgtatgtttcggagcatctctcaagtttcgatcattatttggaaccttccatgggaataaaatgaatacaattttagcatctgattatgtagaatgcaaatgcgtggcataatcaattgcctaggtggtctctgacgtcctctaacgcggtaacacctgaagagaagggatgcaggtcctctgcagtactgctcactgacatgtgggccccaccccctcgggcccacatgtcagctgcacatgcagtactgcagaggatctcaattggaagagaagtggtagaagcgaggatcaaggatcttcattcttgctaacccgagttcgaaccagcaaggaaaccaaactcactagaggaggaagaatagggggaccgggcctaatcggcgcctgggcacacgcccttgccccttctactcctctagtcctgtcccaaaactgaaaataaaaaaccgaccaaaagaaaaaaaaagatccaccccacccggcgcctctccctctttctcttcctcacgcgccgcccttccccaccgctttaagtggcgacggcgccggtccccttctcggcgctccctcggcgctccccccaccccccccccccccgcggctccctcccttcctttcttctattggctaatccctaacattattttcctgatttttggttttttttaataaatcacaaattcaacaatgttgaattcaaatttacttttgtgtttgccccatgtgccggaccaatattgagatgaaaattggtttcacctaaggatagaaatgctattaatttttctctgggtaagaatttgttggttcaccacctagagtactttgacctatttgtcatgacatgtaggacacgtataatccacatatttagtgatggtgtgtacatgtatatatcactagctctcccactgttggcaaatgcacaatgacaataggtacaatccggtaatatatgttattattttagcagtaatcatttttcatgcattaattggttgatgtatgcattgcccatgtgccggaccaaaattattgagatgaaaattcgttttcaccttgcacaatgcattttccttgtaggttcttattggtcacacggtgacatattttttgggggcaactttctatgtgttgctagtggtaacggtactctatttggcacctcttctctagaaaatccacttcttgcaacaagagaggatcaacaatgaaatgtgagtgttgataaactaaccatgttttttttacaggatagtaatgcctttttattaaagttgtgtagtacaatttcttttagaaacaaatgtttcttgataactatgaactttggtgtaagttttaatagctatgggtatggatgtcatcatatttggtatagaggtcacaatattttgttatttttgtacatgaagttatgcatggtgcctgacttatgttttctataacatggttactcagttacaattacatgtgtctttgcccctgcattaacacaacctatacgtagtttagatgtttttgcaataacacaaaccttactttgtagtaacatattttattttttgcagcaactcatctatgtgcttatctatttttcatgcaatgggttcagttgttaaagatggcaagcccttgaagttagtaaaggttgtgaacagagatggtgataacttggaggtttcttttgacccaacccaaactcggcctactgtgcttgcaacggaatgggagaggagggtgagccagtagcagtagcgatgggagggggagaggagagtgacgcagtgacagtggtgatggaagggaaagaggagaggcaaccacctgcataagtaaaaggtcaaaagaaatcacagcatccattgcgttatagaaacaagcaaacttgtaaaagaggaagggtcaagctcaagaagaagacaataactttatggaaacagcttgtcaggtgcctataagtttcttttttttcagcatacgatttgttttctgcaataactacaccatatttttgctaaaggaaaaagtacgaattaccccctcgaactatcgcggtcatctgaattacccccctgaaccacaaaaccggacattcttcacccccaactatgtaaaccggacgaattaccccctcgacccaatccacggtggttttggtctacgtggcgtacacgtggcagtccagtcactaatagtagcaaccttccccttcccctttgaaacaaagtagcatgtgatttccctacacctcagctacatgaaagtatagataaaaaaaaagattagtgtcacagccagccactatccaaccaaaagaaaaggagagtgtaaaaaaaacaaagttacatttaatttccgaaaagagatagagccatcttatttttgttgatttcgtcagattctcaattttgtcaataagattggagttgaaaaattgtgagcgtggtgtctcggtgttcgtgatcatagacttgcacaacaggttgtcaaggtaatacacctacaaacaaaaaaaagcacaaaatgtttgttactacaaagtaaactacattgttactacataacatatctaagtattgctacagtgttacttcaagcaagcaagcaaaaatattagaatgtgataacaaattgaccgtacacaagaaagaaatgaatgttttaagttactgcaaattaaggtggatgttactgcaagctaatagatgtgatactgcaaataaataagcattaaggttgccatgaaaagatgatgaaaattaccacaaggaaagcagtgcagccgtaaacaatactcctcttgccactcttccgcctttgtagagggttatgtctttgtactgctctaagtctttgctcaccatgttgactacatttcctgtgatgtctgtgctctagtctagagccaacaacttgctaaacaggatcatcataatacactgcattgtgaaattgtcagtccccccccccttcgttaatcctatccagaatggataaactagaaattttctctttccttccaagacaaaattcttccttgataggacccaatggagtagtgtcagacgctattggtagatcaaagtgaccattctgtagccccatcacacaatgcacaacataaggagtcactggtaacttcccacaaccaccatgatcaagacacatagagtagggtcaagacaattcattagatattcaatgagttccctggatcaaataccattcatccgaaacttgaaaacccaatcaaaacccaaatcatgcaatctatccctctgaggtggcttcaacaaactaaccttttcaaggatggaattagactgtcatctagtggtcacagaaaaatgataacgcttcttgactgcttgcacctccttagtcaacttatgctttgaagcaaccttctttttaggaccttgcattgcttctgtcttcctagtctgagctacctttcgcttgatctatagcaaaaggacaagagaaaaacaacaagttaacatgatgtgcatatcatgcaaaaaaacataatgccctgttcttttctccaacaaaagttggttaaacttttggatactcgtggtacgcttttcaaactgctaaacggtatatatttcgtgcgaaaactttctatatgaatatagaaatttgttttaaaatataagattaatccattttttaagtttgtaataattaaaacttaattaatcacatgttattaccaccccgttttgtgtgaaacacttaatctttatcttcatcttcatcttcaggagattcaaaagaccacctctttttaggaccttgcattgaatatgtcttagcaaaaggacaagagaaaaacaacaagtcaacatgatgtgcatgtcatgctaaaaaacatgatgtgctaaagaggaccgcttgcataatattatcaccataatataaatcgatgatgtggcctaccaccacccacacgccccttcctccctctctctctctccaccgccccaacctctctccctcctcccacctcatctccaccgccctaggctcttctctccgcctctctcacacctactccctcctctcggccgccggctaccgtcgcctcctccactgctcccctacctactcctgcgtttctcggctctgccattcccccacccacccatgcgcctctccctcctcttcctcagcaggcacatgaggaggagactgtgacggtgacgatggccacggtaatgactatgacggtgacgcgaggtgcgcaggcggcggttccatccgccggaggtccacgggcagcagatccggctgcgggaggggtagcggtccttggcgatggcggctgtcggtacgatgctcaatctgcttcggactcggactctgtcggtctgaccgggcacatgcctgtggtcagaccagccctactagccgatcagactagccacacaactgtggtctgaccggccccatgcagaaaaacccaacgcttttcaaactttgatagtttttccctatttcgttcaaaggtgtcaattttggtgtaaacatttggtgatgtccgcaaaggtgagaacaaccacggctcggtgatggctaccacgacctcgaccacgcgtagctgtgacgaggatgtgctgcttcctgttgcttagtgatgaccgcgacggtgttttgctgtttcccattgatgcttgctactgctgtgttgattcttgtgttcatgtacttcgatgtttgctgctgttgtgttgatggagtattgctgatgctaatgcttgctactactgtggaagtacattttcttcttttttttttgtgaaaatacatcttaactggcaggtgacttaggggcccgctggcaggtctcttaatacctccatcggtgaaaattggtctttgcaagcagttgcgagtccgctagcgaaaattgacgattttctaaggcctttagttgcacgcggctaactaagccgccactgagaaccagttttggtcgccaacaaaaccaattttgtagtagtgtctcttgttgatagacttctagcaatacctaaaaatttgttgtgtgtattcgttgccaccataatttaaataatgttacgtgaagatatatatcaaccactccacgcatgtgattcgatgtcgatgacatgcgcaatgcctgtataaacttcaaaacgttaattttctctccttttttttttctgaaaccgaccttttcccttttccgttattaaacaaatccatgttttggggattccttttctttttctttttttccctttttttgcaaaatgctactgatctatcaaaagaaccatgatgccatatgcgatataaattttttaactaacggaaaaccactttgcacagccgaacgacacgcactttggcatgtgtggaatggggattatgaaagttttctttttattttttttggaaggaaggggattatgaaagctagtagtatcattcttaccatttgcatttgcacagagattttgtcgttttccgttatcatatttttaaactgttaaatggtgtattcattaaaattttttctataaaatattgttttaaaaaaaatcaaacgaacctttagtaaagtttgtaataattaacacataattatttatatgctaatcttatcttattttacatgccgccgaaaagcttaaccaccatgaacatttaaactagcccttaatcaagtcatatatccaacttctgaattacgtcctgtggaaaagggacaatagctcatttgaccctactttagagtttaactattaatttgaccctacctttttaagtttactcatttggtcctgtttttcaatatcgaagttgtcatttgatcctatttttgctacatcgtgagtgtttcatttaaaaaaaaaggaaaaaacatacaagcccaagtgactaaaatgcccttgaatacatcaaccctatcctctactactcatttgttcattccttatcctctctctctcctctctctctcagcagagcacaaagggcaggaggggagcgacggctcaacgacgactacggaggggcggcggcaacggggcagcgtcggcttggcgatgaggagggccgccgctagcggctgcggcagcagctcagcggtggctgtgagaggcggcgttggcacagtgacgaggaggaccaccgatgcctgctgtggaggggcggcgttggctcagtgatgaggaccatcggtgccctgtgaacttgccacccatggtgtctaactcgagctcgctcgaagctgcccgtgccgtctccgccacaacccacgagctcgcttttcacccacaatgaggaggaaggtgcagcatctcgccgatttgtagcgcggtgagaagagaggtgcggcgattcgcccggcgctcgacgcgaagaagaaagggtacggttcatttcttctgcacaaaattggaccaaaggagaaaaataactttgggataataaggtcaaataagtaagggtaaaaatggtattttaggcttttttttaacatcgttaaatgtccttaacagaaaaagggtcggaatgtagttttgattttgaaagggagggtcaagtgagcaaagtaacgagtaacgagaacagggttgttaaatcgatagttagatctccaaatagggctaatgtgcaattctccctagggaaaaatagggtgctaaacacgctgtcacacctcatatacagtacatatcgtaacggtaatgcatgcttgaatagctgacgttcggcttgtgtttcaattaagaataccgacagctgacgtgccagggttcaagtcttcgttttgagctggcaggagtagcaaagaacctagcaaccataccgccgcgctggccggaccagccgtacgccgccaccggctgcggctcatgcgcggttccgctctctgctcttggtctcgagtctcgacagcgacccggttggtcaaccacttccacgccaagtcgaaaccaccccccacccgcaccatcctcaccgcccgtccgcgccgtgcacgctcccagatcatgccacgtgggtgggccccacccccacccgcgccgcacccaatggccgcctccctcttccccgacaagccttccgcctctctcctgcctcctccccacttcccttcccgcaccgtggtctcctcctcctcctcctctccacccgcatccgtggctccggttgcgctgctcgggagggagggagggttactaggaggttgctggagcggccgatgagaggggccagcggcggcggcgagggattcgtcggcgcctcttccggtgattcccctctccccttccccttgtttatcgcttctccgtgccgttgcccaggtgcgaaggcttctgggaacttttactgctgtgttcgtgctgcttcgtttgtttcggacagtttcatagtctcattctctgctgtttcgtcctgcgccgtgtcggtgcgcttgcgctgcggtatggtccctgcggcctggttagggtttggtgtcgaggtggtcgggggagtcttagggagggcggcattgttgtatggaaagctgggggttcggcgatgattccggagcgcccgttagggtttatgcgagcttggtgcttctttttcgcgaatttttgttctactgtattaataattctgtcagtaagagaaacttagcaacctttgttttgctttcttgtgtttgggtgtaattccattttttgggaggaaagagacagggagaactgggcatatttggggaagtatggtgtttcctgccggtccccactcttttgactgaatagttgtggactttgacattcagttctcaggcttgaaagctcgtccattttattgattttctcttcttatattttctagtgctacaaaatgtggcacctgtaacctgttagttgtgataatggaatgaactagggaggttcctgctagtatttgtcgccaccgagtgtttgttctcttcaaattagttccttgtacacaaaatgtccttttgattatcatatgtgattccttgtacatttgattgcactacatgttttgcgacatgattttcatcctatcttgagtaatacacaaaaatgttggccagcaagattattataatgtgactattagaacttagaagcttgataagaaaaatggagatcaattgtaaagctataaaggacatgctgggttccactgatgttctggacttctggtgttatcaaaaagtgctccctgtgacctttgaagctgcattatttagtcaagtatttcttggatggtggaattttaattcattatgtaacttttttgataatggagacaatcctagtccctacattgagatgcatacggcttattgctttacgtaactgtgcaatactttgttgtagtttcaaacaatattagcctaccaaatgagggtactagccctagaggaacagataatgctgaatgttctgagacatcttcagacaggtcgaattcggaaagcataaaacctgaagaatgtgcaatgccatcttcaatatttgataagaagatttccataaaaaagaaggtaagtttatcttcacctgtgttagataattctattggggtctctttgctggtgcttgcatgatgacaacatgcaatttatgtggcgcttggcacaaatatcgcattttttctgttcgctgtacagatgacataatgaattattaattctcataattattgctattaagtcaactgtacaccgccatggagtcatggatatgcaatgtgatattcattttactgaaaaactggatcaccatggataagaatagtgcaatgtttcttattctgtgaacgatgttaatcaatactgcagtacagtattttggactgatatgccagtataaaaaaagctacaaaatatactctctccgtttcaggttataaaacgttttgactttggttaaagtccaactgctttaactttgaccaaatttatagagaaaagtagtaacattttcaacccaagacatatttattatgaaaatatatccaattattgatttgatgaatctaatttagtattataaatattactatatttgtctataaactgttcacatcaactggaagacaaggccttgcgagcttctgtttgtaatttctatctgtaatattgacatgtttcccaaattagccatgtacacctaatattcattcttttctgaaacgtgatgatgacatggaatgcttagagttatgataacattaactctgttgatttttaaggcataattttattttaaaaagtcttctagatcaaatttcgaccgttggtttgtctaaagtatttctttaatagctataaaaccaattttgtgtgaaagcattttcgaatacaaatctatatgtataacattcatacaataaaatatctcttcttaatgaaatagaaagcacagttctccttcgttttcgagaaaaaaaatacttctaaggtgatacttttcgatcttgtaaaattcaacagagggagtacatagttctcctgcatttttgagaaaaaaaaaacttctttggtgatacttttcgatcttgtaaaattcaacagagggagtacattacgacatcatgccctcttgtcaccaatgttctaaaaattggcattagtcggggctaggcagcgattcggtactagagacgtgcagtgattcggtacaagtctggacttttgtggtttatttatggaagcatggctataatggtttagttatgcgaaatcaggaaacatttctaagttaggtaggctagttaaccttggtatgcatttttgttgggccaattatctattatgagtttgctccatcttgattatgcaagacttggagccttcgtgtgaccatactagtcagaaacaacatctgaagttcatgctagatgccatagatcttccctgcttttatttggaacaataaaatgacacaaaacattttaccagtacaaactaatagctaaaatttatgccaagcaatgtaacttttgaatgtttaaactttctaattataattacagagatttagtgtttttagtattagttatctcaactgtttggttaacattcatagtgtcaaactccttgtttaacattcactcctttatgcactttaacaaatggcatattttctattcttctgatccttatgtcttcactgcagctcagattgttaagtcgaatggctatactgaaagatgatggaactgtagaagttgatatccccactaatgctgaggctgcatctcttgacctttcttcaaatgattactgtaatgaagcctttagtggggaaccattggcatcttcagatttccagcacagacctcctatgcaaattgttatgctcattgttggtactagaggagatgtgcagccttttatagctataggaaaacgattgcaggttggcatgctattcaatcctttttgataatctgtggctactgcttctattgactgttgcttttgcagtggtaccgtcaatacttggttttgattctagtccttacacagtagtgtgttgaactgtcagtagatttcctgctttcccagattagatgaaatgtttgatacatggaagtagataccatgtcagctcagagtttaaaattttcgttgacctgcttggtgcatgaaactgtgtggctaagttatgcaaacatgcaaggtagttattaagttcttgtattgtttatttttactaacaatttctgcttcatgtgaagtataattaataaattctattttaaaagctctatttggtgcattttcctctatattagcacaaacatgttgtcatggtttatgatttaacgtcaaaaatgcataataagtgagctatcacaaattgatgattttcataatgcattttattaattgtttatcggagttaagattttactcctgtggctaggtcctcttaagaatcttgtagaatattcttattgagctgccataattcttaggaataagtctgaacttgactcgagttccaaagacatcattaaccctcaaacatcaattgcacccctgaactttctcatgccagactcctaactcctgctgaaaccatctaattttcttccaacatggccatcttctcagcaatgctatatgtgcaggtgtaagaagtgggtcattttctcagttcatctgtagaagttatattgttttgtttctatcaatgttatttgaaactggtttcttttttcaagaaatccagaattcttgattcattcaaccaaagctaacaaaaacattctttccttttccagtttagcaacctcgacattaatttatcaaatgcagtctcctctcacaacttgtttcgtatgagcttcagctatcttgactctatgtgctatcaagcgagctcgttctttgttccccatcctcaaatttctgagtcatgttagtcaagaaaagttgattcaagaaggggtgtttctctttactttataccacatccaaagtgcaacccccagcctacaagttcagtcaaaacttcatatccagatatgcaaaaatcaaccatgaaattagtccatcactgcatcttaactcaaataccaaatcaaaaggaaaatttctgaacaaccctgcttacccctgacctcatgcatgttagacatctccagggatttaaattgctccatgagatccatattgatgtcttacatgctgcccttgccccatatgcagccgatgaaggcctgaggtccttgacctgccagagcttacgacttgctttgcctgattgaatctgttgaaacctcaacagttcgatgaatggtggctaggttttttggagcaatgtactttcccaactaagcttcacaactagccaccgccccctctcatgcctgcacgttttattcccatgccaatgtgaactttgcatcaaagtggatgaacagggtggccaggttgacagagtacctgattacgagatggttttaatgttcagtttatcagttattcatttggtatgaccatatgacagagttcagggggtggata

SEQ ID NO: 27589 - DNA, 1262 bp, Oryza sativa
  unsure (1)..(1262): unsure at all n locations
cttttttagaagagtatagattagaaaaaatataactcccatcttttattatgtttggtaatataagtagtatttacacttcttctctttataggatccagtaaagctaagacctctctgtgtcttgatgcataatgtaagaactcatgcttattgcaatctggttgaataaacaagcaattgcacttattttcacacttaaattaacaaaatgcataaatagcaaaacacaaaaacagaaataattttctgagattttagttacaaatttaactcatctttaatcttttatcatgctgagcatgaaacaagcaaagatttttctgatataaaacatattatcgtttctacagacagtttttttgtatgtaggaagtgcctccagtaaaaataataatttttttgaattcagataaaatttgttcaaattcaaatttgtcagaaaaaatcattcaatattttttcatttcgaaatgtaaaacctgtatctatctatgtcttcttgattatactggttgtagacaggtaaattgcataatgctaagtgctaattgttcacttccagttaaatgaaaagtttatcattcttctatgcacatcccataacaattacttctattgcagatctatggccatcgtgttagactggcaactcatgccaacttcaaggattttgttgtgacggctggcctggagttttatcccctaagcggagacccaaaacttcttgcaggatgtatgttaaatatcgtgctcaaatccatttttcagtttatagaacctgtttagtattggatctcgcataacagtacagattggtaatatgagcagacatggtgaagaataaagggttcttgcctgcaactccatcagaaatccctatccagcggaaggagattaaagagattatattctccttgcttcctgcttgcaaagatcccgatactgatantggtgctcctttcaatgtaaatgctataatagctaatcctgcagcgtacggtaatagttatttttacaatgtggtttgtcaattatttactttcgttgaatttgtgcttatattatgtctttaggataggacattcatcattgaccagtcagccagtggctattctctcatgctattggcgaaagctctgtggccagctggagaaattgaggaaactagattcttgtttcttcttgtatacctcctgtcatgacatgaaggagagtcctaccatttcattctacgagatgagctgaacaaactaactggc

SEQ ID NO: 27590 - DNA, 1051 bp, Oryza sativa
caagtatgttgttgggaaggaagacaatttgccatggaaattctaaaatatttgttgcatattgatgtttgcacaagctatagggaggatctctattttggcaatgttatttcgtaggccagaaacttccccaaagagctccaggagaacttttaggttttcaatctccgtggagtctggctttacaaagaatgctacatcatccgcaaatagggagattctgaatctcaaatttccaattccaaggggagagattacccttgattgttcagctagtttcatgatattattgagtggctccattgcaatgatgaagagaaaaggggagagagggtcaccccgtcttaggcctcttgcatgtttaatgggctgcccaggaatgccaattacgagcacttttgaactagacttttggaagagtgtcgaaatcccatttctccttctagtgccaaaacctaattgtgtcagaacttcaatgtgatattgctagcttacagaatcaaaagcctttgaaatatctaatttgagaatgagtgttttgaattttttcctatgaagccttttgaccaagttctggacatacatgaaattgtcatggattgatcttttccttatgaaggctctttgattgatgttaatcatctcatgcattgtcggagtgagtccattggccagaatcttagagacaatctttgcaaagctgtgtactaacttattggcctgtaatggttaggtgaagtagcatcttcttttttcgggataaagcaaatatgagcataattcagatcatccaattggtttaggttatgattgatgaaagattggactgcctttaggaggtcaagcttgatgcagtttcaaagaatttaccaataaaaccatcaggtccaggagctttctgtgcctggatagatttgaacgcctgctctaactctgctagagtgatatcttcttcctggtcattaaggtcaaactattgcaagctgatttgggtccaatttaaagttgattgacttatgtgggtttgcccaactctttgatgaaagaaatg

SEQ ID NO: 27591 - DNA, 7720 bp, Oryza sativa
tagtctagatctctgtcgaattttgattttattgagcccaagaattttgtgcttcaagctactgtgcagaatttgttcttcgatagaaaaggttcatgatttctggacaacacctagttggaagataacctcgtttgtgatggccagttgaagtattatgtctcctacctgtttcgctacccatcttcttatatctcgtgccaaacgtttcagtttcatgttaggaattgctaaagggtttgtggagttgattggtctttcccaggagcttgtgaccatttcttgaaaggaatggtagcttaacctaaagctctcgaaacagaaatggcttggcctaggggatccatcactgccctacaaaaggaggggagcatggtctgaacaggagctggataggggcaatagtcaagcaaactcgtagggcaaatctcaatccatgaaatagaaagctctgtcaaattttatatctcaatccatgaaatagaaagctctgtcaaattttatttgagttgggttgcttgaggtccctgcccaagtgaacattcttccctggagagtaagcacttttatttgcaaatgaccaatggcccatataaacctttgcatcatcctcaaatcaattctcgagttgtttttgtcataggttttgtagattggattaaaatctccaattattaaccaagaaggtaaaacgatgctcatgttgtgctcaagctcttgtagaaaagcgagtttctctgcatcactttgtgggccataaacagctatgattggccaaaatgtttgttcttctctcattgtgatggtagcagtgagggagaaaactcccaatgtgacagccgttaaccgaaagaaattctcatcaactgcaaggattatgcctcctcttattccttgggctggaaggaaaacaaaagtattccgaaatctacttcccatagattgaacaatgcagggtgtgttcacctcctgaattttagtttcctacaaacagacaatcgaggcacaatgttggttgatcaggagtctcagagcttccttcttggtcggtgcatttaatcccctaacattctaattaaatattttgcagtgtcgttaagccattaggaaacaaaataaggccactaagagcatccaagcatagcacaagggagaacaaacagacaaggaaaggtttcaagagcaagagcagcttaggtttcttctagcagtattcacagttggagatagcgcgggagaagaaaactgtactcatgtgaagatacagaagtgaaacatgcttagaacaagaataacagctttaaggtctttgcaacaacatccatagatagtgcacttcttaacatagcggggaaggccttatagccttgttggtgcatcaaaactacataacacatcatacaccaaaaacattccaggttcctagaggtttgcatcacacctcctgacttgatcactgggggtttgccgtccattatttatctaggtgcctactaggttggttgcagagtagcttcatgctggcagatcaattgtctacgtcttggcaactttgaccttgatctgtttgcagccatccatctgcgcaacgtgagtgacttcttgaaacattgtaaataaagttttttttgacattctcatcaaaagagtcactctcattcatgataacaaatttcttagaaaggatttcttgagctatggtttcaattttacatccattctttcttttcttttcaaccctttcgctgtgcctttgagtagaattaagggtcacctttgggcgatgggctcggatgcgtccaagcgacagacttgggagtagtgggacctagactggcgtcaagagggatgccaccatatccccaactatatccttttcaatcgtgctggctctcaggatggattcctgccttggttcataggttggcgatgcctcgtcatcagcattcccatccacggagaagttcagttggggtaggtttgcctcaaccagcatcgaatcatcatgaaccaactagttcgctggaacttcctaatggagaaaaaagaactcagttgggggcaaggagactggaataagaagagctagtgacccgtcattgggactcttgctgcggcgtgaagaacgaggcttgtaggggggagccagcagatgggagagagaaggcagagctagtgttttagagctgcgtcatggtgaggtaggataaagagaaggtctcacctctccgtgctctttggatcggcgattgtgacccatggagatcgatggctcccttgctctctgcctgccatgatttttcctggttgtagtagctgtgctcatcacccctatgcactctgccgctcgagcagccagtgatatagccctagagagagcacgagcgtctcctgtggcatggtcttggtcgcccaccgccaccatctgggtcatcctccaggcccctcaccgcgctcagctccggcttgcatggaataggaagtggacacgagtgcgtgcgagaggcatcgtcctagaccacgtaggtccattcataggtcttgtagagcatgggttggaggtcttctagggtgtctaggtggaggatgaccgggtaggtccatcccccttcagtctcggcaatggtgggttgcatagcgggtcgatgtccaggaatggcatgtcaatggggatcagctcttcatctacattggagacgcccagccaagcttcttcttgcatccgcttcagtctcaatgaagttgatggagcacttgggctcgacaagcttcgccgtcaccccctcagtgtgaccatgcatcgggatcccctcaatgcataggcgcacacggtagtgacagctagaaggtctgatgaccctcatggtgtgagtcccaagctcggagatggtaggaacagctagaagagcggtcaagccgtagagtgcacggaataaagtccctatcagcaggcctagccaatgtgaggaaggtagcctcatcaacgcagtcactgtggttgtccaagcaccacgcaatgaaggagcagcacgagaacttttgccgaagcctctcgacctcgtcagttgcagccactgtcaccgtggctgccactagccttctttccaatagttcatccatcgcaaccggggttccacgaggggcggccactcgagaatccggcagggccttcttggtgaccgaaggttggtgggggagaggtgggaactgagagggatttgggagaagaggggggagcaagcaaggtggcaggtgaactttgtcccctactcttcgcttggagcaattaaggacttcatgtccaatccctctacaaaaccagcgtttgaagggctctctgcaatctttaattttgtgatctggagcaaggcatctgaaacactttccttccatatgtttaaagaaacgagctcttccttgcttgtgttggtcctgtggatctgcttgagcactaagggattgctgtcttctccactagtgttttgctttgacttctttccactagggatctgagataatttgggaggatcttttaatctactgagatggaggatgtgacgaggtagagattacacttccgctcttgagtactctaggcgtatcactagcgagaggcaatttgcttcgcctggtagataacctcttgctcacaagcaaactttggggggcagcagctaaaggaagagagtcactggctgcaattgaaacctaactgactggggtcagtggagcattgatgctttcagcaggagtaatcaagacttctttgaacgttttgtagaaccgctgctagggatggttctggatttgctcatcacgtggaggaggcgctaggctttccaggtgtgaaaccagatctagatctgaggggaagagtggcttaccttgtggtggaagacgacattcaagacctgagagaaggtttgagatgttacggggtggagagaagttgggcaggagagaggtctggaggtactggctggccggaggtgggggtggaggtggtggcgacagctagttgctggtgtcgagggtgggtgtctgggctaggggacgacatatttattgctactccctccgtctcagaatataacaacctagcaccggatgggatgtattctagtactatgaatctggacagccccctgtccagattcgtattactatgatgcgtcccatccgatcctagattgctatattctaggacggagggagtaatcacttatcatgtcattagtttggtgggctagggcctctagctatagctcaccacaaatggaatccattttttttcttaggccaagtgctcccttagaaactgttcaagccagtctcctactcaagtatagcaaaccaaacaagtctggatcaaccaaaatccaacaaaccaaactcatcccatatcgaagaagaaaacaaaaagaaaaaggtagcacaagatctgcaactaggaatcacgtgtacaccttgtcgtcatctgcctgctagcactagtagccacaagatagcacattgtatggaaaattaattcaaccgggtaggttaggaggccgatgttttggtgcgtacgtacaaggatgtcaagcttgccgccgaacatggcggcgaccctgccggcgatcgcctccgggtcagcgcgcacctacgcgtcggacggagacggtgacggcgagcttcttggctctccactcctccagacacctgttcagggtagcctcgttccgggcgcacgtgtgcaccgtggcgccgaagctcgccagttcctccacgatggcgcgcctggatgatgcatttatacatgcttaatcagttaatctgctgccatcgatttaactagcatctactaatacgccgaagcaacgattcgatgacttggtgaacttattcatagtataattagatgttaaaagttaattagaatcaataacaatttaacactggctgaagagctagataattaagagcacaatctgaagagatagatctgtttcactcttcaattctgaaaacagatcgatgggaaagcttggattcggcgaaggaagacgaattaattacccgattcctttgctgccaccggtgacgagagctgtggcgccggcaaggctccaccgcccgacctccggcctgctgcttgtggacatatcggcgtgcctccggtttgtgcgtcagacttgtgtgttagtgagacagcttgcagttgcagcacagggtcgagtacttctaaaggcgtaaagcattagccgtctgcactaggtgcttgtctagtccgctggccctgtccgcctccttgtgtccatctcatgaatatctttgacgtgtatttgttcagatttttctttaaaaaatactattttttatgggaaaagagagtatagcatatatcggcttgtcctgagttatccattgactttagacttgtttagttctctgagacaactccgcatccgctgtccactaaagaaacgggatcggttatctgtaatgggtttaaagcatcatctctttcggacagggcacccgtcactaagcaaagatcagtaatgtgagaaaatatcttaatcgggcatccggccatcacgaacgaatgactctcatctctaatgggcctaagctatagcctgtcacggatgactctcatctctaagcacccggaaagaatttttccggtcggtcacccattccgaaattgctctaggccaagcacgcttaatctcatagtttttttttaagattggattccgaaaaagaaattgtaacttgttggcatgagtattctattaatcctattaagccctgggcaaggatgtcacaccctagcattccctattcatatacatttattcatatacctaactatcaatatatttaatacaaccacattcatataacatccattttgatcatatatttcaccagcaaaaccgagttaattgcatcaaatatatatttagcaagtattatcacgagtagggtaaatcagacttctaggcaaaaatgaatttcaaattgaattttatggtactagatgaactcatctgaaaaagttgtaaaaaacaaagttgtagaactaattgagatctaccaattttatttagggcaattgcatatttgactctgttttgaaagccaactactaaattgaccctgttttttttaacttagcttattttaccctgcttttcaaaaacaaacatcaggcctgaccctattctgtcaatccaacgtaacagtgttaacttatggctaaaaagacatttatgcccttgcgtatttgaccgtgatttgttttctattcggtctaatttcatacacttagttgtttaaaaataacattttaacatatttgtgacacaaaaatttgacgaagaatcgataaaactacaactgaagtttaactaaattttggcagcatatattatccatcacaaattacatatactgaagaaaaaactaagagctagctagcctgcggccctggagtgcgtcgcaccaccgccggccgatgcccggagaggtggaagccactggccatagaggcgcaggggtgccgacaccgttcctgtcaccacctcctcaaatctcatcgtcactggctcgccgctgatgcaccgtcgccaatgcgaggaagagaggccaccgtcggcaccagcacagtcgccgcatggatggagagcaggtggaggagcttggcttgcatggtcgccggtgtcgggacattactccgtcgcctggaacagctaagccgccgtggccatcgactgcatgaagcagctgcttcgcgcgtgtgccgccgccgccgccacaaatccctccgcgccccggcactgccgccgctcagctggtgcggatcccctccctccccgccggcgcagatcccatcccgtcgccgctgctgctccctcccaccacgtcgtgctgccgccgctccctccctccagcgtcggcgctgctatttcctcatacgccgccattaccactcgcatttatgatacgagacatccagatagggtttattttggatagggttcctggagggtattttggataataattatattttttatttgttttttaatgaaagcttaacggagtagcgaaaaaagggtcagaccaagtgatcagttttaaaaaatagggtcaaataagaaaaccacaaaaaatagggtcaaattggtagttagcctttcaaacggggccaaataagcaattgtcccattttattttggtcatttttctatccgagtttgattaaactatataaaatttgaattctaaaatataagaaatttaaatatttttttgggtagtaaatgatttcaaatgaaaaaattatcaacaacaaagttgtatatctcctcaagatctataacttttacttttgtctttctcccatataatattttttgaatagtttcaatttgaatttgaaaatatgacaacttcaaacaatattttcaaatactaaatgatttcaactgaaaaagtcatcaacaaaaaagttgtataattcatcaagatctataacttttatttttgtcatttttctatataacatttttttgaacagtttgaatttgaatttgaaaatatgacaacttcaaacaatattttcaaatactaaatgatttcaactgaaaaagtcatcaacaacaaagttgtataactcatcaagatctataacttttatttttgtcatttttatatataacattttttg

SEQ ID NO: 27592 - DNA, 2956 bp, Oryza sativa
aagttgtcatattttcaaattcaaactcaaactgttcataagaaatgttatatagaaaaatgatcaaaataaaagttgtaaatcttgataagttatacaactttgttgttgataatttttctatttgaaatcatttagtatttgaaaatattgattgaagttgtcatattttcaaattcaaattaaaactattcaaaaaaagttatatataaaaatgaccgaaataaaagttgtaaatcttgataagttatatagctttgttgttgacaatgtttccatttgaaatcacttactacaaaaaatttgttttgactaataaaatgaattattatactacagttaattattttgcacaggtcaactcacaaatataaacatttcatatgaaaaatggaaaaaaaactaagtcatctcaattgggcataagtacagagcccgtcacgaatgagtcatctgtgacgggcctaattgttaccgattgagatataggcatacatatatgttagatgggtagtaaagtcaggcccgtcacggatgacacctatcagtgacgggccgtagtttaggcccgattgagataacattacatttctcaatcgggccctaagttggcgcccgtcatggatgacctaaactaaggcccatcagtgataggtgtcatccatgacggggttgacttttatgcccatctaacatgtctgtgcgacaatatctcaatcgggcgctttttcggcctcatctgtgacggcctgctaattctagtcatgttagctaattctaggcatgtcaggcgctaaggttctgtactagtgatctaatagatcatggaaaatcgggcgctctcctgtagctgccttatatgtgcatgttggctctctctcactctgatgcatgcatacatatgtaccgcctccccatatatgattgaccaccatacattcatacagttcttgctccacaagttctttctcctctctccgtacacaatttaaaccaaaatcatagtttcttttaaattaattattgatctttaatctaattacgtagttgtatttgatgaaattaaaacgttacaatcaaatctcacaacactatatttcaaataaaaatataattatattcttaattgaaacattgtttcatcatacatacaacatgatttatagcaggtgaaacatcacaacatttttttaaaacatccaaagaatacaacgtgcaacatttgtaaatgagctagtgaaacatcagataatatttattgcaatatctaaataacaccacgaaaaccacgtgcaacatttataaatgacatagtgcgacatccgaaattcttattgcaacatccaaataacaccatgtgcaacaaacaaaaatacatttaaaaccttaaagtgtgtgtaacacactgaaaattttgaatttcaaatatggaaaacaaaaattttgaataattaaacacctttctcaaaatttcttcatgcaggttgttgtcaattgacaactgcatcacgtcgaaggacatggttcagttaacaatagttggaaagtaaaagcagccaggcccacctgtcaatggttgttggaggcgtatcacgaggacctttggccgggcctaccgaaaccagaggtgatcaaaagtgcgagtaggaagaaagcggcgaagatcggagaaactgcatgggcaaaggtgatatggcgaaagcagtaacatggagcctacaagctttgccaaagacagacctcgccatggggagacacggtcgaaggttcgaggcaaaagccttgccacggagagcacgagtttcgccaggcatcaggtctcaccacaaggaggcccaacaggccgacacacccttcgaagctttcgccaaaggccgggctgaaacactcaacccattaagggcccatataagcaaaagacacaggatacccatggagatgtccctatcataaggctaaccatgtaaattcccctgtaaacccaagaccttaaaacggagagtctgtaatagggctataagtagccccctaggacaatgtaacaggggatccaaaaaaattttactatgcaatataattgtctttacttccaactacagttgagagatccacgcctttcgacgtgatgcagttgtccattcgacaacagctggcgccgtgtcacaccctgaagttcttttcccaagcctaaattgaatttataaatgacctcaagaaaataccgatgtaaaagcaagagcgaaaccctaataaattaatgcaaataataatcggaattggcatgtggaatttatcttgagttctacatgtcgaaatgtgctaacaagatttttagtggaatttttagagctctagaaataattttaatcaattaaaaatgagcacaagcaatatttaatccctggaaattcatttcctcctttttctttttattttccctccttttccttttcgaataggccgctggcccattctcttcccctccccgctgggccggctgaaggccaaggcccagcagccggccgccttcttccttcttcctttgggtcgccgacaggtggggcccacctgtcgggcccgtctcccagcttcagctcccacaaccgccggcccgctcgctcccgcacctcccgggccacgttggccacgtcgccgccttgccccggcttccccgcgcccactccctctctttcccgcccgcgcccgcgctcgagacggccgggattcgaaattcgaatcccgtctctctcttctccccacctctccccactccgccggcgaaatcgcggccatcccggccataatcgacccccgcgggtctatataaagcgcccccgtctccccctctctctttttcgttttgaaccatccactcccgtgccctccacagccctagtgccgttgcccttcttttcgccgccaccgccaccgctccggccaccgctagccgccgtta

SEQ ID NO: 27593 - DNA, 8540 bp, Oryza sativa
tatcatgttcgctaggtggtttcggagctcgtgccactgccgtcattgtcctcttttgctcgccgacgtcaatcggcgggggtgaggcacctcctccccttcctccctctctcccacgcagcttagccgccggccgccgcctagccgcttagccgccgctagcgccgtccgcgtcgccgcgacgtcgccgccctccgcccccagccggtcgccgccggtcgccgacttgcgccgccacggcatcgagccgtgccgccgtgcaccatggccgccgggccggcttgagccgcccgagcgcgccggccgcgtggttccgccgctgagggtagatcggggccgtcggttcagctgcccgcgtggctgccaggtggccgccacgtgtgcgccacgtcggcgccacatcagcgccacgtggtgcgctgccccttccccggtccatggacccagtccaccgcggaccgccacccgagtcactgacatgtgggcccgcatgtcggcgccgccccctctctctccctgggattttaattattgcgcaataaatcaattaaggattttaattattgctccgtttaagcccattcaagtcttagtaaatcaagaaaaatgcatagaatccattaaaaatggttttgttctctgtttcaatagtcttatggcctgtttgtattgtttgttttgtatgtcgcttagattccggttctcccgacgctccggtgtactttgaaatagtcgccgaggttcctccagcagcaaagcaaggcaagtcatgcattacgattgatcatattgtacccaatttacaaatgtcccgtatttctattaaatgttgcattgttttacaatgtcatgtgggatgggtcctactactcggccatatattgtttaccttttgccattgataacttaggtattaaaatgattagatgttggtttagggaatgcttagccatgcttagttcaaccagtacacaaagggggatcactttaatgcctagactttgattattggcatagctttggattagtaccaccgcaatggtgttgattaattaaaatatattaaatggttggctgtgggtgcatgattttgatggtcgcgcccatggcacttaaggaccggttcgcgggatgccctggaagaacttatcgtacttaccacaagccagcgtgggtaacggctgggcttgtagtgtagctttgctctagctgacacatccaggcaagggtgggcgtgatggagcgggacaggccctgcgacggcctctgtcgcttccggatttacgtaggcacgagaggggactgcccgttgcccgctggggacgggggtgaaacctgaggtgtggtgtgcttggctagagggggttatgcgaagggtcctgtcacggcctctttccggtatgttgtggtggcatgtcggcgcacagtaacgtgtcgtggggctctgtcttgtgggtacagttgtacacctctgatcagagtaaaactattcgaatagccgtgcccgcggttacgggtggtccaccagattcactgtgattagtctcaccctagattagcctaatggaattgattagttcaggaggatggttgggccagttgcaacgtggtgtagcgttggacagtggatgattaatattgattaattactacaactgttttactgctttcaactactgtttataaatgctcgctttatgcaaatgacccgctctagctatcctttggttatatcatgcatcatactcctattctggtatgacttgctgagtacggtggtggtacttagtcttgctctattcccctccctaaaccccagagtttgagtacgtgtcagatgatggcttctccgaggtgtaggcttcgtccgtgccatcgaggatgcctgtggagtggtgttcccgctgcagtccaagtcaaggcttagctccagttatcctttaattttccgttgcatttatgtaaaacttttatgatgtttgtaagacgtggatctgtatgtcaactttgtcgtttgtgtaccccggccggtcctggacgggggttttaatgcacattctgcttggaattctattcggaaatttctgggcgtgacacgccgtccgtggggacgtccgagcgaaaccactgagagtgagcgaaaccactgatgccaccaaaggaaatcgttaaggagagagttgccaagtgaaaggaaggcaacagcgaaggggagatggctggcgaagagggagtagagccttcgacttttgaagccgaagttggagctgcgccacccccagcagcggcgccatctcttccaccttcagcactgacgaccttgacagatgcggatacgttgaaagcggcggccacgctccagttcagggacgtgatcctttcgcctcaagtaccgggggcacctcaagctgccgccttcacctagctagccacgacgtcaacagcaatcatcaccttgcaagctgacgccaatctcaaagctcaagccaatgcagacatgggggctatacgtcagaacatggctaaactgcgagacacacttcgccagatgcaagagcagcagcaagcatacggagcagcaagacaagccaggccaacacgcaggagtttccgacgctctacgctcagccccaagtttttcccccacatgctgcaccagccccggcgtactacgccaagcccgtcccggccgtcgctgtacgaccgccataacatgtgatttcggcgccggttcgtccagcggcacaccaagcccagtacccgaagcccactcacactccacaagcaatgatggaggcagcttcgaccttacaagcacagtttcaagccttcttgcaacaactcaatcaaccccacaacaatataccaagagcttcgcctctggcccaggacgagcggagcccaagtcaggggtgcgctagccgggcagccgttgggctagttcatcatgccaagttgttgacgtaaaaacacaaggcctgggagatctgcttaactccagtgcaggtccaaaacttgcctttgggtgtatgagcgtgccagttgatttgatcctgcaatcaacaggaaacaaagacaaagaaaccgcggttaaatccataaacgatagccaatcggctaggtgccgatgacatatcatttacctttgagccgatgtcatatgtgcatcgatcggcaattattaataagtaagaaagaacaaaatctactcgatcggctgtagatgttaacgatatataatccttaggtcgatatatacttaaatcaagtgattgggatagatcggtcgccatgtcgagacagtataaatcacttagatcgaaatatatattaacaacaagaccatatatgttcgtagcatagccgatcagatagatctagcatgtagcggctaatgctccgatacgactctatattaagatattaaagtaagtaaaatataccaaacgaaagcctaatatacttaaatgctacaagatcttagcataaaaggtagaattaacatgtcaatcaagcacataagataaaagtagttaaattaggtaagatcggctgaaactccgatgctaccctaatcggcaaccaaaagcaggctagagattgagattctaatcacgattcataagatcaaactcaactgatgcagctataagtatgaaaagaaggacaatatctagacaatcaagccgttggatgtttcatagagtggtagatatcctatataatctaagtcaacatcggtatttaacctagtcggctgccttctattaacagacgttagccgattgtaggttagatggcgatattgccggagattatataagatatatgataactcgacgaattatagcaacaagattagagtatcatgaagatggaagcactaatcccgagaacgcaagccaccataacaagttttacctcttgttgaagatcgaaatcgatgcagctcaacccaaaagcaagaactcatcgaaacaaaatgaaagtaaaagggtggcgatgccccgagattgtattgaacgtgtgttagtttgattacatggggctcgaggtctatttatacccgagatttacaaaatatgtccacattggacacgactcttatctctaacaaactctaatataccataagtctttacggcagacttttgcccaaacatatctctaaggaaattacataaaatatcctaattaatagatataattgccttctcaggactacccatgcgtggcagtcatcatgaagcttattaactcaacccgacaatgtattcttcgtcatattgtcggattcggctcaataggctaaccctgtccaactcggactttgctgatcctgatcacagctgattcggacttcagccgattcttactctatttccgaaacaatcttggatttagattccgcttcaatctgatctctatctttgatactcagattaccaaatttggtcgttaacacatgcccaccaagtccagaatattggataatgtttcgaatttgccatacgtcgactccgagagaaatccgcacttgccgttttccgaccgttacacagtgctttaaatactaaccgttgtccccgagatatctcacacagtttcctccattttcaccgccgaagccaattccgtcctctctctctccggcaatcccctcggtgcgcaaggcgatttcctctccggccaactttccgcccacggcgatgtcgacctctcccagcccgtccgccgcatcatcagccgagtacgcagaggtaagttctcatcggctagatcctcttctttcgtatcggattggttttccctttccatatcttgttttcttcttctctgttcttttggatccgtagcatctctccaacctgatcgcagttccgagcctatctgacgagaaccattactttctcggcccagtcggcaaccttgatcctactgagttcatcattggcgaaaccaatagaattcctttcagattagccaacctagatctaggtcactggaagaataccttcaaatcatggccatctctcgagaaaacttcacccgagaagagctggattacatggtacaagcgcatgtcgtctaacaagaaagttcactgggacgaaattggaatcggccaagcgcttacccttaccatagccaattcagctaaagatgaacctttaatggccgccgccacctatttctggtccaataccatcaacgcttttctgttcaaccaagggccgatgactccaactttgattgacatcaccatgattaccggattagacgtaacttcattgcctaaccctgtgagtatgaacaccaagaaccaatttgatttcaggaccaaaagcataggtggttggtctggctatgtagcggcatacatgggcaaagggcctgtcactcctcgaaaacatgtggctttcttgttgatgtggctagaaaagttccttttctgtggatccagttgatgtcctacaaccaactggcattttgtagccgaagccctagaatcaaagaaacaatttcccttagacaaaattcttcttggctacctgtaccaagtgttaaataatgcatgggccaaaatagctatcggcttagtggtaggagcaggtggcccatggtggctgctgcagacttggctgaatctgatggtcatgaaagttgtcaatcggccatctgtgatagaagctgaattcctaagattagagccgatcatagaagacgatggagaggaacgcacccatcgcaaatgcacatcctatcgagggtatgcttccacactagccgacacaggggcaaagctatcagctgaactgcttaaggattggttctgcagtttttatgaaggctttcagaaagatgctccaatttggttcccttatgaggactcagcacttctagagctcccatcggactttagatttgaagacatcaaccacgagagatacgaaaagtccagagaagtcttctcggctgcaataagcccatgcatccttcctgtcggcattcatcaagggaggaatattcaagtctcttatgaattttatcatccgatgagttctgctagacagcttgggatgggtcagctaccaatcggcttgttctttgccgataaaattcaatgtcgaggggaaatttcatcaaccttaatgatggatcggttactcaatctcgaaggacctcctttgggcagtattgaaaatatagagctggcaaggttcaggagtaagaactttgacagatggtgggggtgaatggaaacaacatatcttccatcaaccagcttctatgtaaatgacagatctgttccccgatgttgttcctcaggtatatctttgctcttgtcaattctgtttgaacaattattagccgacttgaaacttgactaatttctcttctcgtcttgcagacaacagaatcctctccccctcgcaagagcaatagtggcatagatatcgaatacgctccaggtctcattcccaatggaggtgggtcatctccccctgtcatcaattgtcatgcccccaaaacttcaagtatgctccaagggctcattagagaactagctgatgccggtaaaaagagaaaaaccagagcatcggctatagacccattggctccggctccaaataagaaagccaagtcaaataagaccaagccaaccgatgatctgtctgccgtagatccatccattgaacaagctctggatgaagaggatattggagaagatgttgatcaagctgaagctgggataagcggtactgaaaaaacaccatgggcttcacttaaacaaactcctccgactccttctgctccagttcatttttccagggtaaacaactctccttgatttctttttgcaaccatttcatttatagccgattgcttatagattttataattgcagaaaaagaaaaatactatgagaaagaaatcggtagcaacaactctcaaactggctccaccagtaagatgttcttaaatctttcactagttgatcatcgccgatcttgtctaacaattgtctcttttcagcctcctcctccttctccccatgtacagctatcatcaagtgaccaaactccatcggctatcatcagctagaagcatcatctctagacagtttggtagtagactgtggatcaattaggactcggctacataaagttcaagctttgatcccggaagaacatgcagacgtcctcactccagctgcttatcttgaacaatatcaattcaaactggagaaggccaagctgagattagccgaacgtgggaagcgcagggatattaaagccacaatccagccaatcggcaactcgtgcatgaagagaagtccaagcttgatcagctatctgagggcccgatcaagtctaatattgatcagcttgaagctggtaagattgagctgttggcacaactccaagaatccaatgctgatatgaccaagtccctaaaagtcatctctggaaccgatgctcaagatacccaagctattgaagaagtagaacacattaggcaaagagctatatcggcgatctagcgctacttgtctcagtgatattctataataggatgtagtaaatttttgtaatcggctaagatactctggcacttgtagttaacttgtcttgatttatgccgattaatataactccatgtttttgctcaagaatttgctcaaaaattttgcaacttttgcatatatatgtgcccccctaattttacaatgtcgaaggcattgatgaaattatatcttgaactaagggcaatataacaatatcggccatttgtacatcggcaaaccacaaccgattacaataggaaaataactaagggcgatataaccatatcggccatcccaaggcaatgcaaacacatcggctattatgtatcagtagtaccagccgatcatgcattaacccaaacacttgggtaatatttcttcaagtattttccattgagcgctcgtccataaacttctccatcgagtccttgcaacatataacctcctttagacacaactttatagatttgaaacggtccttcccaattcggcgactacttgccgaatttgctatcccgagtgccaatcggcaaaatcaatttccatacaagttctacctccgaaaaagacttggctaccactttcttgttgtaatgtcgagcaacccgttccttatccttagcaacttttgcaagggctctgaatctagattgaaccaagtcttccctctcatcggccataagattataatactcatcggctgtcaaatcattttgcaactccgttcttcttgagccgattctaacttctcatggcaaaacaacttcatgtccataaacaagtttataaggagggacttgaatcgatccatgacaagccatccaataggaccataatgcttcggccaatcgagtatgccactgccgaggataatcggaaatctctctcttaatcaatttgatcaaactcttgttagacgcctcggcttgcccattagcttgtgcataataaggtgagaattcaacatttt

SEQ ID NO: 27594 - DNA, 1129 bp, Oryza sativa
aaaatacaagcacaaacacaacttctccacaggggaatatctcgtctctgcatccaagagccgacgacttaaataaaatacaactctttctttcccttcaagctcctgaatcaagactgagccgattgacttctcaccagctgatagatataatctaaaaggtaatcccttttgtggaggaatcaaaactggaggagagctaagatattccttaatactatccaaagccttctgttgcactgcctcccaagtaaacttttggtcggctttcaatcttaacaatggtgtaaaaggctctaaccttccagacaaattagaaataaaccttctaacaaaatttatcttgccgatcatctcctgcaattccgtctattttctggagactgaattttcttgatcgcattaacactcctttgagttatctcaatccccctctcatgaacaagaaatcccaaaaactggccagccgatacaccgaaagcacactttgttgggttcatcttcaagccatatttcctagtcctctcaaaaaccttccttaaatcggctatgtggtcctctatctctttagacttaacaaccacatcatcaatgtagacctcaaccaaccagccgatcggatcatggtatatgtaattcatggcccattgatatgtagctccagcacttttcaagccgaaagtcatcgtaacccattcaaacaagtcgattgcaccaggacacctaaaagctgtcttatgtatatcttcttcagccatgaagatctgattgtatcctgcatttccatccataaaactcaatatcttgtgccctgaagcagcatcaaccagctgatcggctactgcattggatactcgtcctttggggtagctttgttaaatccctgaaatcaacacacaccctgactttgccgtttttcttgataactggaattatactagaaacccacttggcatatcgacaaggacgaatgaaaccagcatcatataaacgtttaatcttagccttgacaggttcgagcatgtcggctttgcatcttctcggaggttgttggtgcggcctaaaccccggtttgataggtagccgatgttcaacaatcgatcggctgagccctgacatctcataatac

SEQ ID NO: 27595 - DNA, 2037 bp, Oryza sativa
  unsure (1)..(2037): unsure at all n locations
tgtgaaaaccatgttaaccgatgcagttacaacactattccctttagccaatctttttgcttcatcggctgtggcttcatcggctgtaggaacttgattcttaacgcgccactcctgctgcggcttcgttttcttcagccgatggttgatttcttgctcaacctcttccctgttcctcaacctttgaacccttctcttctgattctttgtaaaaataccagaaggacaccattaagtcttcctaccttcattgtcctcttggtcacgatcttgatttactgggcccaacctttgatgaacaggaacccttgcttgccttagccaattgcctttattatatgatcggcttgaacttcctgcaatattgctgtacctaggacaatcctcattggatggcagcctcataccttcattccaacagaatctaaagaactcacaaccccaatgaggatcaagaccgctatcatcttcctcataatacttttcctgatgctaatcatatttcctctgatacttattgataatcataggcgagttcatttgaaaacctcgagcttttccttcatcggctgttcgaccagctgtatgtactatattgacacgaaaaggattgncatcaaccttcatcggcttattggaatcatcaaacttgattntgccttcctcaatagccgcctggatctgctgtctaaagactttacaatcattggtagaatgagatccagaattatgccacttgctatatctcctcttgcctaactcctcagccgatggaattgtatgaccagcaggaagttgaatatgtttttcccgaagtaacaaatcaaagatcttatcagccttggtgatgtcaaagtcatacctctcttcttttcagaactcttcacccattggcatggtataaccttcttgctcctaacccacttggctgctgctacctcggaatcatcatcatcatcatcagatccatatatgtaggtttccttttgtgcaagatgtgacaaactatcaaagtcctgggatgagaatttctccctgattggagctatcataccctaaaaagccaaatctgctaacatcagtcaagcttaagttgtagcacttattcctcatctctctaaacctctgaatgtagtcttgcacaggctcatcatgcctttgcctaatcgctgttaaatcagacaatttcatctcatgaaccccactataaaaatagctatgaaaattcttctccaaatcggtcaactgttgattgatccatatggcaaagaagaaaaccaagtaaaagccgatccagacaaagactagggagacaacctaacccttaaggcgtcgacagtcgatgctttaccacactgagctaagaatcggctagcatgttcataggttgagacactgtctgcctgagaattttgaaaaatcccgaaccttgaacgggttaggcaatggaaccctctcaaaccactcaggatatcgatgccgatacaagtttccagtgtcttttggcttgatcccaaattgctctctcatcacatctgcaatcatatcggcccatggttcctattgaggcaccccctgcacttgctgtggcacaggctcgaacgagttgtactgataagcgaattgaggctgagtcgatcctccttgttgatactgaacttgcggcgatggaggctgatactggtaattcaaattgcccccgtgataattctgaaagtttggctgtatattgcgcaccaaatgttcgggaataacttgaggtatcaccgattgatctggttgcacattatgaaccaaatgctctgggacaacttgatttgcagcgtgctgcctcggctgattgtcgggcgtcctgaacccagccgatgcatttaggaaaccttgctgctgaatcggctgagcaacttgctgcctcggtggcgtctgctgaatcggctgctgttgaactgggtcagcagtaggctgagttggtaaaaacatagctgcaacttgctcttgagttagccgattcacattttgtccactatgctgagactg

SEQ ID NO: 27596 - DNA, 2982 bp, Oryza sativa
acaagatccgtgtgaattgcatcgcgcggggcatcatcgatacaccccttggtgatgatgtacgtttaattctccacacatatgacaccaatttattgcgaaggctggtgcttttgttaaattacatatatttgttccccggttttagattttattttcacatcaaagttctgagttattaattgaccctctacttttattatggatatatatttatttgtttcactcaagaacaattgttgatgctctcaaccacaggtcaagagcggcaataatcctcaccttcagggtgttagcgggacggacttcatacaagacgacatcgcacgaacgccgatgcggcgtgtaggcaagccggaggaggtctcatcgctggtggcgttcctctgcatgccagcggcggcatacatcaccggccaaatcatttgcgtcgacggtggccgcaccctatcttagcagagtatgtttaattgccctaaagccctaaaccatataaagaattagttcctacctcacgcgttgctacggaacaatcgtgttaattgaaggatataatttcagagctagcattgtgtatactctggctaaaacaaaattaaagagcatcatatatattgacgtgtcctttacaatttacgttattattatatactaaaagtctattaaattaagcttcctataaacgctcacgtggcactcctagaaacactcctaggccatcacaaggcattatctaatcttaccatcaattttcacttaaattagtggactcgttattttacatcattggattaaatctattattaaaaaataataactttctccttttatacgatacaagcgctattactgttgttatgtacgtacaagtttatacggtacaaactatgtccttctcccgtacgtatttacgtacatgaaaacaaaacaatagctttacataaaacgccggaataaaaagaaaaaaccatacgcatatacataaaaaagagagcaaaaaaaattacatccaaaaaaattgacaatctttaaaatatgacaataccttactttctgttcgccggaaagaaaagaagaaaccatacgaatgtacataaaaaagatagccacaaaattacatccataaaaatcgacgatctttaaaatatgattttctaaaatatatttcttttttatatataaatatatataggcaaacggagagctataataataatattaagagatcccatcaatgttctttgaaccatcttttaataatttttaaattatatatctaatttgtgattccatggtattcctttaattaaattataaaaattgtgttgcgatcctaaatatatcacaacacatgagggcgtcatataatagttagctggttaatattttttaaaaaagtcagatcatattttggggtgtgaaatatcacttcacaaatatacaacaccattttaaatctacatatataaaaaaataaaaaaaagacaatttagttgtgttttttcaagtagatctgatttaattgtaatttgtttgagattaagattctcaaacttttttttgacattttcagaattattttattggtatttgagaagtgagcagcatacatagtacatagatatgaaaagaaatatcaaaaatagttccactcaatgatctttgctatgattcaaccccttaaatcatcatgtgatttatggtcatattttttctttgccaaatagttttgacacaaatgaacaatgaagtaacatgcacaataaactactcatgatatattttcttgtacttaaggaatttcaatatattagacataattgatggatatttatcataaactccactgacatgactgtaagtgtactccaataaattatttattgtaaataagtttagaaaaataaatatagtcttcaaattagtaaaagtgcctcgtgattatgaacaataggtgttgaaacaaactacgcgctaaactatagatatttgtcaaaatattaaaaataatattgtgctgcggaaattatcgtggtagtatgtctctttagcaataattcttttaaataatgttgaatgattaacctctctcattttcaaaagcgagttttctgtctttatcataaaattttgagtagtattgatcaacgccataaacaaactatgtctaaaaaaactattttgatcacttccatcttctctttgttcttccctaaagggcaacaaactgaaaactccaaaaatatgatattctaaatatttaaaacaaaacacacatagtataaatggaagatttttcactgcaacaaactccatagttatgacacaatattttgcacgattccaattttcagtttagaaattatgtgttgcaataattggaagaaaatcataaccaactttcgaagcaatcctaaacaagtttagaatatcgctacagaaaattgggaaagtcactcacacacaaagtttcataatagaaattcaaccattgttaaataatggtttgtttgggagatttatggagtatcaaccgaattattcgtaacacgcttcaaaattataatttgtgtaaaatactttcttaatcggtattgcttaagtaaccttttttaagctatttgttagtcgtatgctatactatgtaatgcacttcataatcaattatctatgttccacttcatcatctaaaagaaaagtagacatactttgttttgaaaatagataattgtaaattaaaagtaggttctttcgctttttaatggaatggccagggtctctagatctccttttcaaataatctcaaactatattattgataatttatgttttacatcaagttagagcgctctctaattggttcggattgacataacttcaaacatactagcatgtgaaattaaaaatacataggagcgacaaatatatatcgaccctactttatatgatgtgttggacccatattatttttttaagaaaaaa

SEQ ID NO: 27597 - DNA, 4010 bp, Oryza sativa
cagtcgcacgcatattttcgatatgcttctccaaagaacgttttgcttcagatttctcatgtgacaaagcttggctaaaacgttcaacagctttgcgataaaataatctagcacaatccttttctctaccatcagcaaacttaaaacacaactgtaaaagataaggtaggacgtcaatccattaaaagaacctaaatattctatgtgaatgctaacactgtaactcaccaaaaattccttcagaatagttatccttgtatgagcagaaaagttgtgataatgagcaatgacaactgcttcatcctcaggcacctgtttgccatgtttatccaaaggtctatatgtgccagggtagtgagcttttataagacatgtgatggtagatgaaacattcttcttcataggattcgtaatccaagcactagaaacaacatgccatttaccaagttaggtaatattagtgtaaaccaatgaaagtgataaaaaaatatgttcagccatcataatattggatttataggaactatgcatctgtatttcttaaaatttaacatggagtttacaacaagattttcaattattaacaacaatgatatacatattatatggagtgtgtgtttgtgtgtgtgatagacagtgtgtgttttaatataagcagaaatttagagtgtcaacttactctttattgagtggagttatcactgccctatctttctctggaactggtgccatcaaaacatttggaccacgaccacccttactttcttttgttgaagtaaccaaagaatttgaaggttcatcttgtgttgaatcctcaaaatggtcttcaacttcaggatccggataatgtcgatggcgtcttgacatagtacttaactagtaaaaacaagggttattttgcaagcaaatgtagtcattgaagaatagataacatagtaaatttgtaataatgccactgctcatgagaaaatgaaataataatatcacacacacacacacacacacatatatatatcaattgtttagtcactagaatcactatcattgtctgagtcattatctgattctattggcccttcatcttcactgctgcaatcactgtccatggcaacataactctctatgttctcatggctatttggtctatttaaaaaatccatatcttctggatcaacttgctcaacaatatttgattcatgaagcaagctttcatcaccaagctcctgtgaaatgtcagctccaagctgctctccctcttgataatattcagaaactacaggaggaagcgaatcatcaacttcatcgtccactgcaggaacgggtaaagtaccaattggatttgtcttgaatgcaacccaccaatcttttctttcacgtggtggcgatggatatggtgtataatatacttggtccacttggtatgcaagcacaaaaggctcatattgttccaatcttgatgtatggttaacttcaactaggcctagtgctttgtcatacttcactcctttcttaggatcaaaccagacacacttaaatagagccacctttagatcactatcactgacatattccaactctattatctcctgaatagtgccatagtagtcaggcccttggttatcaaaccaatttgctgacacacaaactccactatttgtcattgtcctcgatgatttcttttgttcatatggttgggtacgaaaacgaaacccctgaacatcacatcccttataacacttaaccatgtatcggggcccaatggaaagagcccttacttgttcttcaactgtttcatcttttccagcctgtagaatcaattttcatgaatcatgcattaaaataaataataatccatcagatattacatcatgtattcttaccaactcacgaacccaggttggaaaatctttctcatgcatctcttgtaattgagttgtagtgatgttcctgttttgttgtttcatccccctatcaaatttcctgacatttattgcaataacataaatgtaatatgtcatattcacaaaaatagagcccaagtaataaaataggaaaacagaataatatatacttacaagacatatttgtcaacttctgcacaattgagtaatgcatataccctagcagcctgccattcttctcttgataagttacatgatgtgctctttccaagagtgcgatatgggatagagaatatagatagccagtcagtaggtgctctgaaaccaccatcatcatgtctagggacgcgagtgtgctttgttcgcacatgatcagcaaagtacatagaaataaaattagagacctcctgtactctatacccctctacaattgaaccttcgacacgtgctttgtttcgaaccttcttgcgagcctcatgtaactccctatgaattgagcagaaaacataattatgaaattaatatacaaattcacactttagtacttaaccaaagaaacatacctttcaaatacatacatccagcggtaagctacaggccctccaattaaagcttcataagctagatgcaccaccaagtgttccatacaatcaaaaaatccaggaggaaaaatctgttcaagtttacacacaatgactggcacttccttttgtaggtgcttcatttgttctatatccacctcttttgcacatagttgcctaaagaagtagctcagttctgctaaacacttccagatgtgcttggggaggaaatcacgaaatgccacaggtagcaacctttccatgaagacatggcaatcatgactcttcattcctatgatcttgcctcgattaatatcaacaccctgtgctaaatttgatgcataaccatcagggaatttaagattcttaacccattgcagtaccaatttcttctgtgccttatctagactataacaagcttttggtttcacccatcgacctatagatttttgttgcatatgaagttctttgcgattgcatatattggctaaatcaaattgagccttgacattatctttagtcttctttgggatatccatcaaagtattccatatattgtcaaacacattcttttcaatgtgcatcacatcaaggttgtgccgtactaacaactcacgccagtaaggcaactcccaaaagatagatctttttacccaattatgctcctttccaaaaccctcaatctcttgatttcctgccttggtaccaaatgtaatttgagggagagatttaacacaatcatacacttctgaagatgatcgatgaataggtgggccatctttctcctccttattctggatgaacttgtcttttgcatgtctaaaagggtgtccctttggtaggaaacgcctatgacaatcaaaccaacatggcttgcctccaacttttagccaaaatgactttgtgtcttccatgcaaattggacaagctaattaaccgtgtgtgctccagccgcacaacatcccatatgcaggaaagtcacttactgtccccataagggcagctcgcatgacaaagttctggttttttgagcgatcatatgtcacaacttcttcctctccaaagttgcaaaagttcatcaatagtggatggaagaatacatctatgtctttccagggtgcgtaggccctggtatacccatggtaaggaaaatattatgtgccttcatgcatatgctgggggcaagttatatgggacaacaaaaacaggccaccaggagtaaggggttgcagtttgattaaatggcgtgaatccttctgttgacacccttaaccgcacatttcaggcctcctttgcaaaattaggggtactttgaatcaatatgcttccatgcttcactctctgctgggtgagttaactttttctttctgctttcattgttgcccctctctgattcaagcccatccttgtggtatgtcatgtgtgttccagtgcctcgtgacatgtagagcctctgtaggcgtggaatgattgggaggtagcgaagcaccttctgtggagtgcccttcttattctcagggagttctaa

SEQ ID NO: 27598 - DNA, 16304 bp, Oryza sativa
  unsure (1)..(16304): unsure at all n locations
tgtctactccacacatggtaattttcagtaaatcctttattgcaaaggtgcatttgaactattcttttgtcatgcagctgcccattcttgcacttcgtacaagggcatctaacccttttcttgcctgaccttgaactttgatacagcgtgtgacataaacctcttaactcctttcaaatactcatctgaaatgtatccattcactacccttttatacatccaactacggtcctcagccattaatctcacactaaacaagctattctgacatgcaaataatggctagccctacacttgaaattatatggtaaggatgcatattttgaaagattatgtaaaggaagtttatcaaaataagaagaggaaagattagatgtagactaatagcaaatcttcttttaaatacaaaaaataattgctcccagataaatcattattagtgataacttgaacatattaagtagtacatatttctctataatttgtttactctgtctacacttcaatacaccaaaagaataaacaacatgtgtcttagcttgtttaatttactgaatttttgcacacatgccaatggtttgctatcagattgcacaattattaacactcaaattccatcgtactttcagaagacctgaattttctaaccacttaaagcaatcctgagattgcacaattattaacattcaaattccaccgtactttcaggagacctgaattttctaaccacttaaaacaatcctgagatcagtaccaatcataaattaaactatgttaataattcctacctgtatattctaatccgaagaactgatgatagaatatatatctactagagatactcgtaatttttgggcaataaaaatatctagtagcgagcaactaaagaattagaaacacaagcatcgtcaggaacttgagtcatacatgtgcaagttagagagcaaattttagtgtgtattacttaaaccataaacaaattaatccaatatccaacatcctggagcaaggagagtagaagaaaccaaaaggatgatgaacattctttcaaaatcattagttgagatgctcatgggatacaatcacaaaagatgaaaatcacaggacatgacaaaattcttacaggggaattccatcgagcagctggtaggcacacattaatcaagatgttacctgaggaggaaggatcggggcacggcagagcggcacactccgacgaggtaggagtgctgggcctgggtgtcaggcaccgggctacaggaggtgccgcacctgatggctcggagtgcgacgggggtgccaacctgcgtcgaggcaagcgcgcggcaggggattgttagcgatcatgcgaggaagaaaacaaatgaagaaaattgggtgctacaaactcacggaggggcaaataaatctctccaatcagatgaggaaatcacaattagaccggcaaacatggggagtgggagagatgggataatgggggtcgatgattttggggggaatgccagaaaatcgcgggaaggaaaaagatggattgggacttgggggtttttttcatgagagctagagagcccttctttttctttttttttttgagttgacggggtttttctagagggctggcaggttttttttttaagtacgggaaaacatcctttttttcagggagtgggatgtggctgggtcaaaacaaactccagatattccctcattaaaaaactaactcaggataaaaaattgcatcaaaaatttatacatggtaatattatttataaaatatatgaaatctcgtgttttctattatacaaaaattatgtaattattttcaaagttacatgagcataagagtaaaatataccgtctttaaatatagattttgcatcctttatttctagataatcaatctagaatttttttaattttttcaatttttataacgatcgttgctacgggagtagagccaccagtaataacataagtgtggtaggcgtgtacaataataccttcgattaagtggcggtcatggagcttgacgacgaagatagaacagtggcaacgctactcaacctgtcaaccatggagacagtgtatataagacctcggcaacgacaacagtggttataataatgtattaattagagggttggcgtgatggcgacaacaagtagtagctactagagtgttaggtagtagtgacaagcatgctagcatgggaaaatatccctttagagtagaggtgccaatgtactgataaatttttatacggcagatacaacggtgggcgccttctctcgtttgcatgacacttgttacatatggctaaaaaaatatatcatggcgttacaccattttattaatgtaatatttaaataaaacctatactaaaatataaccttagatgtgactcggtatctctactattaaaatattcgtgttattaaaagatcatgataattaatttatgtttttctattaatggaagacaaacagttatgcatgtcacacgcacatgccctgtttttatcatttgcaggcccttccgaatagttcatttatatttttttttatagtactggtaatgaggtcgcgtggtcgacattttatattaacacgtttcatacaatttttatcggttagctatactttaattagcaaactaaaacttagtaaatgtaaaagaagtttttgacagtacaggcacaatttcatttgcaattctttaattttgttttttatttagctatttatagagtttttttcacagaaatcaattaaatatatttttatttttagataatgtttaatctatttataaataaaaacaagctcacaagatccatgcatggctagcgtaatactagcaattaactaactgtataatttatattatgtaatttatattacaaagagatgctttatttcatacaatcccaaggaccatcgcatatgccttggggatgacgacattctacaagggtacgttcatgacccttgcaaataaacattattagcaaggaactagagtgatggtagcagataaggatcttctgcaaggctatactattgcaaggggaaatagtcttgacaataattacatttcttatagtggtagtggatatttttagtgtatcaatgatgtattaggcttattttattggtacatatgcaattcactcaacttttaaaacgtaataagtaatagtgagaatagtataatttatatgttactcgttcaaagtgttttttttaattttagagatattcttatcatttaatatcatttgaatagaaatggtgagatacgacttttttatcattgtttttataaaacaatcaataagacgcccgtgcatctgcgcaggctttgttcctagttgatatcaataattcaatattttatgccaacaaagaaaaagaagaaaattacacatcaaattattggtcgaataaaaggggatccacttgggtaatctggtccaacacgcaggacactatttacatgattaaaagggctataagatgtgattgttctaaatgtgatatcttttaacaacaaagataaaatgtggatacatagctgctaattgtatatgctgataacaatgaccatagtcttaaaaagtaactgtgaaaacatgaagcaggtaactattattcagaaaacgtgttcacattaatcacattatgtgtgaaatggaagaattatacagacaacattctgtgatctgcagtctaaataccatggagattttggcatgcacctttttgagaagctggtgatggtcaaatccgagagtaactgatccctcaatcctgttgatagtttgatatggtacgcaaacagagcaacagtagaagctgttacatttatatgctttggcatttatatgaaacttggtcataaacaaactcaaatcaaactatgatcaatgatgctacctagaacatgatagaattacaaaattgttttaggatcaagatatccatattattggtaaagaacatggacctgccgcctgtgttgtcctgcagaaatcaatggcaagagaataagaggtagatatgccagttcggttaaaaataaaaaagagagagatagatatgccatggcaaatgcagatcgagcgagagagtgagagagatactgtgccaacaaatttttggggccatgcatgtatgatgtatggcagcagcaaggcacgtgcatttacccttgatcgctggagtttgttcatagacggtcccacatttgtgcaacaaatcgcatcgggactgtgaaattcaaggcggtacatatactggaaaagatgaacagctacaggagttccatagagaaaataaagtaaaagaactaaaaagacaacacaaaaaggttacttcgtaccactgttatttgacatcgccataacagtgaagcattctctaaatagccaagggcatccacaatataagctactcctaaagtgtcctcactaactaaggacacacgtaggaaaactcaactcgcaatggaggacacccctgaatgggctcctcaaaatcccaacctataaagccacaagtattgttttcctcttctacccctctcttcaaactaaggaatttgaagacatgaagcattcagaatacacgaatatattcaacacagtaattttcaatcaagagtaacctatatattataatctaattaagcaatagaatactagtattttctatcacactctcaagtactacttcaccacatcatctgtactactctatcttatcctcttcgttcatagccattcaccgcatcatctgtactactctatctcatctttttccccaatcttccatcgagagcagcaaaccgatgccaagatcggtggatggcatagcgagctcgcatacgcggccgagctgggtaccgggcggagcaagcaaggcggcagtcggctgacgagctcactcgcgcggccgagctgggtaccgggcgaagcaagcgaggcggagcaatcgaagcggacgcacggcaggagcgagctgccaccatggtcagcacaagctcaagctgcgtggtttgcgactttgccccaccgcgccgccgtttactccgccacacagcgccgcccgtgagctcccttcagctcgagctcgaggggaacgggagagagaggggagaggggtggaaggagaatatggaggtggagcacccgttgcccgaggcacccgtcgccgcagcgcgtgcctcgagcccatcccctggccgaaaaggaggagccgcatcgcccagacgggagtcgcgtggcgtcgttgggggacggtgcgaacgaaaaagtaaacggagatggacggaaggagctagggacacgcccctgaggctacccattgctgatggcctaaacatccataattttttaaaaagtaaaaaattcacgccagcagaatgccaaaacatagagaaggaagttaacttttcaggaaacaaatatcaggcgatgtccaacgtggaagagggaagacctccacgtacgattggatataactactggaaactaatctttgctcggtcgccccaaaaccacaatagtcccggttacaaaaagaaccgggactaaagatgatctttagtcctggtttaaaaccccacagccattctacgatctttagtccctaaagatcatctttagtcccagttcatccctatcagtcccttgtcagaggggcggggatctttagtccctgttggtgtcacaaaccgggcttaaagatcacctagatcaccactttagtccagactaaagatctcctctttactccctataacaaacggaactaacatcacgcgtagtatataatccctattccctatcctctccaccacaaccggcctcaatctcctcaacaaccggcctctcctctcctcagatccatctccctctcctcccatcctagccctctcctcccctcctcccttcctatccgatgcccagcgagggccgcctcctccccctcctgccttcccgtgcccagcgcctcctccccctcctcccttaccgtgccaagtggggccgcacgcggcaggtggccggcgaggccgcatgcagcaggcggctgagcacaggccgagtagcgagcgggcggcgctaccggcatccattctttattttttttacaatttgtgattcactgagatgtataattttgtgatttgttgtatagatttgagatgtataatatgtgatgtatttggtttgtgtgtaatttttttaggatttgtgatgtatttgatttgtgtgtacaagtaacttaagatttgtgatgtgaatgttttggaatattactttgatttcggaatatgcatccaactcgatttgggagaaaatacaggattaaactctggctaaaaaacaatgaaaaaaaaagaaaaagagacctaattggactgccactaccctctctttagtctcagttgatatcacaccaaccgggactaaaatccatctttagttcgggttatttcaatcgggactaaagatgcgccggattgctagtcccggttgaaaaacgccggattgctagtcccggttggaaaaccgccggttgaaaaaccgggactaaatgggttaccaaccgggagtataaatggtttctggttgctgagccgccatcaaacctaggcgagatgaaccatatatatataatatccgatggagttgatgaatcggccggcaaatcacatgatgcattgatacattaatgcatttatatttaatgaagatgaaaataaattaggacattggcagtttatattaagaagatgaatagctatggcgtttcaagcagcagctttcaagttttgctttattgttggactgcaaacatgaatagtcaaggatcctagggggcaccgcccacatcgagctgagccatccaatgggcttgtctaagattttctgcaaatttgagcttcacatgaatgaaagcaaattcatctcagtgccgcggccgcacccgcgctgtccaccacgcctaagccgaggccggggccgcgccgtgcgcacgcacgatgcgccgttccgcgcatccgccgcactgcgtcgtgccaccacggagatgatgccctgccgcgccgcgtgcttgtcaccgggccgaccaccacgcacgaagaacaaagaaaggaagaagaacaagaaaagaaaaatgaaaaaaaaaagagggtgcgccatcggccgtcgccccggcgccgacagcattggcgcccgaccgccgaccgcgcctgcagcaccgccgccgcacggccacgcctgtggcgtccggccgttccccgttacccggcatccgcatatggcaaggaacaatcgggggagaaaaatgaaagaacgaaaaaaaaggggaaaaggcgacgaacagcaccagatggccgagccgccgtcgccggccgcccaccacaaatagcacgccatgccacgccacccttcggctcgccgcgccgcccccctggccgctgcaaccacgcatgaacgaggtcgacgccgctgccgtgcccgcgccggcctaatccggccgcgtcgccttgcccggccacgaccgccgcgacgggcgtgctcgcggcgccggtcgcccgcccgcacccgcgccgccgcttacgtatggccgcgctgtcgccgacctagccgcgccgcgccacgctgcatccgcatggccgctccaccgttccccggccgccgccccgcgccgcccccgccggtcgccgaccgagtcacgccatcggccgcccccacatggaaaggaaccatcggtggaaaggaaaagaaggaaagaagaagaaagggaaagagaagtggaaaggaccgatgctcatgtgattttgcaaatggacccttgcattttttggaaattaagtgcatattcctctgcaaaggaaatttaccttttaaatcctaatgttttaagaaaacacacaaataacctctgcatttgggatatttgtttgaaaagcatttgaaatttgcaaatatcactaaaatcatattcacgcataaaaagggtccatcggacattgcatttcgaccttgactttgtatttaaggtatcttttattgctgatgtttatgattatgaaatttatttatcgcatatatgattattgattatttatgatgcttttattacttttaattgatatcattgcagtaaatatatagaatagcatataatatattgaaattatttgcggcaattttgtgtaccatcgcattgcaacatttgtgtatttgttaacgaccaaatttggtaatatcagcatcggaaaaggagattagatcaaggtggagttgaaggcggagattgatcctagaacagagcaagaatcggctgaagtccagatcggctacgattaggatcggctgggtctgagtcggactaggtgagccgattcagccgattctgatagtataatttggtgtatgacattgggttgaatcgaggtgcttcaagatgattgccgcacattgatagagtcctgagaaggcaattgtatctattaattacgatgttttatgtaactttcttagagatatgtttgggcaaaagtctgccgcaaagacttatggtatcttagagcttgttagagatagtggtcgtgtccggtatggacatatcttgtaattctcgggtataaatagacctcgagccctatgtaattggtaacacacacgttcaatacaatttcggcgcatcgccacttttttgctttagttttgtttcgacgagttcttgctttcgggttgagctgcattggtttcgatcttcaacaagaggtaaaacttgttatgacgacttgcgttctcgagattagtgcttccatctttatgacactctaatcttgtctatataattcgtcaagttatcatatatcctacataatctttggcaatatcgtcatctaacctacaatcggctaatatctgttaatagaaggcagccgattaggttaaatagcgacgttgtcctagattatataagatatctaccactttatgaaacacccagcggcttgattgtctagatattgttcttcttttcatacttaatgctgcatcagttgagtttgatctattaagtcgtgcttagaatatcaatctctagcctgtcctctggttgccgattagggtagcatcggagtttcagccgatattatctgatttaaccatattcaatctatatgcttcaatgacatgttaaatctgccatttatgtcaggatcttattgcatttaagtatattaagcttttgtttggtatattatatttgttttgatatctttatataaagtagtatcggagtattagcggatacatgctagatctatctgattggctatgctataaacatatataatcctgttattaatatatatttcgatcgaagtgatttattctgtctcggcatggtggccgatctaccccaatcacttgatttaagtatatattaatataagaactatatatcgttaatatatacagccgatcgaatagatttagtttcttactatctatttataaccgccgatcgattcacatatgacatcggctcaaagataaatgatgtcatcggcacctagccaatcggctatcatttatagatttaaccacgaattctttgtctctatttcttgttgattacaggatcaaatcaactggcacgctcatacattcgaaggcgagctttggacctgcactggagttaagcagatctcccaggcctcatgttttctatcaacacgcttttggcacgcccggtgggacaaattagaagtcagcaagcaattcttcctcatggccgagaagccaccgctatcgccatcctcggctagcccaagcactgttaaataaaagatccagaagttggggttgactcgtgcccatcgatccagagaaattcacacctgagcagaagaaggattttgaagcaatgttgcagcaagcccaggatcaggtcttgaactcattcatgcagccccgcaagggaacattggttcagaagtataaagtaaaggtagttgcggatgaccctgggaccagttcttccaaaggtgaagacgggaaataagctccaaatggctcggctcaactgagtgacaaaggtgctaccgacggttctctaggaagtcaaggtgacaactctcaaggggtgcatggagttcaaggtgatggtgctcaggggttacaagagggaaatcttaatcagaatagtgatgcggcacaagatttttttaataatttccaagaccgggtcgactatgttgtgcaccatgctttgatcaatcagtctggggtgttagtcaataccttatcaaacatgacgaagtcaatagcagatggatcaatagctgagcatcaggctgcaagcaattcttcctcatggccgagagccaccgcagtcgccatcctcggctagcccaagcactgttaaataaaagatccagaagttggggttgactgatgtcaatgaaggaaacgtcgtgcccatcaatccagagaaattcacacctgagcagaaggattttgaagcagtgttgtagcaagcccgggatcaggtcttgaactcattcatgcagacccgcaagggaacattggttcagaagtataaagtaaaggtagttgccgatgaccctgggaccagttcttccaaaggtgaagacgggaaacaagctccaaatggcttggctcaactgagtgacaaagctgctaccgacggttctctaggaagtcaagctgacaactctcaaggggtgcatggagttcaaggtgatggtgctcaggggttgcaacgtggaaatcttaatcagaatagtgatgcggcacaagattttttcaataatttccaagaccgggtcgactatgttgtgcaccatgctttgatcaatcagtctggggtgttagtcaataccttatcaaacatgacgaagtcaatagccgatggatcaatagctgagcatcaggctgcaggcccagtttatttgcaaggaggtgtctttccaaattatcggcctttgattactgatgcccaaccatctatttaggcagttccccccgtcgcaccatcagctcagccgacggcgacggcatcgactcccttacctgctccgtcagcattggcaccaggccagctggtgaaccctcagttgttaatgagagagcagccacaacatagtgggcaggttgtgaatcggccgacgcaagatcaggttgctgccatgtttctgccgcctcaacctgctgttgatccaatacagcattagccgattcaacagacactcccgagtcagcaggttgtacaaccaatccagcaacaagttgtgtaaccagtccagcaaacgccaccaaggcaacagcctccgcggccgattcagcgaacgccattaagatagcaaatcattcagccgattcagcaccaaggctcaatgagcgcatcggccaggtttgtgacgcctggtggacaacctgtacaacaatttttaaatcaagtcgtcccagaacacttgtttcaccccgtgcagccggatggcacagtaatgcctcaagttgttcccgagcatttggcacgtaatattcagccgaaccttcataattaccagggggcagcttgaattatcaatatcagcctccttccccgcaagcccaatatcagtcagggggactggctcaacctcagtttgcgtctcaatacggtcagttcgagcccatgcaacaatagtcacagggagcagctcagcaacgaccgtgggccgatgtgattgctgatgtaatgagggaacagtttgggcttaaaccaaaagagactggaagcttgtatcggctgccttaccctgagtggtttgagagagttcctctcaacattcagttcaaagttccggacttctccaaatttttgggacaagatggtgtgtcaacttatgagcacattagccgatttttagctcagtgcggtaaagcatcggttgtggacgctctgagggttaggttgttccagttatctttgtttggatcggcttttacttggttttcttctttgccatatgggttcatcaatagttgggccgatttggagaagcaattccacagctatttctacagtggggttcatgagatgaagttatccgacttaacggcgattaagcagcggcatgatgactctgagatagctgcagccgaatgggtgaggagtaaaaaggtcataccgtgccaatgggtgaatagttctagaaaggaagagaagtatgattttgatattactaaagctgacaagatttttgatctgctactccgagagaagcaaattcaactccctgctggtcaaacgattccatcggttgaggaattaagtaaaaagagatatggcaaatggtataattctgggtctcattctactatcgattgcaaggtgtttaggcaacagattcaggtgcccattgaaggaggcaagattaagtttgatgattccaaaaagccgatgagggtcgatggtaacccatttcccgttaacatggtacacacagctagcggaccanttgatacggggcgcatgaggggttatcaagtaagttcggtagaattataaacaaatatcaaaggaaatacgacaagcaacaggaaaagcttcatgaagaagataatggtagctctgatcctcattggggctgtgagttcttcaggttctgttggaatgaaggtatgaggttaccatctatcgaggattgtcctggatgcagtgatgttgcagggggttcaagcccgattgtacgatggaggcaattggccaaaacagacaagagtacttgttcatcatagattgggcccagtaaccaacgtggtgattcgaaagatgatgaaaataagaagactgaatggtgtcctcttagtatttttacgaagaatcagaaaagaagggttcaaagattgaggagtagggaatgcttccagcaggtcgaacaagaaattaatcatcggctgaagaaagcaaaatcgaggcaggagtggtgtgttaagaatcaggctcctgtagccgatgatgttgcagctgatgaggcaaagaggttggcaaaaggaaagagtgttgtgacggcaccagttaacatggtttttaccttgccagccgaattcgggatcgatcaagccgatgtcgacgaggtggaagaggaatcggctaagttggttctatcaccagaacaggcggtgttcgagaagcctgaggggacagagaatcgacatcttaaaccattgtatataaatggctatgtcaatgggaagccgatgtcgaaaatttgatgccttatgctacgttcaggaagttgggtagaaatgccgaggatcttatcaagacaaatatagtgctcaaggactttggtggcaatccatcggaaaccaaaggtgttctaaatgtggagctgacagtcggcagtaagactattcctacaacgtttttttgtcatcgatgggaagggttcttacagcttgttgcttggaagggattggattcacgccaattgttgtattccttcaactatgcatcaatgcttgattcaatggcaagtcgacaaaatagagatcgtactagccgacaggtcagttaatgttgccagtgccgatttagctctttgggagatggatggccttgattgtttatctggaaaagtttggaatggagattttctaaaagtgtccgattctgatatacagccagttgaagttggagaacccaagctattattttgagggcgttgtggagggttcaagtgtctacactaaggatacggtagatgatctcgatgacaagcaaggtgaaggttttatgtcagccgatgatttggaagaaatagatataggtccaggtgatcggccaaggccgacatttattagtaagaatttgtctctagaatttagaaccaagctgatagagctcttaaaagagtttagagattgcttcgcttgggagtattatgagatgcctggactcagccaatcaattgtagaacatcggctacctatcaaaccaggggttaggccgcaccagcagcctccgaggagatgtaaagccaatatgcttgaacctatcaaagctgagattaagagtttatatgatgctggttttattcgtccttgccaatatgctgagtgggtttctagcatagttcctgtcatcaagaagaacggcaaggtgagggtatgcattgattttagagatctgaataaagctacaccgaaagatgaatatccaatgccagtagccgatcagctggttgatgccgtgttagggaacaaaattttgagttttatggatggaaacgcagggtataatcaaatttttatggctgaagaagatatccataagacagcttttagatgttctggtgcaatcggcttatttgaatgggttgttttgactttcggcttgaagagtgctggagctacatatcaacgggccatgaattatatttatcatgatctaatcgactggctggttgaggtctatattgatgatgtggttgttaaatctaaggaaataaaagagcacatagccgatttaagaaaagttttcgagaggcccaggaaatatggcttgaagatgaatccgacaaagtgtgcttttggtgtatcggatgggcagttcttgggatttcttgtccacgagaggggaattgagataactcagagaagtatcaatgcgatcaaaaagattaagcccccggaaaacaagaccgaattggaagaaatgatcggcaagattaattttgttcgaaggtttatttctaatttgtccggaaaattaaaaccttttacaccattgttaagattgaaggccgatcagcattttacttgggggcagagcagcaaaaggctttggataatattaaaggatacctgagttcccctcctattttgattcctccacagaaagggataacttttagattgtatctgtcggtcggtgagaactcaatcggctcaatcttgattcaggagttggatggaaaagaacgagttgtattttatcgcagtcgtcggttcttagatgcagagactagatgttctcctgtggagaagttatgcttatgtttatatttttcaagcacaaggttaaggcattatttactgtccaatgaatgtactattatatgcaaggccaacattgttagatatatgttatcggctccaatattgaaaggaagggttggaaagtggatattttccttaactgagtttgatcttcggtatgagtcaccgaaggcgattaagggacaagctatagccgattttattgtggaacatcgtgatgattcaatcggctcggttgaaatggtgccatggagtttattctttgatggatcggtgtgtaatcatggttgtggtatcggcctagttataatttcccctaggggcatattttgagtttgcttatactattaaaccttatgcgactaataatcaagctgagtgtgaagcagtgcttaaagggttgcaattgctcaaagaagttgaagccgatgctactgaaatcatgggggattctttactggtaatcaatcaattggcaggggagtatgaatgcaggaatgatacgttaatagtttataatgagaagtgccaagaactgatgaaggaactttggctggttactttaaagcatgtatctcgagaacaaaatattgaagctaatgatctggcccaaggggcatcagggtataagccgatgatcaaagatgttaaggttgaaattgcagcaataacagccgatgattggaggtatgatgtgcatcaatatttacataatccatctcaatcggcttctaggaaattaagatataaggcgttgaagtacacactattggatgatgagctttattatcatacgattgatggagtgttactaagtgtttgagtgccgatcaggctaaagttgctatcggcgaggttcatgaaggaatttgtggcactcaccaatcggcccataagatgaagtggttacttcggcgtgcagggtatttttggcccacaatgttggaggattgcttcagatattataaggggtgttaagattgtcagaagtttggggcaattcaacgagcgccgacgtcggctatgaatcctataattaaccgtggccatttagaggttcgggaattgatatgatcggtatgataaacccaccatcaagtaaagggtataaggttatattggtggcgacttgatatttcaccaaggtggtggaggccatttctttgaagaaagtagattctggggatacaacccaatttgttcaagaac

SEQ ID NO: 27599 - DNA, 5481 bp, Oryza sativa
  unsure (1)..(5481): unsure at all n locations
gacttcctggtgtactgtgacgcttcgcgccaaggattggggtgcgtattaatgcagnaaggtcatgtggtagcntatgccacacgcaagcttcggcctcatgaaggcaactaccctacccatgatttggagttagccgctgtggttcatgctctaaagatctggcggcactatctcattgggaattgctgcgaaatatataccgatcataagagtttgaaatacatcttcactcagtcggatctgaatcttcggcagagaagatggttagaactcatcaaggattatgatgtgggaatccactatcatcctggtaaggccaacgtggtcgccgacactctaagtcgaaaaagccattgcaacactcttggcgtccgtggcattccaccggaacttaatcaacagatggatgccctgaacctaagcatagttggtcgtggattcttggctacgctggaagccaagcctaccttgctcgatcgaatccgtgaggctcagaagaatgatccagatatgcatgggatcctcaaaaatatgaaacaatgtaaagccgctggtttcatagaagatgaacatggaaccctatggaacggaaatcgtgtatgcgttccggacgacaaggaacttaaacacctgatacttcaggaagctcacgaaagtccttattccatccaccctagcagtacgaagatgtacttagacttgaaagggaaatactggtgggttagtatgaagcgggaaattgcagagttcatggccctttgtgatgtgtgccagtgtgtcaaggcagagcaccagcgaccggccggacttctccaacctctccaagtaccagaatggaaatgggatgaaattgggatggatttcatcaccggacttccaaaaacccaaggaggatatgattctatatgggtagtcgtggaccgactaaccaaggtagctcggtttattcctgtgaagaccacctatggagggaacaaactagccgaactctacttcgctaggatcgtgagtctccatggcgttcctaagaaaattgtatctgatcggggaaaccagttcacctctcacttttggaagaaactccaagaagagttgggtacccgattaaatttcagcaccgcgtatcacccgcagacagatggacagaccgagcgtctaaataagatcctagaagatatgctccgtgcttgtgttctagatttcgggaagacctgggataagagtctcccctatgccgagttctcctacaataacagctaccaagccagcatacaaatggcaccctatgaagcgttgtatggacgcaaatgctggacaccgctattgtgggaccaagttggggaaagccaagtgttcgggactgataacttgagagaagctgaagcgaaagtcagaaccattcgggagaatctaaagttggcccagtctcggtagaagagttatgcagacaaccgacgccgtgacctggaattcgcagtggatgactttgtctatcttcgggtcacgccgttgcgaggcgtacgtcggtttcagacgaaagggaagctcgcacctcggttcgtgggtcctttccgtatcattgctcgacgcggagaagtcgcttaccagttggagctgcccgcatcattgggcaacgtgcatgatgtgttccatgtgtcgcaactcaagaaatgtcttcgagtgccatccgagcaggccgactcagagcaaattgaagttcgcgaagacttgacctacgtggagagaccagtgaaaatcttggacaccatggagcgcaggaccaagaaccgggtaatccgtttttgcaaggtccaatggagcaaccacgccaaggaagaagctacttgggaacgtgaagacgagctaaagtcagcccatcccgatctcttcgccagttcttccgaatctcggggtcgagattccgtttaacgggggtaggtttgtcacgtcccaaaacgtgtaaataaatttcctaaaagtcaattaaggcttagaggatttttgtatatttcctaaaagcctaaaatgtgtaaataaattttagtggaattctcagagcacaaataataattattaagaaataaacaaagttaaaatgattttataaaaagaaaaaccctaatgggccgaattcggcccatctccctccccctctctctcctctccccgcggcccactcggcctctccctgcgcgcgcgccgctgacgggcaggcccgcccgccaccctcgctgacgggtggggcccacccgtcatcccctttctcccaccgctcccgccgcctcccccgcaccctagcgccgccgccgccgcgaatcccgccgcctcccgccgtccccgcgtgcaataaagtggggggaatcactccccgtgatcccctctcccattccacccaattttgcatccctctctcccttggattcgtttggaaaccctcccctaatcccgccggcgccattgatggagcccgagagcgccacgccggtttccttcccctccggccactctctccctcttccaaccctatttaaaccctccccgcacctccttcgtccgtttctgcctctcgccggccttcctcctcgccggatttgagctcgcgacgtcactctctctctccgccgtcgccgccgagcttcggtccgccgccgtcgtcgccccggaccgcctcccacctcggcgccgcctccttcgggttcaccgcatcctcgccaacctcgtccacctctccgtttcggtcgccaaccaccggagcgccgccgacgccatcgacccgagccgcgccgccgcctccctccactccggccgcctcctccgtcgccgccgtcgacctagggtgagccgtggaccgtcgcctcctttcccccttccctcccctctctcggccgccgctccgccgtgccggtggtcgccggcggcgaccatcggggcgcgggcgcgccgcctcccgccgaccgcgccagcgtggccgccctcgtgcgcgccgagtggctgccgcgtggggcccggccgtcagccgcccgcgcccttgggtgcggctgacacgtgggacccacggcgccggctggtgcgagcccaggtgcgcccggtccactgtgggccgtgaggctgccgcgtgggccccactcccgtggacccggtccgcgcgtcccctcccccttggctgacgcaataaacccctttttaaattaaaatttaaatgaagaaattcgcaaatattcatttaaagagcatataaacttcaaatggccataacttggccatttgaactcggaattggaccgttcaagtctctaatttttccttaagaagtcaagaacccatttttgtgctttgttcctgcttgttatatggagtttattagagtaaaagccttttctttttcgttggtcgtgtagatgctgcagcttcggaagatccgctcttcgtggaggttgaagccgacgtttgggaaagcgagcaaggcaagtcacatcatccttgagcatattgaatcctagtttataaaattattttgatttaaattattgcattatcgctttacttaaattcacgcgttatcactgttttatctagccatgcctatttacctttgttatgaccttattattgttattgttattattaccttgttcaccctagattaaaccaaaccccaactagtggacactctactcatggtaccactagtatgcttttaggtagatgcttcgctggttaattaggcaacattaggtggttttacaactctagactttgggagtattctcatcacctggacactatggaattgttggatcattgtggaattggattcacacctccccctctattcaaaatcctcaaaatggttttaggctgggctcggggtgcatggttttgatagtagcacctcggccatataaggaccggtcttcgggcctctgttgcaaagcactaccgtacttccacatgtctagtgggtaaggcttagtttgtggctcagtctggttataaacaaaagtacacggatggagatggacgaagtcgggggtcgatggacatctctagggcaaatgaaggctacacgagctgcggcccggtagtcgagatgtcatggcacagggctggtgtcctgctgctaggggctcagtcctgcctacctgtcccgggggttccgcccgtaggtggggttgggtcggtactcttgtctatggctaggatgggttggaaactatgtcacgtcttccgtccgtataccatggtggtatgtggcacgtggttacacgtgaggaagatgtgtcttgtgggtaaagatgtacacctctgatcagagtataatctattcgaatagccgcgccctcggttatgggcaagccgagcaatgtacccaagttagtgttttaattcttaaaacctgcttaacaactaaaatgtggaatggttggcctgggttggcttgggacgagctgggacccagggtcgggttgccagttcggtctgaatcatcgtaggccttgggttaaggcaggttcgtgtgggttcacggccttgattaataatattgtatagctctaggaccgtgtttacaaaatagctttgagcaactaagtgtcttttagtgtagtttactgcaaaccctaaccccctatattatggctcccttgtactcccttgcatttattctgcacttgtggttttgtcttgttgagtacggtggttgtactcagtcttgctcaatttttcccaaacccagaagaggagcccctggaagataaaggcttttgtgtctagctcgtgcctgccgtcaagcgcctgtggtcgtcgccctagtcttccgctgtttttcgtttgtcttcttgtgtgctgggccttcgctgcccatgtaataaattaactatgtacgcttccgcttgtcaaactctgaattgtatcaacttttggtgtaccttgcctcctgggacaaggaataatgcacacacataaggaacgcccgttgggttatttccggtcgtgacatttgccgatgtacaatagccgatattgttatatcacccttagttgttttataattttatcaatgtttttgtcattgtaaaattaggggggcacatatatatcaaaagcatgttgacagaaaacacgaggcctgggagatctgcttaaatccagtgctggtccaaagctcgccttcgaatgtatgagcgtgccagttgatttgatcctgtaatcaacaagaaatagaagcaaagaaaccgcagttaaatctataaatgatagccgatcggctaggtgccgatgacatatcatttatctttgagccgatgtcatatatgcatcgatcggcagtcattaataaataagaagggactaaatctactcgattggctgtagatattaacaatatataatcattatatcgatatatacttaaatcaagtgattgggatagatcggtcgccatgccgagacagaataaatcacttagatcggggctgc

SEQ ID NO: 27600 - DNA, 6731 bp, Oryza sativa
cgacttcaccatgtttgacaaggtattgactagtaccccagactgattcttggaagttgttaaattgtatatgtgcagtgttaccatctgggctgagatcctcatctttcactccctgagaacaatcacccttatcacctgagccatctgcagcacttttatcacctaattgagctgtagcatctgaaacctgttctacctccccatccttggaagaacttgtcctaggaacatcagcaactaatttcatcttatacctctaaacaattgttccttggcgggtctccatgaatgagttcaagaattggttctgtgtttgctgcatcatcgcctcgagattattcttttgttcaagtgtcaatttgtctatagtgacgggcacgatgttgctttcatgaacttcggacccaccaagcttcgggatcctagatttgggaggaccctcttttgccagccgaagatggcgatgctggtggtttcttagcgatgagagaatgctattgcggttctgacttctaatctctcccactgggcgtgccaaaagcgtgttgacataaaaacatgaggcctgggagatctgcttaactccagttataaggttatgtctaagggagcatatatgttgcaagggcttgatggtgaagtctatgggcaagcgctcaatggcaagtatttgaagaaatattacccaagtgtttgagttaacgcatgatcggctagtattgccgatgcatgacagccgatgtgtttgcatcgccttgagatggccgatatggttatatcgcccttagttgtttttcatggtgtaatcggttgtggtttgccgatgtacaatggccgatatggttatattgcccatagttgtttttcatggtgtaatcggttgtggtttgccgatgtacaatggccgatattgttatatcgcccttcgttgttttataattttatcaatgcttttgtcattgtaaaattaggggggcacatatatatcaaaagcgtgttgacagaaaacacgaggcctgggagatctgcttaactctagtgcaggtccaaatctcgccttcgaatgtatgagcgtgccagttgatttgatcctgtaatcaacaagaaatagaagcaaagaaaccgcagttaaatctataaatgtagccgattggctaggtgccgatgatatatcatttatctttgagccgatgtcatatatgcatcgatcggtagtcattaataaataagaagggactaaatctactcgattggctgtagatattaacaatatataatcattatttcgatatatacttaaatcaagtgattgggatagatcgatcgccatgccgagacaatataaatcacttagatcgaaatatatattaataatgagtctatatacgttcatagcataaccgatcagatagatctagcatgtatcggctaatactccgataccactctatattaagatattaaagcaagtagaatatactaaacaaaagcctaatatacttaaatgcagcaagatcttaacgtaaagggcagatttaacatgtcaatcaagcatataggataaaaagtagttaaatcaggtaagatcggctgaaactccgatactaccctaatcagcaaccaagaagcgggctagagattgagattataatcacgactcataagatcaaacttaactgatgcagctataagtatgaaaagaaggacaatatctagacaatcaagccattggatgtgtcatagagtggtagatatcctatataatctaagtcaacattggtatttaacctaatcggctgccttctattgacggatgttggccgattgtaggttagatatcgatattgccaaggattatgtaggatatatgataactcgacgaaatacataaacaagattagagtgtcataaagatggaagcactaatcccaagaacgcaagccgccataacaagttttacctcttgttgaagatcgaaaccgatgcagctcaacccgaaagcaagaactcgtcgaaataaaactaaagcaaaaaggtagcgttgcgccgggattgtattgaacgtgtgtgttaaaagtaacataggactcgggtctatttatacccaaaaatcacaagatatgtccataacggacacgactactatctctaagaaactctaagataccataagtctgtacggcagacttttgcccaagcatatctccaaggagattacataaaacatcctaattaatagatacaattgccttctcaggactctatccatgtgcggcaatcacctcgaagcgccttaattcaacccgatatcatacatcagtatgcattgtcaaaatcggctgcatcggcttacctagcccgactcagacccagccgatcctaatcgtagccgatctggactccagccgattcctgttctatttctgaactcgatctccgcctccaactatgcttcgatctaatcttctttcccaatgccgatattacaaaatttggttgttaacacatgccccccaagtccggaatatttgataatttttcggatttgctgtaaatcgactctgagcaagtttcgcactttgccgttttccgaccattactgccgtgctttaaatactaaccattaccctcgagaaatctcacaccgtcctcctccgttttcaccgctgaaaccaactttgccctctttcgctccggcgatctccccaatgcacaaggcgatccctaggcgatttcgttcccgactagatctccgctcggggcgatgtcgtcttccaccagcccttctaatgcaccatcgggcaagtacgctgaggtaagtcctcaccagctagatcccttttcctctcatgaaattgatttctccttttcttctcatgttttccgcatcccgattcctttggatttgcagcacctttccaacctagtcgcgattcctagcctttcacacaaaaaccactattttcttggcccattcggcaatctcgaccccactgatttcatcatcggtgaaaccaatcggatcccctttagactagccaaccctaacctgggtcactggaagaatacattcaagtcttggccatctctcgaaaaacctactcctgataagagctagaccacctggtaccaacgcgtatcggctagtaagaaagttcactgggatgaaattggaatcggccaagcactcgctttcaccatagccaattctgctaaggatgaacctctgatggctgccgccacctacttctggtccaacaccatcaatgctttcttattcaaccaagggccgatgactccaactttaatcgacatcaccatgattactggattagatgtaacttcatcggctaaccctatgagtatgaacaccaagaaccaatttgacttgaagaccaaaagcataggtggctggtctggctatgtggcggcatatatgggccaagggtctgttacccctcgagagcatgtagctttcttgctgatgtggctggaaaagttcctcttttgtggatccagttgtggccctacaaccaactggcactctgtagctgaagccttagaatcaaagaaagaatttcctttgggcaaaatccttctcggctatctgtaccagatattgaacaatgcatctgctaaaatagccgtcggctcaatagttggagcaggtggaccatggtggctactgccaaacttggttaaacctgatagtcatgaaggttgtcaatcggccctctgtgacaaaagctgaattcccattgccagagccgattgtggaagatgacggagaagagcgcacccatcgcagatgcatgtcatatggagaatatgcatccacaccaaccgatgctggagcgaagctatcggctgagctactcaaggactggttctgcagcttctacgaaggttttaagaaagatgcacgaatctggtttccttatgaagactcagcagaccttgaacttccatcagactttagatttgaagacattaatcatgaaaaattccaaaaatccagagaaattcttatagctgcaatcagcccatgcatcttctctgtcggcattcaccatgggagaaacatccaagtctcctacgagttttatcacccacttggattgggccaactcccaatcggcttattctttgccgacaagattcagtgccgaggacaaatcacatccactctaatgatggatcggctacttaacctaccaggaccccctctgggcagtattgataatattgagttggcaggatttagaagcaaaaactttgacagatggtggggtaaatggaagatgcatctattttatcaatcggcttcaatgtatatgacagatctattccctgacgtcataccccaggtaaactttgtcattaccaaattgcataactagttagccgattcattacttgactaatctcttgctcctgttttgcagacaacagagtcctcccctcctcatcaaagtaatagttgcaggaacattgaatatgcttcaggtttaattctgaatggaggtggactatctcccccttttatcggctaccatgcccccaagacttcaactttccttcacggcctaactagggaaccagccgatgcaggcaagaaaaggaaaaccagatcatcagccatgagtaccttagccttggctccaaagaaaaagaccaaattcaagaaaactcaaccacaaccaactgatatgtcgactgatgatctgcccgccttggatccatctattaaacaagctttagatgaagaagaaattggtgaagatgttgaccaagctgtagccaaaatgagtgacacagaaagaacactatcggctttacccaagcaaacgcctccaactccttctgcccccgtttattttacataagtaagtacctctctctttggctaattacccatagactttgtggttgcagaagaagaaaactactgtgaagaaaaaaccagcagcaacaattgttaaatcggctccaccagtaagatgtccttaattcctttacttaatcaatctcaaccgattctatataacacttgtctatttcgcagcctcctcctccttctcctcctgtacagcaatcgtcaagtaatcagactccatcggctgtggggagtcatcacgtcgaagaggaagaacaaccagctgcttctgctatcccagtaagtttccctttgtctcaacaattagatcagctataatttacccagctcttattctttccgaaattgcctctgcaggctctagccgatctcttctcttttgacatcagagattaccttgatgaggcagaagaagacacttcaagcaaagccctagctcccctatccgatgatgtgagaaaaacacttgaagacatctctcatcggctagaagcctcttctttagacaatttggtagttgactttgggtcaattaggacgcggctgcatgaagttcaagctctgattcccgaagatctggccgatgtcctaactccagccgtttatctcgagcaacatcagttcaagctggaaaaagccaagctaagactagccgaacgccatgagcgcaaagagattaaggccataatccaagcgaattggcagcttgtgcatgaaaaaaaaaccaaacttgatcagctatctggaggtccaatcaaatccaatattgatcggctcgaagctcgcaagattgagctcttggcgcaacttgaagaatgcaatgccgagctagatatggaacacagaaatctagccgatctcccaaaatcaattgaagaacaaaaagcaaggctcaaatcggctatcaaaaatgttgctgacctaaccaagtccctgaaagtcatctctggaactgatgctcaagatgcccaagctattgtagaagtagaacaaattaggcaaaggcctattttggctatccagcgatacttgtctcaataacttttgtgtaataggactcagaaattttttgtaatcagctaagatgctctagtactttactgtcctgaaaatcctttgtgccgattaatatgactttgaaattcgctaaaaaaatttgcctcaaaaaatttgcattgcattttgatatatatgtgcccccctaattttacaatgacaaaagcatggataaaattataaaacaactaagggcgatataacaatatcggaaattatacatcggcaaaccacaaccgattacactatgaaaaacaactaagggcgatataaccatatcggccatctcaaggtgatgcaaacacatcggctgtcatgcatcggcaatactagccgatcatgcgttaacccaaacacttgggtaatatttcttcaaatacttgccattgagcgctcgcccataaacttcaccatcaaacccatgcaacatatatgctcccttagacacaaccttataaatttggaacagtccttcccaattcggcgaccacttgccgaatttactatcacgagtaccaatcggcaaaatcaatttccatataagttctccttccgaaaaatctttaggtaccactttcttattaaaatgccgagcaatacgttccttatccttggtaacctttgcaagggctcgcaatcgtcactgaaccagatcctccctctcatcggccataaggttgtaatactcataagctgttaaatcattttgtaattccgttcttcgagagccgattctaacctcccatggcaaaacagcctcatgcgcataaagaag

SEQ ID NO: 27601 - DNA, 1643 bp, Oryza sativa
atgcatcggctaaaaagccgttggctcaatagttgaagcaggtggaccatggtggctcctgcaactttggttaaacctgatagtcatgaacattgtcaatcgcccctctgtgacagaagctgaattcccattgccagagccgattgtgaaagatgacgaagaagagcgcacccatcgcagatgcatgtcatatggagaatatgcatccacatcaaccgatgctggagcgaagctatcggctgagctacaaaaggactggttctgcagcttctacgaaggttttaagaaagatgcacgaatctggtttccttatgaagactcagcagaccttgaacttccatcagactttagatttgaagacattaatcatcgaaaattccaaaaatccagagaaattcctatagctgcaatcagcccatgcatcctcccagtcggcattcaccaagggagaaacatccaagtctcctacgagttttatcacccaatgagcttggccagacgacttggattgggtcaactcccaatcggcttattctttgccgacaatattcagtgccgaggacaaatcgcatccactctaatgatggatcggctacttaacctaccaggaccccctctgggcagtattgataatattgagttggcaggatttagaagcaaaaattttgacagatggtggggtgaatggaagctgcatctatttcatcaatcggctgcaatgtatatgatagatctattcaataacgtcataccccaggtaaactttgtcattactaaattgcataaccagttagccgattcattacttgactaatctcttgctcctgttttgcaaacaacagagtcctcccctccacatcaaagtaatagtagcaagaacattgaatatgcttcaggtttaatctgaatggaggtggactatctcccactctccttcacggcctaactagggaaccagccgatgcaggcaagaaaaggaaaactagatcatcagccatgagtaacttagccttggctccaaagaaaaagaccaaattcaagaaaactcaaccacaaccaactgatatgtcgactgatgatctgcccgccttggatccatctattaaacaagctttagatgaagaagaaattggtgaagatgttgaccaagctgtagccaaaatgagtgacacagaaagaacaccatcggcttcacccaagcaaacgcctccaactccttctgcccccgttcattttacatgagtaagtacctctctttgacttcttctgaaattacctccctctttggctaattacccatagactttgtggttgcagaagaagaaaactgctgtgaagaaaaaaccagcagcaacaattgttaaatcggctccaccagtaagatgtccttaattcttttacttaaacaatctcaaccgattctatataacacttgtctatttcgcagcttcctcctccttctcctcctgtacagcaatcgtcaagtaatcagactccatcggctgtggggagtcatcacgtcgaagaggaagaacaaccagctgcttctgctatcccagtaagtttccctttgtctcaacaattagatcaaaaataatttacccagctcttattctttccaaaattgcctctgcaggctctag

SEQ ID NO: 27602 - DNA, 15367 bp, Oryza sativa
ttgggaaaataaacaaatttttgaaattagtaaatttgtcttgaacaataagtgttaaaaacaaaccaggggttaatcttggagattattagtgcggtatttctctttagctatattttccagcaatatccaattattaacctcgctcattttcgaaaaagaatattgtatctatactattaaaatttgagtaatattaattaacaatataaacaaactatgtctacactataccctaaaacaactcagaatataaaaaacaatttattttcatcaccttcatcttctctttgtccttttttgaagggcatcatgcatgataatagagcatgctatgcaatcataagtatagctgggacatacatatagtgggctgagatagtctcaatgagaggatacctttggcaatagagctcaacttcctacccaggagacaattctctatgagggcacctataattaattaggcattaaaattatgctccacgctggtctagagaggcacggctatgagaaacccatatctcacggcagcagggaagaaagccttggcgcccgcggtcaacttcacccactacacgaatattcttatctaatttaacgttgttatcctattaattgatagaagaggtattgttagaatatttatacatagatttggaaagaagtgagacatggacactcatctaaataacatagatgattttttagttaactaataatgtattaatcttattgtaatggtatgatgtagtttgatctattaaatatactctcaactttcaaaatcaatgataatgataataagtatccactaaaacaatacaattgtcatgagaagaggtgacaatagaaaagtgatttttattttaaaattaggagacactcttatgatctagtatttttgagacggtatagatgtttttttattataagataatatataatactctacaatgaatatggcaagttgatttattttattattcttttcatcaataaaaaataagatgccaacctttttcctagctagaaagaaagattacaaatgatttcttataggcatgaattaaatactaaataatttcaagttaccaaatagtttggaaaaaaattaccgagcgatgctaatgaagaaattttttgaagaaattgtacttttgaagcatggcaggtatcatctggttatattccacttatataggtttccaaaacacaacatgctatacatgcccgcgcattgcgcgggctaccttcctacttattttggaattacacttaaaggcatttatgaatggcaacctatcctattcagacaaatttcaaatgctaatcgccgtggccaccaactttacaaaaagtaacaaaataataataataataattgcacactatcaagcacctacgtataaaagtttcaaccctaaatttgtgttggtacgcagagtgaatatactcagtgatcttttattctttaattaccttttgcagttgagaagacacagatggggagagttgggaatccggtaacagtcgatatgccagagatattgacgatgttgcccttgccggaggccttgaggagagggtgcaccagctggcttaggtggaagcatgactccaggttgcccgccatcacactggagagctccttcggtgtcacgttcaccgctggttttaggaagaagaagccgacattgttcacctgtaggtaatttaaattaagtcatatctaatagcgatcgattgcctgcatttctagcagatttaatccatacttgcatgcctaaattatttacccttcttttgggagtgtttggtcgcttgatagtggtaagaccgggtcaaaagaagaaatgcccaggctagcatcaaccagatgtgagaatacaattgtgacttgtttggttgtttagctatggtaagtctgtatatgtttaaagaaattttatagccgtgaaaggtataaaaaaatttagtgtaaatttagtacctcctaataccgagaggtccaaattttacagtagaaaatatgatatttttcggtaccttctcatagactataaactcactcatatgtttaggatgttgtttgattaattgcaccggagatgttgaataagtagtataagaaaaaactattagaactagtttagctgtctaagaacaatttaatatattttttttgaacgaattgcaccggacgatgcaagttttatattaacaagattaccaatttgggaggcaataatcaggaaaagggaaaaaacaccaaagcaataccaacacatgccaactgcacctgcacacactccccggaaaggatctagcatcaagccggcctccgctatgcatgattggatgccgctagccccacgaaggggtcacaaacgacctttctaagccaactccaaccaaaagatccccccataggctctgagccatcgccacgtagaagggttgccaaaagagagggcgagagagaagaagatccactcctcccacgagcaaaccggatggcaacatccaagaatgttgtcgaagactgaaagatcgaatgttggataggcaacagagccgcccatccagaagaggacttggttttcacccgaggtcctgctagagggagaggtaggcctctcaacaacgcccttaggagggattgaaacgttgaagacattgtcgttgtttgcccagacaaggtgtcaagcaaggctttcgcctatagccgatctcctcctcctgttatgacaccgacgtcctgccaccgtcagacctctgctagcatgtgctctctaccacactgatgcccctccgtcgactggccatcgtcgcaccgggagcaccactgcaccgacgaccctcatcggctcctccgcacgccgaccgtcccaattctacaacatgaagcaacgagggaggcgagtagaacacctccagtgctaggcaccaccaccatctctacgctagagctctccacgaccgtatctggagacagaacggctaaaggagggggagcactaggggaagaaggggcatgccaggcaaagaggggagacccatcgtcgttgccaattttgtgccgccaccatagggtccagctcaccgtcacccccggcctcccactgatacccacgcgcgcggcctcacgcacactgccgtccactgcagctagctgctccgtcctcccgccggcctctccctcctggtggctatacgcatggcccgcaccgctactgcccgcccgctaccgccatccgtgcccagcctctccctcccagcagctaccatcgtgcctctcattgccttcgccccccgctgctcgaccccagctagatccgacgcggaggcactagatccagccgtaggagcatcagatttggtcgcggaagtgccggatctgccacctccctcgccggggaggatgtgccgctgccacctccaggtctccggttcacaactcgtcacgctgcctctcccacgctcgagacagggcgcctctacgataaggcccctccaccgccatcctggctcatcgcccggttctccgacgacacgctccggcggcagcgaggtggggggatggggaaggtgcggcagtgggggctagggttttgtccctgagtcgcctaggcgtgggtgacgcgagagcctagaacaatttaacacatactacctctatcccaaattaattgtgattctaggttgtttagtgttggaggcatgccatgaagcccttcgaccggacctgccgaaactatagtaccagcaaggattcaagccaaagatgtcaaggccattcaggcgaagccctatggcgaaagccataagcgaagatggcgaaggctggaaagccgcgtcggtattctgaaagtaaaggcatctcgggtgaaggcatcttcggcgaactacaaagacttcgccatgacgagttcggcatcaaggaggcccaacaggccgcccctggccttttaagcccgtttgccatagaccaggcccagcctatcagcccattaaaggcctatatgtgcaaatgacactgcatacccatgtaaatgtccctttcataagggcaaccatgtaaaatcccctgtaacactaaaccctagaaagtgcaagcttgtgctaaggctataaataaacctctagggccatgtaatggggggatccccaaaaaatatttcacgaatcaatacaattgcttttacattccaactactgttgagagaaccacgcctttcgacatggcatagttgtacattcgacaacagctggcgccgtccgtggggaacccagaccgaaaaggcgaaatgggacccctttcaccacaccctttgccacagtacccgcgtggtacggcgacaagggctgggggcgaaagtgagttaagtccaagttggggggctacgaagccgcccaagcctctggacacctttcgccacatgccacgcccttcgccatagtaccaataaggcacggcgtcaagggctgctggcgaacaggtttcgccaacccacgcccttcgccatagtgccaatatagcacggcgtcaagggctgcgggcgaacaggtttcgccacacgccacacccttcgccatagtaccaataatgtatggcgtcaagggttgggggcgaatataagttgcttccaagctggggggctacgaggccaccctagcctctggagcctttcgccacacccacacccttcgccacagtacccgcgcggtacggcgacaagggctgggggcgaaagtgggttaagtccaagctggagggctacgaagccgcccaagcctctgtcgcgaccgagaaaaatacattttcccaaatgctagtgtattaatccccgtcccaggaaaagccgaggtacaccacacaaacatgatacaaaaggcacatctttattatatcgataatatttacattattacaaaggcacttaaggcctgacaatcaaaaataaacagcagcggactagcgggcctacggctccatcttcacaggtgctcaactggggtataatccaggactccacctaagacttcttctccaaagcttctcttactgaagggggggaaagattgagcaagaatgagtacaaccacagtactcagcaagccacaccggcggatgcatgattaatacaagggggtacaaggggtaataatataggggttaagttttgcagaaaacagcatttaaaagtcacttagttgcccaaagccattttataaagacgatcctagagttacacagtgttattaatcaaggccgtgaaccctcacgaacctgccttaacccaaggcctacgatgattcagaccgaactggcaacccgaccctgggtcccagctcgtcccaagccaacccaggccaaccattccacattttagttgttaagcaggttttaagaattaaaacactaacttgggtacattgctaggcttgcccataaccgagggcgcggctattcgaataggttttactctgatcagaggtgtacatctttacccacaagacacatcttcctcacgtgtaaccacgtgccacataccaccacggtatacggacggaagacgtgacatagttcccaacccatcctagccataaacaagagtaccgacccaaccccacctacggccggaacccccgggacaggcaggcaggattgaacccctagcagcaggacaccagccctgtgccatgacatctcgactaccgagccgcagctcgtgtagccttcatttgtcctagagatgtccatcgacccccgacttcgtccatctccatccgtgtacttttgtttataaccagactgagccacaaactaagccttacccactagacatgtggaagtacggtagtgctttgcaacagaggcctgagcttaatccttatagtacccgaggtacgactaacaaaacccaaccacgcacctcgagcccagcctaaaaccattttgggggttttgaatagagggggaggtgtgtgtccaattccatcataagccaaccattccatagtgtccaaatgatatgagaattcccaaagtctaaagttataaaaccacctaatgttgcctaattaatcagcgaagcatctacctaaattcatactagtggaaccatgaatagagtacccactagttggggttttgtttatcctagggtgaacaaggtaataataacaatagcaataataataaggtcataacaaagataaataggcatgactaaataaaacaatgataacgcgggaatttaaataaagcgataatgcattaatttaaatcaaaataattttataaactgggattcaatatgttcaaggatgatgtgacttgccttgctcagagagaacggccttccgaaccttcggcgacgaccacaaagcacgcttcgggaacctccggaacgacagaagctacgcgaagcacacaagcaaagctacaagcctataaagaagcaataacaatatataaaaagaaagcacacggttctttaggttataacaaacattaagagacttgaacgggtcgattcggagctcgtatgaccaagatatgatcatccgaagtttaatgctgttatatggagatttgcggattattataattaagctttgcaactataaaacatatggaagcgctagcctggaaaagacaggaaggctgcgctgttgacatgcggaccccacatgtcaacctaaaggaccgcggtagaccgagtacacagagacggtccacgggtcgacggaagcggaccccgtgtgtcaaccgaggcgagtggccgacaaacggactccactagacaccacacgggctgcacacatggaaaccacgcggctactgagcggacacactaacacggacactacacggtcaccacccgcacacgtgaacgactaccgacaccggtacacaggtaccggggtcgacaaccgcacaacgggtacggggcgacaccgaaaggacgaggacggggcagcgagaggagagatccttaccaccacgcgacaaggcgtgggaaagacaacgacgaacgggtgcggcggagacggacggcgagggaacgacttcggcggcgatccttgaacgaaggcgagacacggccggcacgaggcttgacgacgcggaggcgaggacgaagacgatgatggggctgcggcacttgacgaagcgaggacgacgaacgagaacggctggacggagggacgaacgccacgacgaccaggaacgacgagagggcgacgacgacgacgaccggggccggcgagaaagcgacgagggcagccggcagcggctgcacggagacgaggacggcgcggaacacgccgctgcgatgccgacgacggaggcggcgccgcgagacgacgagccggcgaggaggaacgatgacgacgacgacgaacaccggcggggttcggtcgaaggggagacgaggccgagggtgaccttgccgctgcgatgccggaggtggtggtggcgcagcgagccgatgagccggggaggagggaggggcggccgaagggacgccggcgacgaagaggatggagaggccggcgcgggcgacggcggtctccgaacgaatcatagggtaggccggggtggaggtcgacgcggcgacgccgagggaggagacggcgcggccggcccgcacttgagcggtgcggcaggggcggctggaggcagtgggtggcggcaatgccacccgttgccggtggggacgcgcctccggcggtcaccgcgcgaaacggagggcaggccggggagaggaggcggctgcgacgccggggaaggcggcggcacggccggccggcgcacgggtgaggagggagaggcggctggaggcggttgacgtgggggaaagagaagggcgacgacggggaggggtgatacgaccacggggaggctcgggatgaggctaaaacgagagaacggagcgagggggttccgttttataggcgtggggagggagctggccacgggaggagcggggaacggtggcagaaaaggcgcccggcggccatggaaggcggccatgaatggcgcagccgttccggtcaaaatagtgcacgattaaaggggagattagggggaaaagggagaggaaggaaaggggattaattccccccaattaattttggaatccaatgcttaaatcgtgcggtttcgagggaggaacgaactagggttttcacgggagagagaggaggccgtgcgggaggaggaagacgaccggcgcgtgggccccacgcggtcagcgcgcgcagtcagcgcacgcgcggcgcgcgtgcacgcggctggcttggctcggcctggcttgggccgggctgctgggccgaggcaggccgagaggaaggaggaggagggagtgagctgcccgggaggaaagagagaaaaacaaagagaggggagagggatttggactgtgggccgagggggagagagggagactttgggccagacttggcccaaagggaggagggggattatttttagctttttctttttaataaactttgttaattgttgttgtttaataaatattttcggtgctctgaaaattcaagtaaaatttgagggctccttttagaccaaggagaatttaacaaaaattctccggaccacattcgaatttttctagcaggtattttagtgtttgtcaatttctttttgaattttaattaattctattattccttttagaaaataatttttatttcgggatgaatttatcagggcgtgacagcctctgcacacctttcgccacacgccacgcccttccccatagtaccaataaggcacggcatcaagggctgcgggcgaacaggtttcgccaacccacgcccttcgccatagtgccaatatggcacggcgtcaagggctgcgggcgaagaggtttcgccacacgccatacccttcgccatagtaccaatgaggtacggcctcaagggttgcgggcgaggaggtttcgcccacccacgcccttcaccatcaaaccaatgaggtacagcgtcaagggttgcgggtaaagaggtttcgtccacccacgcccttcgccatagcgccaataaggcacggcgtcaagggctgcgggcgaacgggtatcgccaacccatgccctgcgccatagtaccaataaggtatggcgcatggccttgcaggcgaagaggttacgtccacccacgcccttcgacatagtgccaataaggcacggcgtcaagggctgcggacgaacaggtttcgccaacccacgcccttcgccatagtgccaatatggcacggcgtcaggggcagcgggcgaagaggtttcgccacatgccatacccttcgccatagtgccaatatggcacggcgtcaagggctgcgagcgaagaggtttcgccacacgccatacccttcgccatagtaccaatgaggtacggcatcaagggttgcgggcgaacaggtttcacccacccacgcccttcgccatcgaaccaatgaggtacggcgtcaagggttgcgggcgaagaggtttcgtccacccacgcccttcgccatagcgccaataaggcacggcgtcaagggctgcgggcgaacaagtttcaccaacccacgccctgcgccatagtaccaataaggtacggcgtcatgggcttgcgagcgaagaggtttcgtccacccacgcccttcgccatagtgccaataaggcacggcgtcaagggctgcgggcgaataggtttcgctaacccacgcccttcgccatagtgccaatgtggcacggcgtcaagggctacgggcgaagatgtttcgccacatgccatacccttcgccatagtaccaatgaggtacggcgtcaagggttgcaggcgaagaggtttcgtctacccacgccctttgccttagtgccaataaggcatggcgtcaagggctgcgggtgaacaggtttcgccaacccacgcccttcgccacagtgccaatatggcacggcgtcaagggctgcgggcgaagaggtttcaccacacgccatgcccttcgccatagtgccaatgaggtacggcgtcaagggttgcgggcgaacaggtttcgcccacccacgccctttgccatagtaccaataaggtatggcgtcaagtgctgggggcgaaaataagttgcttccaagctggggggctacgaggacaccctagcctctggagcctttcgccacacccacacccttcaccacagtacccgcaaggtacggcgataagagctgggaacgaaaatgagttgcttccaagcttgtcacgaccggaaataacccaacgggcgttccttacgtgcgtgtattattccttgtcctaggaggcaaggtacaccaaaagttgatacaatatagagtttaacaagcgggagcgtaactagataatttattacatgggcagcgaaggcccagcacacatgaagacaaacgaaaaacagcggaagactagggcgacgaccacaggcgcttgatggcaggcacgagctagacaccaaagccttcatcttccaggaactcctcttctgggtttgggaaaaattgagcaagactgagtacaactaccgtactcaacaagacacacccataagtgcagaataaatgcaagggagtacaagggagccataatatagggggttagggtttgcagtaaacagcattaaaagtcacttagttgctcaaagctactttgtaaacacgatcctagagctatgcaatattattaatcaaggccgtgaacccacacgaacctgccttaacccaaggcctacgatgattcagatcgaactggcaacccaaccctgggtcccagctcgtcccaagccaacccaggccaaccattccacattttagttgttaagcaggttttatgaattaaaacactaacttgggtacattgctcggcttgcccataaccgagggcgcggctattcgaatagattatactctgatcagaggtgtacatctttacccacaagacacatcttcctcacgtgtaaccacgtgccacataccaccacggtatacggacggaagacgtgacatagtttccaacccatcctagccatagacaagagtaccgacccaaccccacctacggccggaacccccgggacaggtaggcaggactgagcccctagcagcaggacaccagccctgtgccatgacatctcgactaccgggccgcagctcatgtagccttcatttgccctagagatgtccatcgacccccgacttcgtccatctccatccgtgtacttttgtttataaccagactgagccacaaactaagccttacccactagacatgtggaagtacggtagtgctttgcaacagaggcccgaagaccggtccttatatggccgaggtgctactatcaaaaccatgcaccccgagcccagcctaaaaccattttgaggattttgaatagagggggaggtgtgaatccaattccacaataatccaaccattccatagtgtccaggtgataagaatattcccaaagtttagagttgtaaaaccacctaatgttgcctaattaagcagcgaagcatctacctaaattcatactagtggtaccatggatagagtatccactagttggggttttatttattctagggtgaacaaggtaataataacaataacaaaaataataaggtcataacaaaggtaaaaaggcatggctaaataaaacagtgataacgcgggaatataaataaagcgataatgcaataatttaaatcaaaataattttataaactgggattcaatatgttcaaggatgatgtgacttgccttgctcgctttcccaaacgtcggcttcaacctccacgtagagcggatcttccgaagctgtagcgtctgcacgatcaacggaaagaaaaaaggcttttactctaataaactccatataacaagcaggaacaaagcacaaaaatgggttcttaacttcttaaggaaaaattagagacttgaacggtccaattccgagttcaaatggccaagttatggccatttgaagttcatatgctctttaaatgaatatttacgaatttcttcatttaaattttaatttaaaaatggtttattgcgtcagccgaggggagagggcgcgcggaccgggtccatgggagtggggcccacgcggcagcctcacggtccacggtccacggtggcccactcggcgcgcccgagtgcggctaaaccggcgcggtcggcggaaggcggcgcccccgtgccccgttggtcgccgccggcgaccaccagcgcggcggagcggcggccgagagaggggagggaagggggaaaggaggcgacggtccacggctcaccccggggcgacggcggcgatgagggaggcggccggagcggagggaggcggtggcgcggctcgggttgatggggtcggcggcgctccggcggtcggcgaccgaaacggagaggtggacgaggtcggcgaggatgcggcgaagccaaaggaggcggcgccgaggtgggaggcggtccggggcgacgatggcggcgtacaagagctcggcggcgacggcggagagagaaagcgacgtcgcgagctcgaatccggcgaggaggaagggcgccgagaggtgtaaacggacgaagaaggtgcgggaagggtttaaatagggttgcaaggggaagagagtggccggggaggtagaaaaccggcgcgggaggtccggccgccatcaatggcgccggcgagatttgcgggggcaaatccgtccgtttgaaaccgagagagagagggaaaaatggggggaaaggaagagggaatcacggggagtatttccccccactttattgcacgcggggacggcgggatgcggtggattcgcggcggcggcggcgctagggcgcgggcgaagcggcggaaacggcgggagcggcgggaggtcagggatgacgggtgggccccacccgtcagcgagggtggcgggcaggctcgcccgtcagcggcgcgcgcgtggggagaggccgagtgggccgcggggagagaagagagagagagggggaaggagagatgggccgggccggcccaagggagggaagggggacttttagggtttttctttttataaaaccttttcaactttgtttatttcttaataattattatttgtgctctgaaaattccactaaaatttatttacacattttaggcttttagggaatatacaaaaatcctctaagccttatttgacttttaactttgcacattttaattgttggaggctttcacaaggattttaattattctagccataatttaaaggatatatttttgggtcattttgggacgtgacattgagcatcacttccagaaatgatcttttgggacttggttaggtcagcgacattcttgatagccgatttaagccttgctttttgctcttcgacagattttgggagatcggctagctttttgtgctccatatccaattcagcattgcattcttcaagctgtgccaagagatcgttcttgcgggcttcaagccaatcgatattggatttgattggaccttcggatagctgatcgagtttgactttgtcttcatgcacaagctgccgattgacttggattgtggcttcaatctctttgcgctcacggcgttcggctaatcttagcttggctttttctagtttaaattgatgctgctcaagataagcggctgcagttaggacatcggccagttcttcaggaattagagcttgtacttcgtgcaatcgtgtcctaatcgatccacagtcgaccactaagctatccagagaagaggcctctagctgacacgagatatcttcaagtgttttctttgcatcgtcagataagggagctagagctttgcttgaagtatcttcttctgcctcatcaagataatctttgatatcaaaagagaagagatcggctagaacctgcaggtataagtttagaaagtttgagagctaagtcaatatagtcgatctaaattcttgcatcaaaggaaaacttactgggatagcaggagcagccgattgttcttcttccacaatatgatgactccccacggccgatggagctcggtcactcgatgattgttgtacaggagaaaaagaaggagcaggctgtaaaaagacaagtgttagaaaaaatcggctgaaatcaactagtaaaattgagagtgtcttactggtagagctggtttgagaattggagctgccgatttcttttttatagcagttttcttcttctgtaactacaaaacctatgagtagttggttgaagaataatgattataaaagggtttgcaaggaaagatgttttactctgaagaagtgagtgggggcagaaggagttgaaggtatctgcttaggcgaagccgatggtgttttttcagtatcacttacttcggctgcagcctgatcaacatcatcctcaatatctttttcatccacagcttgttcaatggatggatccaaagcaggcatgtcgtcggttggcttggttttcttagacttggcctttttctttggagctagagtcaaggtgctcacaaccgatgatctagttttccttttcttggttacatcggttggttctctgatggcgccttggaggagggttgagaccttgggggcatgatagccgatgacagggggagacaattcgcctccattaggaatcagacctggggcatattcattgttcctaccaatattgctctgatgtggacgggaggactctgttgtctgcaaaacagggacaaaagattagtcaagtaatgaatcgactaaccgttatgaaatttagtgatgacaaagtttacctggggtatgatgtcagggaatagatctgtcatgtacattgtggccaattaataaaatagatgcaatttccattcaccccaccatctgtcaaagttcctgctcctgaatcttgctaactcaatattatagggtaatagaattcgtaggagacttggatatttcctccttggtgaataccgacaggtaggatgcatgggctgattgcagctgtaaagacttccctggacgtttgatatctttcatgattgatgtcttcaaatctgaagtctaataggagctcaaggtctgctgagtcttcataaagaaaccaaacctgggcatctttctggaagccttcaaaaaagctgcagaaccaatctttgagcagctcagccgatagttttgcaccagcatcggttggtgtggatgcatattctccatatgacatggatctgcgatgggtgcgttcttctccattgtcttctacaattgggtccaaccttgggaattcagcttctgttacagatggccgattgacaactttcatgactac

SEQ ID NO: 27603 - DNA, 8156 bp, Oryza sativa
  unsure (1)..(8156): unsure at all n locations
aggtggacgagatcggcgaggatgcggcgaagccgaaggagacggcgccgagctggnagcgggtccggggcgatgacagcggcggaccggagctcggcggcgacggcggagagagagagcgacgtcgcgagctcaaatccggcgagaagaaaggccggcgagaggcgaaaacgtacgaagnaggtgcgggggagggtttaaatagggttggaaggggagagagcggccggaggggaaggaaaccggcgcggcgctctcgggctccatcaatggtgccggcgggattaggggagggtttccaaacgaatccaagggagagagggagggaaaattggggggaaagggagaggggatcacggggagtgattccccccactttattgcacgcgaggacggcgggaggtggcgggattcgcggcggcggcggcgctagggcgcgtggaaggcggcgggagcggcggaagaaaggggatgacgggtgggccccacccgtcagtgagggtggcggacgggcccgcccgtcagcggcgcgcgcgcggggagggaggccgaatgggccgcgggggagaggagagagagagggggagggagatgggtcgaactcggcccattagagagaaggagggattttagggtttttctttttataaaatcattttaactttgtttatttcttaataattattatttgtgctctgaaaattccactaaaatttatttacacattttaggcttttaggaaatatacaaaaatcctctaagccttatttgacttttaactttgcacattttaattgttggaggctttcacacggattttaattattctaggcataatttagaggatatattttagggtcgttttgggacgtgacagcatctctatggtgggaccacttccagctacgcagccagagggacagcctatcacctgggcccatttcaccgccgccttccggaggacccatgtgcccgccggagtcatggcccttaagaagagggaatttcgggagttgaaacaaggcaaccgctccgtgatggagtatttgcacgagttcaataatttggcccggtacgccccagaggatgttcgtgaagatgaggagaagcaggagaaattcctggcagggatggaccctgagctatctgttcgtttggtctccggggactatcctgatttccagccctggtggacaagagcatccgcctggaagccaagcacaaggaattggagtcgcacaagcgtcgcttggcgaatttccgcaaccaacagggggctaaccaaaggatccgctacaccaatccctatccagggggatcctcctcgcagccgcagcagcaaccccgctccgcgctccgacctcaattcgtggtgcgcgtcccacagccgcagcagcagcagaatcagcaaggggcccatgcaccccgccctcctgcaccagccgtgcagcctggacaaggccgcagggatgctcaaggtcaacagtgtctgtgcttcaactgcttcaagcccgggcactttgcggataaatgcccaaagccgaggcgacagcaaggccaagcgcctccccgccccaacaacggtggtaaggatgtcactcggggccgtgtgaaccacgtgactgccgaggatgtgctgagaactccagacatcatcgttggtacgttcctcattcattccatccctgctaccattttgttcgactctggagcttcccactcgtttatatctgtgccattcatggggagaaatcagctgggggtagaaaggcttaggaaccctctgctcatcaccacccctggaggggttatgacagcaaagtattatagccctgccgttcctatagaaatccagggaattgctttcccctcggatttgattcttctagacaccaagaacttggatgtgatcctcgggatgaattggttggctcaattccaaggagtagtggattgcgcaaggcgcactgtcactgtgtatcggggccctgatcaaccggttgttttctttgcacccccaacttccgccggcagttcagtacttcatcagctaggattgccagaaatacccatcgtcagtgagttcggagatgtgtttccggaagaactacccggtatgccgcccaagcgagagattgagttccagatagatcttgctccaggaaccgctcctctgtacaagcgaccctaccgtatggcggcaaatgaactggccgaagtcaagagatagttggaagagttgaaagaaaaggggtatatacagccgagcacttccccctggggtgctcccgtgatttttgtggagaagaaagagaagacaaagaggatgtgtgtcgactacagagctctcaatgaagttactatcaaaaagaagtaccctcttccccggatcgatgatctgttcgatcagcttaaaggtgccactgtattctccaagattgatcttcgttccggatatcaccagttgcgcatccgtgaagaggatatcccgaagaccgcattcaccacgcaatacggactgtatgaattcacggtaatgttgttcggtctaaccaatgctcctgccttcttcatgaacttaatgaacaaagtgttcatggaatacctggataagtttgttgtggtctttattgacgacatactggtgtactcacaatcagaggaagaccatcagcagcatctccgtttagtgttgggaaagctccgggaacaccaattgtatgccaagctcagcaagtgtgagttctggttgcccgaagtcaagttcttagggcacgtgatatctgctaaaggagttgttgtggatcccgaaacggtgaccgccgtcactgattggaagcaacccaagacagtcacttaggttcgcagttttttgggtttggcaggatactaccgaagattcatcgagaatttctccaaaattgccagacccatgatgcagttgctgaagaaggaagaaaaatttgtgtggagccctcaatgcgagaaagcattccaaactctcaaagaaaagctggtttccttgctagtgttaatcttaccggatactcgcaaggacttcctggtgtactgtgacgcttcgcgccaaggattggggtgcgtattaatgcagaaaggtcatgtggtagcctatgcctcacgccagctacggccctatgaaggcaactatcctacccatgatttggagttagccgctgtggttcatgctctaaaaatccggcggcagtatctcattggaaatcgctgcgaaatatataccgatcataagagtttgaaatacatcttcactcagtcggatctgaatcttcggcaaagaaggtggttagagctcatcaaggattatgatgtgggaatccactatcatcctggtaaggccaacgtggtcgccgacactctaagtcgaaaaagccattgcaacactcttggcatccgtggcattccaccggaacttaatcaacagatggaagccctgaacctaagcatagttggtcgtggattcttggctacgctggaagccaagcctaccttgctcgatcgaatccgcgaggctcagaagaatgatccagatatacatgggatcctcaagaatatgaaacagcgtaaagctgctggtttcacagaagatgaacacggaaccctatggaacggaaatcgtgtatgcgtaccggacgacaaggaacttaaacggttgatacttcaggaagctcacgaaagtccttattccatccaccctggcagcacgaagatgtacttagacttgaaagagaaatactggtgggttagtatgaagcggtaaattgcagagttcgtggccctttgtgatgtgtgccagcgtgtcaaagcagagcaccaacgaccggccggacttctccaacctctccaagtaccagaatggaaatgggatgaaattgggatggatttcatcaccggacttccaaaaacccaaggcggatatgattctatatgggtagtcgtggaccgactaaccaaggtagctcggtttattcctctgaagaccacctatggagggaacaaattagttgaactctacttcgctaggatcgtgagtctccatggcgttcctaagaaaattgtatctgatcggggaagccaattcacctctcatgtcacatcctgatttttgtttcaggatttataaattattattagaatttatattaaatgttcattaatttacaagtgaagttaaatgtgggaaataaaatttcctaaatataaagcatggatggatttattttttattaaattatccatggttaattatactctctggaatattctcggatttttcggagctcaattcctaatttttaatcatacaaagagcatttcagtaattacccacatattaaattaatcattaaatggtctaattataatttttttaagtactttgagtgtccaagtattttcaggatttttcttgaaattatttgagcattggaagtatttttaacaattcaaagatcatttaagtgattattttaattggaaaagtaataaaattctcctcccttgtcttaggctgaatcggcccattccattccttcctcttctctccctcctcgcgcgcgtgctgtgcagcccacgctggcccaacctgagccgcctcctctcctctcagcccagccggaaaagtctacttttcgtccctgcgctactgttcatcttccagctcaggcagagcctgagccagccgtgccgtgcacagtgccgccgcatcctccttccaaatctcgcctccccgttgctcctttttccaatttagttgaggggaaatattcctcttatcctcctctatctttaccccaaaaatcggagctaatcgttgagtatcttatccgaatcgaactcgttttcgagtttatctccaaaaccgagtttttgatttcccggatcgatttcttgcgggaggagtccaatctcttcaatccaaggctataaataggaccccctagtcctcctctttcgtttgcccctctcccgtggtctcccgtgccccgtatcctctccgccgccgccgccaagttcgccgccgccgccggccgaacttcggccgtgtcgcgccgtcgcctccgccgttgccgtcggtctccgtcaccgccgtaaggtgcgccgaggtgtgggcaagctcggccgctccctccccgctgtcgccggtcaccggagccccgtcgccgccgtcgaccgaagccgcgccgcggctagacctcgtcgccggccgtcgtcgttcgtcgtttggttcgagggtgagtaccgttgggttcgtctcgtcgtcctctacgtgtacatgtcctccaaagtcgcagccgaccatccaatctccggcgaggtcgccatcttggtccggccattgatgaggtcatcatgacgtcatcatcgtttttctttttcctttttatctaatagattaaatcttcggaaattcataactaaatcatcgtaacttgtattcgactggttcaagttgctaaattcatctaaaatcgagatctacatgttaaaaatatccacatgtactgtttatgcttgtttttgtactgtttatttggttttattagtttttttcttcgttttgtgtgttagcttgtcgtttctgtcgttgcgaaggttcgtgagtgcgtcgggagtgttcagaagattaattgaagaccgattattgcaaggcaagtcacacagatcctaaacacaatcctttgagcatgttgatcctatatttaaattctctatgtatttcaagtgtgcatttattttcgaatgtcactaggtggtgtgaatctattcctttgttatggcctgtttgcattgattactctattccttgataccttgggatattataatttgactagttgagctttatatatattggttcaactagatgttagatataattgcttagccatgcttagaaacattagctcactaatgggatgaatcatatatactacattattatttatggttatatttaatggtatctcacgatggttaatcgtgttatgataattaattggtaattaaaatatgattaatggtgggttgtgagcacatggttttgaaggtcgtactcatggcaattaaggaccggttcgcgagctactgttgtgaaacattaaccgtgccaaccacaagccagcgtgggcaacggctttaccttttgtatagcatggttcattgcggagcaccagactgagaagtggcggagataagcccacgggggtcactggggagtccaagccttgttttataagggggtgattatgatccaggaatggtgcactatggtgagttgtgttgtgcagagggtattgtcacagcctctattcgggtactttctagtatcgcgatgcatggtagacatgatgttgaggctgtgtcttgtgggtacagtggtacacctctggccagagtaaaactattcgaatagccgtgcccaagttatgggcgggttgagcaatgtttttcgtgattagtctcacacctctcacaataattattgatgctataactggtaataatttgtttagctcctggtttggagttagatctgtacagccgggtatggttgttcaggatggttgggcctgtgcagcatgggtgtgttgttcagtgttgattaaagtttctgattaattactctactgttttactactcttaactctttgctaaatgctgctttcgcaaatgagactatattgtgccatcctttggtatccttgtgtatttgcatatttgctgtgtggcttgttgagtatgtcatatgctcattcttgcaataatcaatcaacctcagttgaagacaagttgcgaaggagaagacgtttggcttataccccagttgagctgcctgtgggagtggagctgaagccatcgctagaccgttattccgctgctgttttcttttcttttgtaagtgtgtaacgttattattatgatggatttgtatattaaattgtcagtttgtgtacctcggctgattcctggacgaggattttatacacagataagtttgtgtaccgtcgccgtccccgtccaccccctcgtcgatctcgccgaccgccggagcgccgccgtccccgtcgacccgagccgtgccgccacctttcttcgctccggccgcctttttcatcgtcgccatcgacctaaggtgagccgagccgtgccgccaccgtggaccgcgtggggcccggccgtcagcccgccgcgccctcgggtgcggctgacgcgtggggcccacggcgccggccggtgtgagcccgggtgcacccgatccaccgtggatcgtgaggctgccgcatgggccccacttccgtggacccggtccgcgcgccccttccccttgggtgacgcaataaaccctttttaaattaaaatttaaatgaagaaattcgcaaatattcatttaaagagcatataaacttcaaatggccataacttggccatttgaactcggaattggatcatttaagtctctaatttttccttaagaagtcaagaacccatttttgtgctttgttcttgctagttatatggagtttattagagtaaaatcattttcttttccgatggtcgtgtagatgctgcagcttcggaagatccgctcttcgtggaggttgaagccgacgtttgggaaagtgagcaaggcaagtcacatcatccttgagcatattgaatcccagtttataaaattattttgatttaaattattgcattaccactttacttaaattcccgcgttatcactgttttatttagccatgcctatttacctttgttatgaccttattattattgttattgatattaataccttgttcaccctagaataaacaaaaccccaactagtgggcactctactcatggtaaccactagtatgaatttaggtagatgcttcgctggttaattaggcaacattaggtggttttacaactctacactttgggaatattctcatcacctgaacatggaatggatggattattatggaattggattcacacctccccctctattcaaaatcctcaaaatggttttaggctgggctcggggtgcatggttttgatagtagcacctcggccatataaggaccggtcttcgggcctctgttgcaaagcactaccgtacttccac

SEQ ID NO: 27604 - DNA, 2886 bp, Oryza sativa
atcatcgtaggccttgggttaaggcaggttcgtgtgggttcacggccttgattaataacattgtataactctaggatcgtatttacaaaatatctttgggcaactaagtgtcttttaatgctgtttactgcaaaccctaacccttatattataacccccttgtactcccttgcatttattctgcacttgtgggtgtgtcttgttgagtacggtggttgtactcagtcttgcttaattttttcccaaacccagaaaaggagttcctggaagatgaaggcgttggtgtttagctcgtgcctccgtcaagcgcctgtggtcgtcgccctagtcttccgctgtttcccgtttgtctttgtgtgtgctgggccttcgccgcccatgtaataaattaattatttacgcttccgcttggtaaactctgaaatgtatcaacttttggtgtaccttgcatcctgggcaaaaaaataatacacgcacgtaaggaacgcccgttgggttactttcggtcgtgacactcaagatgcccaagccattgaagaagtcgaacaaattaggcaaagagctatttcggctatccagcagtacttgtctcaataacttttgtgtaataggacttaaaaattcttgtaatcggctaagatacgttaataccctgttgttttaacaatcctttgtgccgattaacataacttctaattttcactttcatttttggtatatatgtgccccccaattttataatgtcaacagcattgataaaattagaaaaacaactaagggcgatacaatatcggccgttatatatcggcaaaccataaccgattacaattggaaaaacgactaagggcgatataccaatatcagccatctcaagacgatgtaaaacacatcggctgtcatgcatcagcaacacgagtcgatcatgcgtcaacccaaacacttgggtaatacttcttcaagtatttgccattgagcgctcgtccacaaacctcaccatcaagcccttgcaacatatatgcccctttagacacaaccttatagatttgaaacggtccttcccaatttggtgaccacttgccgaacttgttatcccgagttccaatcgacaaaatcaacttccatacaagttcaccttccaaaaaatccttaggcactactttcttgttataatgcctagcaactcgttccttatctttggtaaccttagcaagggctcataaacgcgattgaaccaagtcctccctctcatcggccataagattataatactcatcgactgtcaaaccgtcttgcaattctatccttctatagccgattctaacttcccatggcaaaacagcttcatgtctataaacaagcttataaggaggaacttgaattgatccatgacaagccatccgataagaccacaatgcttcggccaaccgggtatgccattgccgaggataataagaaatcttctgcttaattaattagatcaagctcttgttagatgcctcggcctgcccattagcttgtgcataatatggtgaagaattcaacaatttgatacccacgctgtcggcaaactgaacaaactcatcggacatgaagattgaaccttgatcagtcataatagtttaaggaataccaaatcggtagattatatgttcttgaacaaattgagttgtatccccagaatcaactttcttcaaaggaatggcctccacccacttggtgaaataatcagtcgccaccaatataaacttatgtcctttacttgatggtgggtttatcataccgatcatatcaattccccaacctctgaaatggccatggcttaagaataggattcatagtcgatgccggagctcgctgaattgccccaacttctgacaatcttgacaccccctataatatctgtaacaatcctccagcattcttggccaaaaataccctgcacgccgaagtaaccacttcatcttatgagccgattgatgagtaccaaaatttcttcatgaacttcgctgactgcaactttagcctgatcggcagtcaaacacttaagtaacactccatcaatcgtccgataataaagctcatcatccaacagagtatactttaatgccttatatctcaatttcctagaagccgattgagacggattatgcaaatactgatgcacatcatacctccaatcatcggctgtcattgctgcaatttcaaccttaacatctttgatcatgagcttataccctgatgccccttgggccaaatcattagcttcaatattttgttctcgagagacatgctttaaagtaactagccgaaactccttcattaggtggtggcacttctcattataaaccatcaatgtatcattcttgcattcatactctcctgccaattgactgattactagcaaagaatcccccatgatttcaatggtatcggcttcaacttccttgagtaattgcaaccctttgagcactgcctcatactcagcttgattattagtcgcatacggtttaatggtataagcaaactcgaaacatgccccctaggggaatttctgagccgatattatcaaaatgcaatgcaaattttttgaggcaaattttttgagcgaatttcaaagtcatattaatcggcacaaaggattgtcaagacagtaaagtactagagcatcttagctgattacaaaaaatttctaagtcctattacacaaaagttattgagacaagtatcataggatagccaaaatagccctttgcctaatttgttctacttctacaatagcatgggcatcttgagcatcagttccagagatgactttcagggacttggttaggtcagcaacatttttgatagccgatttgagccttgctttttgttcttcaattgatt

SEQ ID NO: 27605 - DNA, 522 bp, Oryza sativa
tgttttgccatgggaagttagaatcggctatagaaggatagaattgcaagacggtttgacagtcgatgagtattataatcttatggccgatgagagggaggacttggttcaatcgcgtttatgagcccttgctaaggtaccaaagataaggaacgagttgctaggcattataacaagaaagtagtgcctaaggattttttggaaggtgaacttgtatggaagttgattttgtcgattggaactcgggataacaagttcggcaagtggtcaccaaattgggaaggaccgtttcaaatctataaggttgtgtctaaaggggcatatatgttgcaagggcttgatggtgaaggttttgttgggggaaccgggaaaacccggggccccttgcaaaaatggccaaattaaaccctttttttggaaaaaaaagggtaagaagggttattttttaaaacccccccccaaaaaaggtttttggggtttcgggtgacgcatgatcgactcggttgctgatgcatgacagcc

SEQ ID NO: 27606 - DNA, 909 bp, Oryza sativa
taacatatgctaatcacttgtgttttttttttgaaacggtagacggctggagggctaccggttatattagaaggagaaacaagtgaaacaagagttattacaacgtaataagggagcattggggataatacaactcagggataggcagaaggggaagggaggctagttatgggggcttgaaaacaaaattccgtaaatctatgtcttccttgattagcgttgctacatccacaaaggaattggatgtttgtttgaaaattgttgtatttctttggttccaaatatgccatcaagttgagatcagggcattgaattttgctttgctttgtgttgcatttgccgaagatgtaagaggggcaatccactcaggaactgatccccgtggggtagtaggtagaccaagcattgttgagattgactcccaaacctgtcttgtgaaggtacaatccctaaaaaggtgaacagtgtcctctaatgcccgtcagcagagagagcaaatgcaattacaaggttagtgtcttatgagtagattgtggttgtaagtgctttttgatgtaagattagccatccgtgaaaatgttgtttaggctacgcatgagcagaccaaatgatcttgaaagaggggttcatcactgatcctagaaaatgtacttggtaagcacttcttgttgaaaaacatcttgaagaattcaaggatgatgatatgtcatcttcagtgttttcctccagagtgattagagagagcattgttcctagttggacaagttcatgaatggactccacatttgtgatctgcctgaaagaggttaaccaagagtttttagagagttatgttgcaacagttctgctcttccgttgcactagtgagaaaagatctggcaaaatatcttttggacattggtcttgaag

SEQ ID NO: 27607 - DNA, 659 bp, Oryza sativa
catcataacagacaatggctcccagttcattagtgccgacttccaggattactgcatcaggctgggagtcaggatctgcttcgcctcagtttctcaccctcagagcaatggacaggtcgagagagcaaacgacatagtactacaaggaatcaaaacccgtgtatacgacaggcttatgtcacatgacaagaaatgggtcgaataactcccatcggtactatgggccgtgcgcaccacaccgacaacgtccaacaaggagacacccttcttcctcatgtacggcttagaggccatgctccccaccgagctacgatatcagagtatacgagtacagaagtactccgacgaggatcaagatcaacagtgaaacgacgacgtgaacctactcgaggaacaccgagaacgagttgccgtcagggcagctagctaccaacaggcccttcgccggtatcacgagaagcgcatccaagcacatatactttcgatcggcgactacgtcctccaggaggttcaaagccaagcagggcgaaacaaactctcacccaaatgggaaggaccgtacacgatcacacacctcttgcagccaggtgcattcaagattgcagatggcgatggtcgcgagttagcaaaatcttggaacaggggtgcaggaacaagat

SEQ ID NO: 27608 - DNA, 3168 bp, Oryza sativa
attattattcaaggccccaagcaacctggtaacgacatcgacgtgtacctaagaccactggtcgaagatcttaaacagttgtggcagaaggaaggtgtccccgtgtgggacgaggacaaacaggaggagtttaacctacgagcgctgctgttcgtaaccatcaacgattggcctgcacttagcaacctatccggacagtccaacaaggggtacaaggcttgcacttactgtatggatgaaacagaaagtacgtatcttaagcactgtaggaaggttgtatacatgggtcatcgtcgattccttgcagcaaaccacccggtacggaagaaaggcaagcacttcgaacataaggccgaccaccgtacgaagcctaaacatcacagcgggaaaacagtgtttgctatggttaaagatcttaaagtagtgttcggaaaggggcctggaagccagcatatagagagcgaagatggtcacgcggcgatgtggaaaaagaactctatattttgggagttaccatattgggaattcttggacgtacgccacgcaatcgacgtgatgcacctcactaagaacctttgcgtaaaccttcttggcttcctaggtgtatacggaaagtcgaaagatacactggaagcacgtaatgatctgtagcatatggaacaacgcggcgaccttcacccggaaccaatggagaaaggaagccattacttgagtccagccagctacactcttagcaaggcagagaaggaaagtatgtttgaatgcttggagagcataaaggtaccgtctggatactccacgaatatcaagcgaataataagcacgaaggagaagaagttcacaaacctaaagtctcatgactgtcacgtgttgatgacacaactgctaccagttgtaataaggggtatccttccagacaatgtctgggcaacaataacaaagatatgtgcattcatgaacgcaatttcgcagaaggtcatcgatccggatagattagaagcccttcagaatgaagtggtgcaatgtctcgtcagttttgagttgatatttccaccttcatttttcaatataatgacgcatctgctttgtcaccttgtgaaagagatccgtattctcgggcctatgtacctacacaacatgtttcctttcgagaggtacatgggcattctgaagaagtatgttcgtaaccgtgctcgtccagaggcaagcatcgccaagggttatggaacagaggaggtcatcgaattttgcgtagaatttattgaagaccttcgcccaatcggggtacctgaatcacgccatgaagggagactacggggaaagggaactctcggaaggaaagcaataacgacggtagacaacaatttattccgtaaagcccatttcactgttctgcaacactcttcattggtagctccttacatcgaggagcacttggctctagttcgcgcaaggaacatcggtaagtccgatgcatggattacacgacatcacattgatactttccccgcgtggctacgacaacatctcatgggtaacgagtcaatcaaccaacaacttgccttcctggcgaggggaccgtctgggtcgatcgcgacattccagggatatgagatcaatgggtacacattctacacgagagcccaagacatgaagagcacgaaccaaaacagcgctgttcgtgtcgatgccatgggacacgatggaacaactgccacgtattacggtgccatcgaggacatatgggaacttgactatggtcctctcaaggttcctctgttccggtgccaatgggttaggttgactggtggaggcgtaatgattgatgacagtgggatgacaactgttgaccttaacaaggttggatactcggacgaaccttttgtccttgccaatgatgtaacgcaagtctttttcgtgaaggacatgtctagcaaaggaaagaagggtagagggcctgataagcctaagcgtcaagtggttctcccaggcaaaagaaaaatcgtcggagttgaggacaagactgacgaggattacgatcagttggatgggcaacccactttcacggtgacgattgaccctagcatccttctatcaaatgaagacaccccttactcacgcagcgatcacaaggagggaacaatagtgccgtaattattgtgtacacgatgtaaactattttggatgtattgattatccatataaatcaattgatgtatggcatatgttaattacgcacgattattagaggtttcaacaagtttaaatcatgtatatgctagttatatgtgatacttacaatttttaaaagttttaaatcacacaggtggcaatttcatatgtatgttaattagagtttttaacatttaatttactagcattcatatgctaattataattgactagaggatttttaaaagttttaaatcacgcaagtggcaatttcatatgttaattagagtttttaacatttaatttactatcattcatatgctaattataattgactggagaatttttaaaagtattaaatttaatatatttttaaaactatcattcatatattagagtttttcacaatttaatttactatctttcatatgctacttatatatgactattcgaatttttaaaaggttaaaatcatgcatgtggcatttacatatgttaattagagtttttagcatttaatttaatataattcctacgctaagtacatatgatgattacaatttttattaattttaaatcatgcagtatgtacatacatatcttaattagagtttttaccaatataataatatcattcatatatatgctaagtatatatgattattggaatttttattaattatatttgcttattacgatttatccacttaatttattacagccaaaaataatttttcgaagtaattgtcattaatctttgtactttaaataatgttaatgcattaacttctattttataaacacatatgtaagcgaaaatcatatgcagcgctataatctttagtcccgggtcttaaccctaaccgggtttaaaaagaatttcgaaatagcgggaaaagatatttactcccggttgttgagaacaaccgaaactaaagatatctttagtcccggttgttgagaacaaccggaagtaaatatcttttctttactccc

SEQ ID NO: 27609 - DNA, 8827 bp, Oryza sativa
cccacaacgccacgccgcggccgccgtcgcacgccggcgcgccaaccgccgcctcgatgccgccacaccgccgttaacgaacgagaacgagaacgatcgaacgaacgagagcgagaactaacagatgcatgtacgttgccgcgacaacgtgaacgagaacgagaacgatcgaacgaacgacagcgagaacgagaacgatcgaacgaagacaagcgagaacgagggaacgaacgtgaatgaggacaagcgaacgaacgtgaatgagaacgagcgaacgaacgtgaacgagctagagaacatgaacgagcgaacgaacgaggacgaacgttaacgtgaaatgcaatatatatatatatatatgtatatatatatatacatgtatatatatatgtacatgtatatatatatatgtacatgtatatatatatatacatgtatatatatatatatatatgttacttcgcatttatcctaatacattttttttatcttgcagaaaagacgtgttgtcggagtcgtccgtcaagcctgagtggaagaacagcttgagtggaagacctagaaggaattggagcaggcaagtgacgtaataatataaatgattgttatatttgtaatgcaattaattaagattattagacctgtaattagacttatcatataagattgtgtagtgttctaatattatttgagttttaatataagattattttattgcaaattagacttagtatgacattattgactacggaattggtgcgactcctaggaattgactattgtagtcttaattagacttagcatatacgcccgaaacacttagcatacattactattttagtcttagcatgtaatattatttgagttttaatataatattactttatttgtaattagacttggtatgtaattattgactacggaattggtgcgacaagtagcaattgactattgtagtcttaattagacttagcatatacacacgaaacacttagcatatacatgactattttagtcttagcatgtaatattatttgagttttaatataagattattttatttgtaattagacttagtatataattatttactagctagggttgtataatatacgtcacctagacttagcttatatcacgatttgtaattagacttagcacgtaaggttgtgtagggttctaatgtacgacatttacacttagcatacatgacttagattgttaaaacataaatgtctcgtgacttagcagatgtttcttgtatcaacagatggctgaccgcgatgaggaacagatattgtacgatacaatcgcggagggaagcagccagtactggaatgaagaagaggggaacgaggatccaaaccagtacttgaacgaggaagggaacgtggagagggatgcggaggggaaccagcaggggcacgtggaaagggatgtggaggggaaccaggaggaggaggctagtggtagtcaaccctccgttggacagaagagggctcgcgggcaacgaggtgcagcgaagaagcttgagggtcggcacatcataacggaagtggaagaagatggacgtcctagtgccccggccgaagccgccaagaactatgtacgtcacagcggttgggttgtgcgggataacgtgcctgtcagtacggtgtactagcgaagaacaagggcacgcggagatcatgagagctttgtcccagattcggagaaagagatgctgtggaccaaaatgctcgagacattcacccttcctgcgggtacagaggacaaagtgaaaaggtggactctgaagaaaatggcagaacagtttcagagcttcaagggagatctgtaccagaagtatatactgaaggggcagacaccaaacttcgacacattcccaaagctaagggatcactgggacgagttcgttgcatataagacaggtgaacaagggcaggcgatgatggaaagaaacaaagaaaatgccgccaagaagaagtaccatcaccacttggggtcaggaggctatagcgtcgcgatgccgaagtgggagcagatggaggctagcttgattgagaggggtatcgaaccggcaacagccaattggccggaacgatcgaagttctggtactatgctcacggtggaacgctcaacccagctgatggctcactggtcttcggctatcagatacaagaggctgcgcgacgactaacagatgcagtggaagcctcctctcagggcacgttccgaccagacagagatagggacgagctgacactcgccctgcagactccagagcatccaggatgaactcgagggaaaggggtgattccttggaagattggtttcaaggaggacatccacacgtacaggagtcggatgaggagcaagagagataccgaggcgaagattgcagacctagagttccgggtatcgagctacgaactcaacatgcaagaggaggtggcaaggaaggttgatgaacgcatggccgcacatcggtcccatgatccccagccgaccattcctcctgcaatggtgagcccgtcaggaaaccgtagcagctgcgcctcaacggggcaggtaggatcacagagcatggacgccatgcaaacacaggacgaatcgacctgtcccgttgatgacatcactcagcggacaccatgtgagctgcatattcctttcaagaacttatcaataaaggtaagatttagccattccgctagttgctgcttatatatgttgattactaataaataatctctcacaacatgaaggtggcgtcgggcatggccatcccaacggacccttcaggtacttaccactgcaggccgattccagcaggatactccaaggtcgaagttgagttggtcgaaggcgcgtacgaggacctcgagctggattaccctggaggagacggtgagacgcatctacgagacacatgccatgccattattctatggcgcaggcggtacatcatcctccctgggcgacaagcggcgtctcgtgcaccatctcctccggctccgccatctcctcctcaggatcctgcaccgtctcctcctcatgctccgccagcaccgtctccacctcaggctccaacatcgactcctcaggatcctgcaccgactcctcctcgtgctcctacacctactcccccgcaagctcctcttccggcaccttcaaagtcaagggcccccccagctccaccgcttgcccacacaagggcaacaaagaaggcgaaagttgacgccgccaagaacaaggacccggggtacgattgcacgcaagaggagcttgacgcttacgttgcatcagaagtcaagagacaattcaagcctcgaagtccagaaaagaagattcctatagaccctagtgtcaggaacttcttcaggggtatgtctgcatctgtcaaggaggccatcaagctatcggactatgagcgaacgctgaagaaagcatcttctggaaagtccaaaccagtccctcagcttggagagcaaccaaaccaggagatcgagccgttggtgactggtaaagaaatgacgatagaacaatttattactgacaccggtctaactacggatcaattgctaggagtcgcaccaatcgaaaaggcggaagtgaaatacatgtacgaactcggtaaaccgcttgtcaagcctgagctgctgcagtccctacccacacaaatatacaagttccatcagctgtacatggagatgagcgccaccggtagagagatgatcggagcgaggatcagggacacggacttcttgcaaggagatgacattctctggatcaatttcaggggaatctacgaactataccagctggacgccctcgacgtctctattatgagttgctggattttgtaagtatatcgttcagttagatttcttactatacgtctcctttaattaattaggtccttgtatataagtagaccatagaaaataatatactcccttttatcgttgtagaatggagattcaaagggcccgacggcggagggttttcgatactggattcatcgaccctcggaaagtaaacgtcgcaatgctcgaccaatatccacaagaaacagaggataatctcgtccatctcctgaaggcgcagcattacaagacgttcatactgttgccatacaacacagagttagtttaattttactgtcttcctatataccaaatttcattcccgtacgaacttgctaagtgtttcatatgtaatgcatcccacgcacattgcagattccactgggtgcttttactcatcaacctggaggcctgcaccgtcaacgtatatgactcaatggataaaaaagagtctacgtttgacaaggttttcgaacttatagacaggtaccgtcataagttcctttgttaattaagaaaatcttgttatgttaattgctactacgaatcatagctttaaactccatgtagggcttggtatcggttccgtcatttggtccgcggcaaatggagagaaagacttaggcggaagttcaaatttcctgtgagtacacatgctctacatttatatttctccgattcaaatacatacaagtgtatattaattagatctctcgttgtttgtcatttatttgtagtgcgcaaagcaaaagcagggaactaacttgtgcggctattacgtgtgcgagtattgccactgccttgcagaccaaatcatcaccacaagagagctcgatgtacgtacaaataaattcaaaatttcattacgtagcgatttcttgtttaattactaatcaatttcatacattcatatagtttatccgcatgagggataacctgaccacacacaaggaatttatcgcggcggttcaagaacaactcatgggattcatcaacgaagaaatccttgatcccaagggtgaattctactacgacggaaacacaattcaccggtccttagcttctgagctagcagcgagtactactacgtcgaaatcgtagctagctaggacatataatggattgtaattaatacatgactacatatgtttctatatgcatgtgtacacattttctataatgtaaatatattttgttcatatatatatctatatacatatgcatttgcataacatatatatgtataaatacatatatatatgtatgcatatatatgtattgaaacatatatatgcatggtttatatatatatatatatatatatatatatatatatatatatatatatatatatatatatataaaccatgcagcaacaggggcatgcaaaaaaaaaaggttagctggatctttagtcccggttggtgttaccatccgggactaaagatcgatctttactcccggttatttcacccgggactaaagatagcgatctttagtcccggattggtactcccggtttggaaaccgggactaaaggggggttacgaaccgggactacaaagggtttctccaccagtgtggatcccggaatctggctttgaagacggtcgccccctgtactgttagggttactgcctccagttgtagcattagcaagctgcagagctccggatccagctacttggatagaaaaacaaaaatagatcaccaggggaattcagaaactaaactagccaggggaattcagaaactaaactagaataatatgtatagtaaggaaaataaacatagtctcgtttagacggtttagttaaggtaaaatttcattgtgagaattcacttggatatatatatttttagaaatcataagctgtagttaggagtcctatcgtctcaagttagcatgcaagtttttttaaaacagatttcttatatgattccttctgtattatcaaaagtgaacattcctaataaccgactcaaatacggatatgtatttccaatactgctgcttcaaacctttatatcttgaaaaataaaaaggctatgactgaaaatatatacattttaaaaatctactgaacaatacctacaacttttatgtagaaagcatatttttattctgccatttaaatggtctaatttgcacttgaaagcagacttcagaatctgtccagaatttcagagggtactacaacaactatatctggagttctactcatccgatcaaagtttattttaccaatacgaaaagctaagaaaaatctctataactttgtctataggcggtctgattgattccgctgtttaccccctcaaaagacagttcaatctactactatccagattacgacataaaaacaatggtcatactaaaaaatttatatctcctaaaccacttgagataaaatcgcgccatttggtcagaagatagatccaaacattgtctacaacttactagttatatgctttcgcagaaaaaatcgttttgatcctccaattggagaacttctgagaatatgatgggaaaaccaacccaccactcctcctgctcctcttgtcttcctcaatccgttttttccaatcagattcctgatcgcctattcgatcaacagtgtaaaagctgaacttttgcacgtttgttctaagatttccccaaatacactaatttaaagctcgaggtattacaacttttttcaaagttagagtatcacgactataaagtatagtatgtctgaagtttgcatatgagctaggcaatgaacacaatagaataatgcctaaatcctcttcatcatactttacctccatagactcaaggttagcaacaattttcttgaaagtggagagatgatccatcgcagatccatcatcttgcaacttgtgcaaaaataacttttgcttccggtgcatcttactagttagatccttagtcttgcatatctgttccagcttcaaccacaacctagcggctgtcttcttcttaagcacctcctgcataatatttttagatagatgaagatgaatatatgacatagccttatgatccatttcttctcatcgtcgaaccaatcttgagtcctcttgacaaatccagatagcgcatcatcgaggtcttgctgtgcaggaacggttcgcatcttcacttgtcaaagtgaaaatcttgtgtctcggtccaggagcggtagatcatacttcaaactcgccatgggaattaatcctgattttgttggtaagaaattaggtacacctagcaaaatcgtgaaacctggtacacttctcgtgtgcacgtagcgtagatctggcttcttcctggtacacaagcttgtgtgcgcgtagaaaaatcaatgtgaaatttaattcacatgaacagtcagaagctgtactggatcctggtcctcctagggaaccgtgcgcagtggatggcttgctgctgctcctccaccttttcctgcgcgacgagacgatgagacgacgcgcggctgctgcggccgattctctgcgacgtgcgctgctgctccttccccggcggcgtcgacgacgaggctaattagatcgatactccgatcgtatcgatcttcaatgataccacttgttataaaaatagatagacacgaatttttacgtggaaaattcttacgggaaaaaaccacgggtgtctaccggcaatgattactatagagaaattgattacaaacgtaggagaataagggaacgccaccccttcccgtactatttacaagactatatataggggacacataataggaaaagaaatagagttctattaggaaactaatccgaatatattgtgggcccaaaattcgaattacatatttaacagcagacttaaccttgattgagcagataatataaactggctggaaaacacaacttgaacgctttttttaacataataatgtaataagttttatgataatgacgtacttattgagtgcaaccgcatcctttcttagctggatagacaaggaaaagaaaaatgttgaaacggttagtcaacgatacaaacgaccatcaaatatagactaattataatttaatgttcctattttctctataattttgattaaacttaaaaattagaaaaatatgagcgaattattatatgaaacggaaggatataatgtgcgtctctcttaccgtcgactggtgaccccggcggcccatcactgtttcgagcacgtgcaacctgcgagcttccatgtgttgctttccctgaagaattaacaaaataaacaggccaggatttgagaaattaattgagaatgtactagtagctaggttaataaatactgggaatccttctatacacacaagcctttttatatacaccatacccaccaactaaaaaatataaccgtaaattccaaacaaattgtacatgaactttcagtagtattacacctcttctaaagtctcatcttcaaattcattgaatagagagcaacaaaaaagataaattatgacatatttatactctcaaaacagttaaattttttattttttttattacgtctaaaatataataaatttgatgttaagattttatacataagtacaatactattggaagtacttgtaaaattatttttaaattttttggtaaatttattagttggtgtggataatggtgtgtaatctctggagtcttgtgtgcacaataccaatcaatattactgtatgtttacgttctctttttgggcccaagtggagaactggacgcccgtctcatgtggtttaattagatcagtaccgttggtcgatgcgacaccaatgttcgtccccaagctgcgtactccagctcctaatacaaaaaagtcggcaggggaaattgatcaagaaactaaaatgatatagctatctaagttaacaaatatatatatggtttgttactggtttagtgtcttatgacagatgctaggattgtaatatcttt

SEQ ID NO: 27610 - DNA, 24168 bp, Oryza sativa
catctgatccagcccggttgtgcccatccccttgagaactggatcccggaatctggctttgacgttggtcgcccccctgtgttagggttactgcctccagctgtagcatgctgcagacttctggatacagctacttggatagaaaaacaaaaatagatcgccaggggaattcagaaactaaactagaataatatgtatagtaaggaaaataaacatagtctcgtttagacggttcagttaaggtaaaattttattgtgagaattcacttggatatatatatttttagaaatcataagctgtagttaggagtctgatcgtctcaagttagcatgcaagttttttttaaacagatttcttatatgattccttctgtattatcaaaagtgaacgatcctaaaaaccgactcaaatatggatatatatttccaaaagcaaacgaacttaacaaccgactcatacatggatgacgtatcaaaataccggcaaaaatatcttcaatttttataatactatatatatagacacacacactactctatctactccataatataagacgttttggcctcttcatcggccgtatatattcactgatattcatatgagtttacatacgcatataaaacacataaatggaatagtgcatgaatctatttaaaacatagtgtgaaacagaggaggtaccttttgcgcctttctgttctgcaggaggactattaatgttgccgggcggcatcttgctatgctttttagcacccggtgcatgggaagggcctccacttgcagatggtgccctgaagaagaacaagtaacagaattaagcggggggatcgatgtgagtgagatccgaacgcattgcatgattgcatgccgaaccacggagataattaatacaaatcacagaattactaataaattaaaccaaacatgaatacgtacatggaactatacaagaaagtatgtgtatgattttttctagattttttagtgatattttttagttggtgtgcacgtgtgtacacgtgagggcctgtgtgcataggatatgttgctatatatatatatatatatatatatatatatatatatatatatatatatatatatatcccctggtgtggacggacgatatatattaattgcaactctctgaagcagcaaattaaaggaaatgcgcaatgcagcagaaagatcgatcgatcgatcgatggagctggattgcctttgttggtttgagtcgacgacgtaggagcaagatgatcgacatatatatagtgatcgatcaggaacgcgttcgaaaggcccaaactaacaagtatatttttctgttattattattattattcgtcattcacaagctatagtagctagcaaggtttgatatgccagcctccatcgttcgatcgtctttcttaaattttctctggaacgcgcgcaggtcgatcgaaacctaattcaactcggacggatggattcgttccacaacaatttgaaagctacgtaccacgtaccaacttcatgaataatgcatgcgtagatgtttctccaataggcgcgcatgcttgctggtacgtaccatatgttacaatataattatttgcatcaattagtttcttgtcactactgcctagctagatctacttaattaattactccctatatataatttgtccgacctatcccgcgcttgtggagattaattagcactcctaatatataattagctagtactacatttgtatatacggaaacttcctgttgcattaggtatacgccatgctgtagtacatatcaaccagctttgcatgatcgctcttaatttgcttgtcaagcaacaattcaattaataattacggaactagtagtactgcatatatatggtgcgcgcgcgcgtagtgaattatacatgtacgcgcctttcacgtattcgagaaacaatatatataatatataaatactcgtaaaatttgtaaagtacttacaacgggttaaaaataattaattatcgttttggacgaagctaaacttaatttgaagacaaacaagaagagcatatttttatagatttaacttatataaaaatatacttcaataaaatatttgtttatatttctatatatatttgaatagaaaatagtggtggttaaaattatttttttataccgcgtgcccatatctaaaatgaaaattatttttagcttgagggagtaatttgttaagaataatcgcatctcacgtacgaatgtgcacaattaaccttcggcttgatcatttctaatctccatgaatttcttccatacgcgcgattgacatttttttatggttactcgtgctaacttccataaaatataaagggaagaagagcacagacatcctggacgcgcggtcttcatgctaattaagtttacttgatatattactgtacacgtagaagaagaatgaagtctagttgacccctcctaatcttccatggaaatccatttagtctcatgttagcgtgtggaaccttgagtcaactgtactgttgtaatcatagaaatgcatatcaatatataacgggtatatgtttgtcagttctctgccagacatatctaatatggtttcatttggatatatatatgacacatttggcatatagctagcttgggtcattgttttattgaaacatattaattatatctctgaattctcatgggatcgttcctctcaattaatgggctcttgcgcattgaataggtcgactatcattcaaatatatattcagcgaataaatttattgcaaaacttaatcactaattaatggttgaataatactgtaatcttaaccgtcaagcattcggtcattataaaaaatatagttaattagatacaatgggtcagttattttggggctacgttttaattgagctagtcacagctttgagccttaattagcttgtctataactcatcgttataaactgttaatgataactagaatcgttagtgattagttagagggttaacgataaacaatgcccattagatgcattaattatcattcatctctatacgtcgtacgtatctattccctccttctcaaaatataaatatttttagaatagtgccaagtcaaactttttgaattttgactattaatagcaatgaaaaaaaatcgatcatataaatttgatgttacttaaacaatcataatcaacaagcgcccgggttcatcattttacgtactccctccgtttgatgtattttacctatgattgggttcgggtttctgcaatgtgtttttaatttattttcccccaaaaattgtgtcgcaatcgatcgccataacatgcctacctatggaaatctgtttttgcgtgcagatgtgctgcccgtctaaaaaaattgtgatttttaccgacatcgggtgactggtccccccatctgcaaaaatggattcaatctggccgtaagggaaaagcgcatttatatatatatatatatatatatatatatatatatatatatatatatatatatatatatatatatatatatatgtatgtatatatataagtgaagattaatgtatatttagttttagggagtttcaagatttcagacaacccatatttttctaattccttgaatagcaatcgactaaagtctagtgacttccctatacttattatttaaacaatgtatattctttatgatataaaaggacaaacaataaataaattattctaacctcaacctgaaataaacttaaaattcatagaaaaatataaaaataataaacatggatcaaaaataaactaaaatcatatataacaaaaagaatgtagttaaagtgaaattaaaaaaagcaagttcaactgtaatttttgacttaccaatgcgtaatttttggttagtcaacttttacacatttttggatgtgtaatatctagcaaatacaaatgttctacattacatacgggttttcgttctcttaccaattcaatatataggaaagtaataatgtaattagaaacttacatatttatacttgcatagtctaaataattggagtgtctacatttcaggtgagtacagaaattttagtcacttttttcgtcgattagatgacaatccggtggttctcattacccctctttctcttatataaaaggttgaacaacatattttaacatagaaaaattaaataataacaataaataaacttactattcataaaagttacaattacattaaaaaattaacttcgatcaaaaaagtaaaatgatatataagattgacattgcagttaaaaaattgtaaaattgcacattaaatatcactgcaatttaatatttaggaatgtgcaattttaggtgactaaaaatttataaacataaaattaaattttacgtttaggaattgcacattgaataatcacacacacagactcacgaaatatatattgactcggaagtagttagtccatccatcaaatgtacaacatgttcaaacacaataattgcattttacgtacttgtaatatatcacatctttctttctgttcattctttgtagttaatgaagagtcagtcttgcaataattcgttacgtaattataaaatcggattctttgtcaggtagttcgctaatctcggatagatccgaaacagttgtttgctaaccccaacttgattccaaaacaggacacattattccctatggtttgggataaaataatgtataataattttccaaatccgtgtgatcgatataactctgcccgctgaatgatataagttgactgattaattaatactgactttgaaaacttcgtaagtcctagaatttcaaacatgagttttttactgttgtttaaatttttttgacactttccacatccatatacttgtcgtggattgattttggagctcacaggcacatagagcccgtgactcactccgttattgagcatcatcaccttgtccattcctccattcgattaacaaattaccaaacatatatttggtactattgaagttacttaaattttataaggccaagatatatttcgaaaagaaaatgtaattaatacaatagtactttttatttaagattctgttagaaaaaagtaacagtgacaaagttagcgtaattattaggttcttgtggtgcaaccagtacaacgggttcaaatcctagacttgatacatgtgctcacatttacggctaattattctttcagtggtacacaacatatcaatcgacagcaaaagctcgtgatgacttcatcaatctcaagatatgccggtctaatttttcgaatgtaattataggggtagtgtatatattcataggattgatagtgcgcgtgttatgagcggcgtttgtaccgtgtttctaaaaatataaaggaaatagtatatatccaaggagaataagtcgaccatctccaacctcgacagtgtaccagccaagtaatacctagaaatagaacaaaaatacaaagggaaaataaatttcagtcaaaacaagattttcaattctgaatagatactagtaaatattttgatgatatcaaaatatatacgctaaaaaattttcactactagaaaaatcgttttctcaggcggccaaaaattattttccccggcaggtggaaggcccgcttgtatgcataagcctgtgaaaatattttaggcgaacaaaaaaaaaaacaccaccactcccaccctctaccctacccacctcccaccgcacagccgtcgtagccctcccacctctggccagatctagggcaggggtttcgggatggagagggagagggagtagaggtgagggcagactgttgcagaggtgccgctgccgccgggggccgccactgcactcccccctccccccctctcccctctgggcagatctgggagggaaggagggaggggagccgccaccgctgggagggaagccgtgtcggggagggaagctgccaccgcctccaccctccgcgccgccgccgttgcctccaccagatctgggaggagggaggggagccaccacctccttcaccctccgtgccgccaccgccgacagccgctgccgcctccacccttcacgttgccatcgccctctggccacagcttgggagaggaggaagggaaaggtactgagggagaggtgggaggggagagccagagaggctctaacttagggcctatttagtttgtgaaaagaaaatttttaggtatcacgtggaatgtttgaccggatatcggaaagggttttcggacacgaatgaaacaactaatttcataactcgcctagaaaccgcgaaacgaatcttttaagcctaattaatttgtcattaccacatgtgggttactgtagcacttatatggctaatcatggactaattaggctcaaaagattcatctcgcgattttccccataactatgtaattagttttatttttatctatatttaatgctccatgcatgtgtctaaagattcgatgtctttatagaaaaagttagctattttggtgggtaggtggtgtttttaatatgtataacctttttgcaggcggaccttttagtgtaccacatgcgaaaagcctgcaataataaaagtatttttgcaggcggacctcttaagtgatccacctgcagacaacgatatcaccgacggttgtcaatttcgcaggcagccatttagctccgagaggcctacccacctggaaaaaaaatagcatcgtctggataaatggttttctagtaatgtttagaagacaaagaacgacaattaattcttgtacatggaggaaaagataaaacttgtccagaccaagacaacatcgatccttggtaaaactaagggttaattggatccatgacattataaattctttagttttgaaatatgctattactattcacctatttgaagtgatgccattacaattttgaaggtatttgaaatatgccactgcataccctttcaacacatttaacaaaaactttagaccaaattgcccttgtccttttcctctgtctcctcccatctctcctgttcatcttcttcctccctttcttccccttctggatctaggtcgggcagcttgatttcttccttcccatttttcgccggtgaacctcggctaaggacacccccttcacctttactccggcgtggatcttcaaaccccgcgaggaggtgatgaacgtggcgtcgagggctgggtcgtggcggtaccatggttcgactctgtgaagtggacgaggccgagggaccagaggccctggcgttggagctcagccatagccgagggaccgtgatagtcgtcgtcctcggtggggaatccagtgctcggacgctcggtagggaggtgcaggcttacagtggctgggtaggcacaggcttggtggatccatggcagcagagataaataggagagatggaaggagatagaggaagaagacaaggacaatttggtctacattttttgttcaatgcatcaaaggggtatgctgtggcatatttcgaatatatgaaaaattgtaatggcatgacttcaaataagtgaatagtaatggcatatttcaaaactgaaaaatttataatagcataggtctaattaaccctaaaactaattggttctacaaagataatcaaatttcacaacaaatattatttcttaaataatacggtcgacacagtcgactctttaaattcaaattaaaatgaacaagcaaatgattttccatctccctataagccaaaccccacatgataaaaatatgaaattataaaagataattgagccctatgatcacctctacagaaatcatttgtacaggcatctgccatatttatctaccaacggattaaaaatgcagttacctatttatttgacttacagggccatccgcattgcctctcgcactgagaccggcggtgacaacccttgccgctgtaagcacccgtccctccttacttcgtcacgtcacagccagagcttgctgctggaaaggcaggcagtgagctaggacggcaatggataggctccattccgtggcgctccaacagatctagcgcgagcaaagctggatgtgcgtggatctagatggccggggctgcgcaggggtgaagacggccgaggtggcgtgagaaggaagacagcaggtggcgccgcaaagcctcgcgctgaggccgctcggtggtggtgaggtgacccgatggtgatgatgctactatttagtgacgcaaagtggcagcggcggttcgaggtggcctctctaggtgtggggatggctgtggtggtgggatggcgccggcctcgcgtgcagacatgaccgtcgcagcgaggcctcccttctactcgacgacggtggggatggtgagcggcgggcagatctgcaacagcgaaggcggatctgacgcagtggcatggacatcagcgcatcgaggtggagtccctgggtgctccctactaaaattgcacaagaaaatagggaaagagccgctaatgagaaaaaagaattagatgctaaaactgaaaatcaacaagtgcttaaattgaaaggatttgttatgctagctgttgacggtcgttagcgatcagtttcgaccgtcaatactaccaaaataaaggagaactagttatgcttgtaatgtatatttgtgttagaataataatattccactagtattaggattactaaccttttgcagagaatgaaataaaatggaggagaatcgacatcaaatcaaacgatcaatcaatcggatgatgacgagaatcagacttatgcatgaatgggccaagaactcagaattgacacgacaaattggaccaaaattcacaagtccgaagtgagcaacagaagaggaggccgccagccgaaaatgggctggattgggccatgtggatctagggttggcgatggacagtgtggattgcctccctatggcggttggagggtattactgacctttccaaccgtcgtaacggtcattacctacctatttaaggagctcactctctccatttcaacacacacttcaagtaaaactctctcatattctctcaagcttagtttagtattctcaagctagtggagcaggaatagaatagtaatcggagtctggaagtcttcggaagagttcgggtatagctctagtagctcgcctttcttcttttgtaagatttgtactttatttagaatattcttctttatacaattctggtattgaaatactttccaagtatatgaatgccaactttactttattttcaagttatactgattatactactagcttatctgggagatacataggtagaggtatagtgtttgcttatgcaattactatatgtcatgacaatgatattagagtagtatctgatagtttagacgtggtgtctagattactgggtatcattatttagggttatatgctgcggatgagaggtgggctgctgatggtgacagctcagtatgggtattcctccgcgcgtgtatatagtcctaagtaaatgtcctagggagggtactcctccatttttagccccggttgtatggtcatgacgggctttcataagaaactcggcagttaggggtggcttctcgaagtaccaggaggtcatcggatagagagtattagctagtatgtcagataactaggatgtatgtatactatgtactccccccgtcctataaaaaacaaatctaggaccagatgtgacatattctagtacgatgaatctggacatatatgtccagattcatagtactaggatgtgtcacatccgatactaggttggttttttatgggacgtagagagtatactagaagtataggaatatattcttttctattttctttccacttggctgtaacatcgtgaaaattcccgacaataaaaaaatcactaaaattttgaactttttaaaacttgttgcatcatgctggatgttatggttgctattgcttgccaaactataaattgtcacaatgaaacattaacttaaggatgtacaattcgctagaatattctatctatcgattccataaatattatgcaggaagctaaatgaaggaaaagttaattattaatttgtatggtatgaattacaaaccaaatattaaatattcaaaccatgttgatagcttggtttcatatttaacaaatggaaacagtaagattaaatggaattcatctgaatccaatctcacgtgaaataatgaccacttcattacaatgatcccatctataaaagagtgtttcgctggaatatttaaattaatatttaaaacactttatcaagcccatatggtgtagaattcactcatataaataaatagagtaaatacatcactaccattataatggtcacattagaatattttaattaatatcaaagcctagaagttatattggataatttttggataatctaatggaaagcaaattcgtttgagaactaatgaataaataaataaatattcaaatgaaatatttgaattaccaaaatccaaaatgtgtagagctacatttcaattccaaatccaatcttagccattttgcagtttagcccttccctttttccctctttctccttttctcttattttccaccggtactgttcattgcgcaccatgtgctcgactcggactccacccggtcgaacacccgacgccgccttcttcggtcgcggatgtgccgcacgcccacttggcgtgaccgtgcgccgcaccgcgtcacgccgcgccgcttgggcccgccgcccgaccgagccgccggattcccgcataaggctgcgctgccatgagcgcctgcgtcaccctatcccgtcgcgagtcgccatcgcatcgccatatcatcgcccctagctgagaccgttggataatgcggcgtttcttccccagctaggactaaaactagcagactataggctataggcgcaatgatggagccacagaactttaatggagaaggagatgaaccttagccatgtcatccacctcattgctcttatccgatcgccattagagctccagctcatccaggccatgtgctggcgatcttatccccatggtttccttacaccctaagctaagcccccaataaaatccccattcttctcagctttcttcccgaatgcatttcatcgaacaccttgcgatcactctctcaccaccactagagatcaccattgcgaggcttcccggccagagctggaggttggagggagtggaggaagagttgtgctcctgccgtcgccattgaaggacccgaggaccgctggacaccgggaaccacgcgtcgaacactttcgggcgtcaccaacagctagccgcctccacttcgtccgcaccgcagcacgcgtcgccgcccttcgccgtctctccatcccggggtaaaacctcgagcccatagcatcctctacacctctaatagctagcgccggctccagtttgtacgattaatgccgatggctgtgccgccccgaccgccgttccgccgccgacgagctcaccgtggataggccatcccgggtgctctccctcccatctttctggagaaatcgaacgcccatacaccgtagatgctcctacgcccatcaatttggcaggagaccgtaccaatcacccaagcaccaaacctcctcgagctcggtcatggcagccgtgtcgtgccacttgcctaggcgccgccgcacgccgcattcggtaccagagggtcgcctgagctccaccgcaccttccctagccaccgtcgggtcgccctcggccggctctgccgtgcgtgccgtgttcccctgctgctcccgcttggtcgggaggaagaagaagacgaaggttgaagacgacctttagccgtgccactgacgagccgtccccactcctcctatttcctttagaaaattaatcctgtgaaaaagaaaatcaaagctttgaccccacatgtcagcagctgttagggataaggatagatttcggattaaaataaatcaattaggaacagtaacttttcgctatttcttggattaattcaaatttgggtctttaaactagcataacctattcattttaactccgatttgagtgaaacttgaatctaaattcatctaaattcataagctttccaatggtatataattcactatttaataacatatattcatatttataaaataattaatgttcaatgattagattatgatcaacttaaaaatgtgctaataaataaagttggtattgtacagtaagataggtagaagaataattgtctttaacatgctttgtcactgtaacaactacattaattaattataaatattgtttcaaattaattgaagcatagaaagtaacattgctattcattagtcgctgaccatatatgtagttaagtccatgccttactaattaattaaattaagtttagtcttataattaggtaaataaaatatgagtatacatagatcattcctaagcttgattgggggggaggagataatagcagagctagtgtgattaaatcacctatacgaaattaattacttaatgtcaagtcccatggagtgagtagtatcttttaaattggtaatcaatcttaagttaataaacagtaccaactcgccaaatccacctacatcacatatactgtatatatatagattacagtaaataactcatgttcggtaaatggtccaatattaatatattattgaactgccataatgacaatagaagattaagaaaccttatccattagcaagaccaggtagtatgagaaaccctaggttcgacctcaacaattatattttgtttgtgcacattggattgttgtttgaacattggtttttctcgcgtattatagaaattgtatatcggttagtcgtgaggcaacgtatgcagcttccaggaggtgaagattgatcaagattataccaagaataagaactatcctgagcaggcaagtcatcaccccatcccctgagcatgttggtcccaattgtgaaattgttttgtttataaataaaattgcatgcaatgatgaatatcctacttgttattttgccatgcctttgattattgtttacctcattatttccttgtacccatgattacgtatgagtccttagtcaattatgacaaaagcttagtaatgctactttagaatcatgcattctcatatttatcaaatgctatatgcttaggcaactaccttagggaaagtagttgagatacggcttgtggagacatgagcgccacattgccatgacattggtgacatgatttgtgaaaggaaaaatgaaactaaacaactgttttcgactggggcggctggaggacttgggtggtgtccagaaaaggctagtaccgtccctggtcagttaagaaccgagccatgaagttaagcatgaaacggtccccgtacaaccatacttgtcgtgtgggtatagacctagcggagtaaatagctgagcggaggcggtacccaagccgtagtggttttcttgatgtgtgtgaggcaggccctacggtggggcagccattggtaggaccgcgaggggcgggtgcctacagttgtgtcgccatcggtaggactgccatgtgtaaacctaaacttaactataacttaatgcatgtgtgagtctgcttgtggcatgtcaaccgggcccttgtattattttgtcttccgctgttgttctctgatagttgttggcctacctggccctaatgtaagcatttaactcttttagcctgaattcattcgtgatatgttgtgattcggctatgtatgtgtgtaccaactactgatccagggattggtactgataaacacagaagatttccgatttccaaaattgggggtcgacattggcttagatagtttaatatgagaatgagtagacttatgcttgtgtgtcactctaccctatgaattatattaaccctgcttagactatgattattacaagtaatatataatttatcagtacggttctctctactgtaatcttcccatgggattaaacaaatacaatacccttggaatactctcgggtgaaaagctacactggtatatccgtgcgcttgcggataaactctataaccataatataccaggagtattttctacgacattgctgggaattatatttctagtaatgtcattaagaaataccatcactagcaacaaaatccggtcttgctgaaatttgtgatgaataagacacatgttatgctttggtttgcaaagatactctattttctgttgatgacgtctagctctttgccttctcctgtcactaatctttttgcaggagtttcgagatgtattcccatctgagttactgcaggtctaccacccatttgagggatttggagtatgaaaaagtggtttgataacgccatagaggctggtgatctgcctcaagcaaagagtggttcattcatgttgaggatcacccaaaacattaaagttgtttttaggagaaagtagtgaacggatggaagagggtggaaatcgcaaggagaaggtacatatatggatccttcaaatacattgatgtttacgaagacatcaattttctatgaatatccatcatactgggagcatttagaagtttgacatagcattgatgacgtgcacattatgaaaaatgtgtgtgaaagcattgttgacatcttattggacctctcatccaatacaaagaattcacggtagacctggcaaggaaagagttacaccctacgaaattgataaatgcaatgtattgtctataaccgactagcttctctatgataactgaggagaagaaattagtgtgcatgtgcttacacgggtttaaagtgcctatactaggtacacatctaacatcagaaacctagttccgataaaagatttagagataatagcaacgaagcctcatgattgccatgtgttgatgacacatctctcagtagcaatcatgggagtgaagccagaatcttcaaggtggcactaacatggttctgtcattttggcaacataatttcacaaaaggtgatggatgcttaaaaaactccaaggtttgcagggtaatttgcaactaccagaattttcaatctcgaactaactctttgcgcatttttttgtgagtgttgtgctttgcatctctctctctctctctatgaagatcaaatgtcttttgagcacctggaaatacaaatgctagcattgacttgaacacgtcttgtattgtggcttttcccaagagtgaaaatttgaaatcaaattgaattaaatcgcctagtgtcctttagccctttgctttcatttttaggggtcaccaagcatcaatcaaatcgccatgggactaataactctactttagctcaatacacacataggtcccctaattgccttgtgatctgtcatccaaaatccgctaggggccgagatgcactttcagtttgttcagggcttatgtatacttgttaaaaaggtctttcatatggtttatggtcgacatcaaaattccagatgaactgctcgaaatcatacaatcaacaaagcaaagctttgaacctcttccatccaagtcgtaggctttgtaactgagtcttggttgacacatgatatggatgacctcccacccatgtaacgcataaatagctagacatttgtcgccacctctaaggtttttgttttgcttaaattattcctactctatgtagtatcgctgctagattgttttctgcaactctaggctatgtgtgcttcatattcctttgcaatttaaactgtgtttttcttatgaacttctcgattgtttgcaggctcaataccttgtgagagcatcgttgataactacgagacaaacagatgtagggattgcgaggtgatatctactgatttaaagcctcaaattgtgaatgtacacatgtcgataaatcaaacctattgaaagatctggtaactattcgtatcaacaagtatttaaaaattacaatgtaagtttttaaatttaattgtaagtatataaaattcaccaatgtaattattaaaatctatctattattatatactaaaagtccattaaacttcctaaaaacacactcaagccaccacgtggcaccctataaatactgttatgccgccacgttattttcatttaattggcggacccgttattttagactattagattagatctatttgcttcctcttgatataacatgtcctgtgcatatggatgctgtttataccggaaaaaccaaaccatcagtacgtacttggacaacactaaaaaaggaaaataaaggaaaaaaaggaaaaaagaaaaaaaagaaacagaacgtacttacgtacaataaaaaaaactataaaacagaaaaaagaaactgttcacttgaaaaaaataacaaaaaatataaaaatatatatcataataataagaaaattataaatatatgacctaaaaaataagaaaagctacaagacctaaaaaatatatgtacataggtagaaaacaatagagtctttttaaaatatgtttttctttactataataatatatttattccacaaatatggtcatgtggcgttcctacaagcactcttaccgccatatgtcactttataatttcgttgtcaattttcatttaaaatgatggacccatttttagatcaatagattagtccgcttactgttaatttcctatgtataagagataaattgtttaccggatgtctgattgaaacaaaacaataaaagaaatatgcgtacaataataaagctataaagccaaaaaaatacatataaaagagtacataactacgataaaaaaccatcaaacaaaaaaattagatattgttcacttgaaaaaaaaatatgtacgtcgatagaaagaaaaatataatatacggtcctttcaaaataggaatttctatactataaaaataaaatttattactcaacaaatatgatcatatggtgtttcaacaagaactcttatattgcaacttggcactctaaaattttgctgtcaatttttatttaaaataatggacctattattttagatcattagattagcctgtttcttaatctcctgtgtatatgagagaaactatttactgaatatttgattgaaaaaaaataaacatacatacatacatacatacatacatacaacaataaagctataaagcccccaaaaaatacatatataagttggtagaaccttcgaaaacatatagacgttcttcagaataggattttctacactattaaataaaatttattactccagagataaatatgcaaaataaactacattaatataaaaccaaattaaatgtgtttaaacgcccattttaaatttattttaaattatacggtcaacttataatcaggtctattcaaatgttgatgacttatcatagttatattatagtgctaaatacattacaacacatggagctgacatataatctcaagctaccacgtggcactctataaacactcctataccgtcacgtggcactatctaatcttaccgtcgttcttcatttaattggaggacccgttattttataccattagtttaaatttatatctatagttgattttcatttaaattagtagatccattactttagaatcatttggtgtatatataattacttccccgtataaaaggtgtctaatttgaaaaaaaaagtacagtcagcaaaacaaaaaatcataagtacagtacgtatgatccgggaaaaaaaacaataaagcttatgttccgttggccggaagaaagaaaatgcctgtgtgacaaagtaaaaaacaaacgtacatagtataatcggggaaaaatgtaaatataattttctaccatataagataaagcgaaaaaccatatgtatgtagtactatctatctatgggtgtgtatgggtgtgtttaattctttaggtgtaaatttctttgaagtatacggacacacatgtattaaacatagataaataacaaattacagattccgcctgtaaactacgcgatgaatttattaagcataattaatccgtcattagcaaacgtttacggtagcattacattatcaaatcatggcataaaaactgtgcaattggtttttttcaccatttaatgtcctatgcatgtgtccaaatatttgatgtgacgttttggccaaaactttttgggatttaaacaaggcctatctatctgtctattatatattaaaagtctattaaacatcctacaaacatttccaaaccatcatatggcaccttataaatactctcaagtcgtcaagtggtaccttaatgaaatagagaaatctaacactcgattttcatttaaatcggtggaatcaatattctagatcgttagatttatcttagaaaaccaaaacctcccacgtccccgtaccatgtaccgcgcacaaagtgatcaatttgtaggctccctgttcctttatgttttttcatccctatcacaattaaaattaaaattatatttatggaaaataatctcaaaagtaggtgttaaagtccattaaatattttataaatatttctaaatctttgtatgacattattaaattagagaaaacccatccattggtttccacttaaatagattcgcacaatattttgcattgttattgtatctatttttttaatagaacaacatcccaaaccatcttcccttcctctccatccctatgggtgttttgctaagctgctacttgtctcacttaaattagaataaatcctaataaacctgagggaaaaaatagcatccaaccatcaacacattatttaggtcatcagatcaatcaatttttttcttaaaaaaataaacatcccaacctttcctccatccccgttctcatgcggtgtgcggtgttacttttctctgtttttaatatctctatgataattaaaattaaaattatttttatgggcaaagaaatgatcacaaaggaatctccacctattaggtctagccagttaatattttttttaagtgaaaacgatagctttatgtccatattgactatattttaagtgctaacaaaaaattacattatggactcacatccatattgaagcctctactcaataaagttaaaatttgttaccggacatccaaaaaaagtatgattagctaagagacactacaagaacgtatatctgctctgggacaccgcaaaaaactagtaattagctgctggatacccatggcattattctgttatgtccaaaggaaaaggggatataaacaattgcgcaagtatgatttttgccccttcctgccatgtgtagcttgtatatagctatgatgtcgaggtagtcacgacatgggcggtgaagggtatggcagcgtggcatggcacagctatgagaccgacagcaatagcctacgctctgcggtgccctgcttgacatgaatctggaggtggtccacgttgtgcttaccccaagcgctgtgtgtcgcggagcatcggcgccggcatggccctcgtgctgtagcggcgacgagtgcgggaacgacatggagccataggcctagctgcactggccctccttgaacccacctccccccctctagagagccacctcaccgacggcgggtgcggttgcaacatcgaaggtgtatgcgagccggaattggtaggtaggggaaaagtcatgcttttgttttttctttctccatttcttttggatatgataaaataatgtcatgggcctccggtagccaattaccagttttttcggtgtcccatgacagatacgcgttcttgcggtgtcccccagctaattacacgttttttaatgtcccgtagcaaattttaccctaataaaaggaaatactaaaattgctcactctacaaatcaaaatatcccagcttattttttaaaaaaactggtagacccattacttatatcccgttagacatctaacgactttccatcaactttttctcagcttgtatatgggagttatttacccatacattttgatgttgatgctttaatcaataaatgatcatttaaggagataaataaataatctttagatgaccatagcatctaaattatatatatgatctatgaagtcacgtggcaagttgaagaacatactagttgtactgagcatgttggttgcaccaagacaaccatggtatggcctcagcaatatataagccaattacagataggaattaaaagaccatatccatttcttttggtaaaacttgctgcagtacatcgtgaatttgtgacatatagcatagaacaatctagaaacatgacgctccagtttagtggtaatttgctaagaaaatactacgacatctattttaatttttcttacataattggagcgagataatttagaattgatgcctttaccacatgccagcttctaggaccaacccacttatattttcaacccgaattacagaatcaaagcatttcaaacatgcttcataaagtggatttatccaaaaaaatgaagataaaaggaatgaaaattgaataaaatttatctaatttaatttttttgttgggtttataacccattctaagtagaaatattcaaacattttagtaggactaataaaatgaatatatttaaaatttcaaacagaatctaacaaaaaaaaaggacatttataggaaacacatctattgtttcaacacaacattttctcatgaaatagaaacaacacggtttaaagtaattttagttcacaatttatatgttgtaagtaaccagtgctcaaaggacgttaaataagttcagttttagtttatgataaagtgaaagaatatttttgataggaaaccatcctcacatgacattcgtaataaaattttacgtacatgcccgcgcatatgcgcgggctaccttcctagttacattctaattaaaattttagtacaaagatttaacaactttttaataaaaaatacagagccataaatataaattctcccttaatataatttggacatacgcacacgaatctggatacactaattaatattgtcagacatagtacatccgtatgtatttaacgtacaagcaaattattgcaaacgctaacacacacgtccgcaagcttatgacgttattaattaattaactagggcaagaagccctatatatatccctatatttctcttggagaattcaatacattatctaatttgttcttacatactatacagctcgacgacaaattattacaatacttaattataactgcaattaagcaacagtacatattcatttgttgttaggtctcgatcggttgatccttgacccaactattatacgtaagcgtagataccgatgtttgccagccattccactattggagtttgtctgtatatatgcagaggtcgtcgtcgacgactcacttcttctttcctttcttattatcaccttgcttattaccatctttcagtgtttcactgcatatgtccaattaagcacaaattcagaggttaaccactgcacgacatataagacggctacaacacactatataaggataaattaattttatgcatgcactcgatcaattgtgttcatataagtactaaaacatcgcaaatgcaaactcatttgtacgtagtaccctgtagcttcgaggcgaggctgagtgctgagtgacgcgctcttgtctgcatgaggagaaaaacaacaaagaaaaaatgagcaagtcaagcaagctacctaggccatcatgcatcacgtaattagttgttttctgacatacgatatattgactcatttcatgcatattcaattgaaagaatatatatatatatatatatgcttttaatcgtgctctccctccgtccatggttataagggcttcttggctattgtgaaattattttgatgttgagtggagttactgttgactgcaaatatcaggactgacgttgtaactacgactactgagcgaagtaagtgtagtggttagatagacggtttgggaattactccctccatccgtttactttttaaaatatatttgaacatttgtcttattaaaaaaatttaagtaattattaattattttcgtatcatttgattcattgttaaatatattaccactactcgattttttgaataatattcataaaagtttttgaataagacgaacggtcaaatatgttttaaaaaaatcaacggtgtcaaatatttagggacggggcagtagtacgctaaagtctgtacgttaattaatttgtagacaaaagcagaagcataattcaattttggacggagggagaactcaatcatatataccgttgattgaaaactaaataaaaacgaatgcttcgcaccaattggcatgaattaatacgatagtataaactagtatatgaattaggtagttactagctagagtttgaaattaatcgccgtcaacaccgtttcttacctggcgtaatacatcttgtgtcatgttgattggaaagcaggcctgattgtgccacaagtcttggatgatccattcttaaggatctcaacgacaaacctccatctgcacatactgaagcatattaacagcgctagctaggaagatttcttatatgttaatggatgagatttactttagggccgacagagttcacattttcggaaaccaccgaaatttcgtgaatttcagaattttttttgtcctttttgcacgaaatatttaaaattttaaccttttttactaaaatttgaatatattaaaccaaatttatagaaaattccaaatattttgggggagatattgcttatcggggatatgaaatttctgctttaggggcttgcatagacatcaattatttccttttaatgatatttttccaaattaacctgcaaccttttaattgcacgtatctaaataacccttataattaattggatcagtgaagaaatcagcaggggctcgtacctgcgatgatgtggtccccggcaaccgggacaatcgtccagcagcagaacaactgatcttgatcactccccatgatcaccatgggcttatctgtcagctcgattatggagccgtctctgccgccggtgttaacggctttgaagacgagattggcgttgctcgccctctggatgtagcatctcctgctgatcagtcgccggtcatcgtcggcgtcggccgtggccggcgtcccatccgttgtccagcgttctccttctgcaccgtgcttcccgagcactacctgcagtggcccttcttcgcggcgagctggccgcttgcctgcagatttactgctgcctgtctccggcgtcgaccgccgccgttctccagtctgcggctgatgcgtccggctgctgctgctgccggcgccggggacgatctgctcaggcttagtcgtcccctgcttgtctcctcctgctgcttctgctgcaggtttactggcgactacgagggcgcagttccgtttcttgtttcttaggatgaacggcttctgctgctgctgctgctgaccatgcggtggcggcggtggcggcggcggcggacgtctgctgcttgtgttgctgctgcggctcgtcggccgtcaccatgtaccacagctgcatccacaaggcaatatatatatatatatatatatatatatatatatatatgtaacaaacatgtattacaattaactagaagttattaaaaagtttatactgctgctgctgatgaatgatatgatgatgatgcgtgtgtgttaattatatatatcgagcatggctggagttagtgttttaaaatttaaatagtcggctaagacatttaacacacggtcttacctaaaatttaaaacattgcctcgagatagcggtagctatagctagagatttaaaaccttacctggagatcatcgaagacgcgggagccttctgtattctccttaacgatgacttcgtcgctgctgtcgacggcggcaacgtagtatttcctgtcattgggatcgaccgtgaagatcgtgtagatctcaccggccggctgctggggcaaatttcccatgccttcgttttgggtttcagccatagttgacctatagcttcctgtagtttgtagctagagatcgatcgatcgagcagttagcacttagcaagcctatctagcgagatcgattatgcaattccagttctacct

SEQ ID NO: 27611 - DNA, 611 bp, Oryza sativa
tttgttagctgcccgtcaacttctcctggatcgtcccgtctaatcttgtatcgtagtgctttgcaaacagggcatgcttctaggttctcatactcctcaccgcgatataggatacaatcgttcggacatgcgtgaatcttatgaacttccagtcctaacgggcagactatcttcttaacctcgtacgttgtctcgggcaatttgtttccccccggaagaatgttcttaaagagtttcaataaatcgccaaatgccttgtcactaaccccattttttgccttccattgcaacaactccagagtggtatccaactttttgtgcccctgctcgcaacctgggtacaacgaagttctgtggcctccaacatcttgtccaatttatgggcctccttttcactttcgcagtcctccctagcgtcctgcaacatctgaccaagatcatccgcaacgtcgttaccatcagcagctatttcctcctcgcccgttcgatttccttcaaatccaacatactgagcaaagtccggaatattggcggcttccacttcatcttcttccatttcaacaccttgctctccgtgggatgtccaacaattatagcttggcatgaacccc

SEQ ID NO: 27612 - DNA, 6478 bp, Oryza sativa
ttcgtctaactgacctatagttttgcgattttccattaaaatcatattacttttaaaaaaaattctctctgctcttgttcccctttatattttactagttttatacggaagtcagcacgagtaaccataaaaaatgccaatcaatcacgcgtatatatatgtataaaagaatttcaatgtgattacgaataaaaccgaacgattaccatacgcaaataaaaggaaattcttttatacaaatatgtataaaaaatcaaagtgtttaaaagtttaatacctgtctagttcaaaactagaattattttcaacctcacgaagagtattttacaaatttcacaagtatttttatatttaattttttcgattacgtggtagacacttatacgtatataattctacactacgcgcacacacaccatatgcattgctgggtccacaattattgctttctcttatgcatggaaccaaattaagagctcaaggtggttgatactcctacagcatggcgtatacctaatgcaacaggaaatttccgtatatgtacacatgtagctacataaaatatactccctccgtcccaaaataaatgcagttttgcactattcacatttaacgtttgaccgtttgtcttatttaaaatttttttaatatttctattgctattagatgataaaacatgaatagtactttatgtgtgactaaatatttttaaattttcacaaattttttaaataagacggacggtcaaacgttgggctcggatatccacggctgtacttattttgggacggaggcagtactactcaccaaggcaagcacaatatatatatagataggacaaaatagagctactaattaattaaggagatctaggcagtagggacaagaagctacttaatgcaaataacatggtacgagagcatggattcgatgagcgcctaagctagctattggagaaacttctacgcatggatgcattcatgcatattacacatgaagttggtacgtggtacgtagctttcaaattgttgtggaacgaatccatccgtccgagttgaattaggtttcgggagaaaattaagaaagacgatcgatcgatcgatagatggagcgtgtggttagtacgtactacgtattttttgggtcgtctttggaacgtacgtacgtcggggaacgcgttcctcgatctctatatatatggaatggaccatcttgctcctacgatcgtcgactcatcacacacacggtcacaccacacagtggctggttcgtcatccatcgagtttctagcagctccatatatcgattacagatcagtcccatgtacgtataactgatatctgtacatactgtatgcgtatattcatgcacagtttatcatcagtagctcgatctgtgatttgcatgtaccgcagtgtactttctgcgagaccaagttttaatttatactccctccgttccgaaatgtttgacgccgttgacttttttaaacaatgtttgaccgtttgtcttatttaaaaaatttaagtaattattaattcttttcctatcatttgattcattgttaaatatatttttatgtaggcatataattttacatatttcacaaaagtttttaaataagacgaacggtcaaacatgtgctaaaaagtcaacgatatcaaatattttgaaacggagggagtacatacatgtgcatgtagtagtgtcgacgatgcccgcatacatgcatttggatcgatctcacttcccaacttaattttgttattattcagggcacctgcttttggagatgggccgcaaggcaaacaaagcaatctcgtgccggacgatcctattaataataaccactactataaaaatcgtttttctgtacaagggggtcggtaggttccatgcgggacgcttgtggcggcgcctgcaaaaaccgcccccccgggggcgggttgattagccgcatgcgatgatcggccatatatgctccttcaggcccgagcttgaccatttgaaaacgaagctttctctctcctaaagcaaacaccaattaggggggggaggttttcaactcgaaatttttacttgaactctatacgaaaggtgaagaactctctatcctgcttcatttggctccatttttgttatatttcgttggtggaaagtggagtttttttaatattttgacaaggtttgttctaactattttttgcaaaatctagcttcaaaatatatgttttgatgggtaaattttgcatgtaatcaattgtacatactagttacatgtattgttgtattttttttgggagacaaatgcatttaaacttttgtatgaaatacctgcggtctatttttttatctgtaacttttttgcctttatataattagatggatcggtcgtcatggatgtatgagatgcggagaacgcagccgatatttattaaggaagcatctaaatttattgatcaggctaaggcgcatgctttgagggagaatatgacaaagatcttttgtccgtgccgtcattgcaagaatcagaaattgttggtagatcctggtgaaatattgggtcacataatggagtacggattcaccgccaactacaaggtttggacctatcacggggaattcgccaatccggaagatgacgatgaagagttaagtttcgagatgaatgaggcagagaattttataatcgaagacatgtcgcgtgaaagaatggttgtcgatgtttccaccgatagtgatgatttcgatggtggttttgatttagaggatatgctacgccatgttgaaccagatgtgctagcggcaggtcacgaggattggagaattggcaggcattagagaaggcatcgaaggatcttctttacgatgaaacgaagggatgtgataaggatttcacagtcttgcgttcagtgcttgaacttctgagattgaaggctaaacatggatggtcggacacaagttttaatgatctgatgagtttgttgcgtgtgttgcttcctaagcctaactttgtaccatcgaacacgtatgaagcgaagaaactcatatgtcctttatctcttggtgtagaaaagattcatgcttgtaagaatcactgcatattataccgtaaagaatatgcggaattggaatgttgcccaacgtgtggcacaagtcggtataaaacggggaatgggcccatagattcagagtgtaccgatccagattctgataagggtaagcgcgggaagattccttcaatggtgatgtggtacctaccaattaaggaccgcctgaagcgtctgtactcaaacccgactgatgctgagttgatgagatggcatcaagagagccggaaaatagatggtatgattcgacatcccgccgacgctcgccagtggaggacatttgatgcaaaacacccagaatttgctaaggatcctaggaatgtaaggtttgcgttgagcactgatggaatgaacccgtttggtgacttaagcagctcgcacagcacatggccagtccttctcacaatgtataatcttccaacatggatatgtcagaaacgaaagtacattctactcactatcctcatacaaggtccaaaccaacctggaatcgacatagatgttttccttgagcctttgatggaggacatggaggagctttggaaagaggggttacgactatgggatgagtttaagcgggagcacttcaatctacgtgcgatcatattcgttaccatcaatgacctacctgcaaacttttcattatctgggcagattaaagggaagactggatgtctgatatgtctggagaaaacttcatacaaatacctgacgtcgtctttgaagacagtgtacatgcgacatcgacggttcctaccacaaagacataggtaccgtaagatggctagattgttcgataatacagtggagaatgacaatgccccagtagcaagaggtggtacatacgtgtatgagataacaaagaagattaaggttgtatatggaaagggaaagaagaagacagtaaagaggaagaaagctgatggtgacaacggtactgcgtcgcctttcaagaagcactcaattttcttcaaatacttagattactggaagaacctagagattcgacatgcaattgatgttatgcacctcgagaagaacgtgtttgatagcaccgttggcacattgctggacatcccgagtaaaacgaaggatggattgaagtcacgtaacgaccttgtagatttgtccatacggcatgaccttcacccagtagtgctgccaaatgggaagaccgagattcctcctgcttgttactcattgacacttgaagagaaaaaagccttttgtaaatgtttacaaggggttagagtgcctactggtttcgcatcgaacatcaggaagctagtatcaatgaaggatttgtccatttcgggatacaatgcgcatgactgtcataggttgctaacggtgttcctaccaattgctataagggcagtcaaaccagtccatacaaaggtggttataacaaagttgtgctactttttcaatcgaatttcgcagaaggtatttgatcctttggaattaggtccgcttcagacatttgccgtcgagactgtatgccagcttgagatgtatttcccaccatcatttttagatatgatggagcatttgatcgttcacatcgtccctcagattattgaacttggtccattatacttacatcagatgtgggcctatgagcgttacatgtcgatcctcaaaggctatgtacgcaatcgcgctcacccggaaggatcaatgatagagggatacacaactgaagaggcagtcgagtgttgtatggactacataaaggatgctaatgccattggcattcctgttcatcgacatgaaggtagattgtatggaaggggtactgttggtaggaagcagttcttcgataatgattacaaaaaggtgtccgcggcacacaacagcgttcttcaacagctcgctatcgttgagccattcattgagcgacacctagaagaaatcaaagcctgcttcccagggcggtccaatgattggatatcaagagagcacaagcgtcgctttcctctgtggttgaaagatctaaacctgccagttagtgattctgtggaggaacttactttacaaagactggcatgtgggccttcaagtattgtcaattcatggcaaggttacgacatcaatggatttaccttgagtacgactacgaaggacatgaaaagcaccgcacaaaacagtgggatccgtgtcgaagcgattgacacgagtggagaaaagaggtcgtattatgggaccattcaagaaatatgggaactggactatggcctaaacatccagatccctgtgctccgttgtgaatgggttaaagacacaataggggtttccgttgatgactacgggctaacgatagtcgatcacagtaaaacaggccacaaggatgatccatgggttttagcagagcgtgtggctcaagtgttttatgtgaaggacccttcagatgaaagaaaaactattgtcatatccggaaagcaacagatcgtcggcatcgacaacatcgaagaccccaatgattacaaccagttcgacgatgtaccattgtttactgatcttcctatgcgaattaagaaggttgagagaacaatcgatgaagcaaatatgtcgtacgttcgagcagatggtgttgccaaggttattaagtcatagttatttcataacctttagttctcattgtattccaaatgtacgtgcatgaatttaggtcccccttatgttgtaatcattagcatgtaacatttgattacgagttttgagcaattttcatgagttttcttagtgccaaaaacatttggaatgtataattgtggcgaaatattgggaaaaaaatatatatggacagtttacttagaaaaaaaaatatgagtttttttggtaaaaagatctttctatgcggacgacttaagccagccggatggaaagatctttttcccatgcggccggctttatggcccgcacggaaatatctttttcgcatgcggctggcttaacagcccgcatggaaagatctttttcgcatgcggccggcttaacagcccacacggaaagatctttttcgcatgcggctggcttaacagcccgcatggaaagatctttttcgcatgcggccggcttaacagcccgcatggaaagatctttttcgcatgcggccggcttatgtcaaccgcatggaaagatattttttccatgcggtcccttaagccgcccgcatgcgatgatctgcgcctatatatagggagcgcggggagccaaaattttctaagtcccggctcccgcgaaaccctagccgccaggttgccaaaatttcccaagtcgccgtcgccgtcgtccccgccaccgccggctcctccccaaagtcgccccgccccacgccgtcgccgccgccgacgtcaggacctctc

SEQ ID NO: 27613 - DNA, 5557 bp, Oryza sativa
ccgccggctcctccccgaagtcaccccgcccctcgccgtcgccgacgccactgccaggacctctcccccctcgccgtcgccttcgcccgtgccaggtcgccgtcgccgccgcacggacctctcccccctcgccgttgccatcgccgccgccatgtcgtccccgccgtcgctcggtaacatttacttttaaaaaaagaaatgtgaaatgtgcaactgtggattgtggattgtttaattgtgcatcgtggattgtgatatgtgcaattgtggattgtttaattttgagaaggtttaattgtggattgttaaatggagatttatgtttaaattgggacttatgttaaattgggatttatgtataattgggacttttgttaaattgagatttatgtataattgggacttttgttaaattggcacctatgttaaattgtgacttatgtttaaattgagacttatgttatattgggatttatgtataattgtgatttttgttaaactgagatttatgtataattgggacttttgttaaattggcacctatgtcaaatggagatttttgtttaattgtgactgatgctaaattgggacctatgttaaattgggacttatgtgaaattaagttattgggacttatgtgaaaataagttaaattgtgacctatgttaaattgagatttatgtataattgggacttatgttaaattgagatttatgtataattgggacttatgttaaattgggacttatgtcaaattgagacttatgtgaaattgcgttaaattgggacttacgtaaaattgggacttatgtcaaatttttttacgtcaagttggaagatgtcgaacgaaaaggttccatccaacgcaccaatagcgcctcaagaaggtaacgctcctcaaaattccggtagcaataagcagccagacgcttctagtgaagaaacgtggcgcacaccaagtgacccgtttccaatggaaataacacaagtcgccccccgcgatgatgatccggactacatacctatcgaacaggccgtaagtgctgaaaatcgttagccatgtattattccctaactatgatgtgacatgaacctaatggtgtatagagttacctattctgtgcagatggtagtccgacgccgctcgaaacgtaaagccgggaggaacaggacagagcaagaagttgagatggacacccctacgtctgcacctgaacgtacggagacatctacaagtgcaggcgggagtgggaaaaaaagacgtggtgagagaagcaagaataaattacccaaggaaacttacaacgtgattgctctcgatcagtatgggaagcccgtcgagccaccgatagtgcggtccaagttcagcaacgcctgtggcactctagtcaggacacgttgtcccattaatgtcaagttgtgggaaacagtggacgacaacatcaagacacttctctggaatgagttgcagaagtattttgtgttccctcctggatcagagatcagggggagagattacgcacttaaaaagatgggagatcgatggcgacagtggaagtccgatctaaatcgggattatgttcagaagaatctcccaccgtttacggattatggacatatatcgcaggctgactgggacacgtttgttgcagatcatacaacagctgaagcattggctttgaggaaaaaaatgtccgagctcgcgaagaagaacagatatccccatagattggggtcgagcggatacgctggtcacgtcgatcaatggcgggagatcgagcaaagatttgccgcggccggtaagcccctgctggtagaccccatggttgaacgtagcaagaactgggtttgggcgcgcagcacaggtcaagtctcggatgagggagacatactattcgagactccagacatagaagaagtgacaactaattagcagcagatagtcgagaaagaaagatcaggacagttcgtcccacggagggagcgagatcagcttactgcggcgttggggacggctgaacactctggacgtgtaaggggtttgtcctcaaagacaagttagaaggtcgggtttccacaagatgcaccaagttataagaagagagacaaatacaaagaacaactatcggacaagatctatgcgcaagtgaaggaacacttctactcgttggcagctgaaaacccgacagcctttccaaggttattccctgatagccagcaacccacacaatccgcatagcaaacaactaatgtacccagcagtataggctcagtgcagacaactaccttccctgtggatagtataactggaccaactccgtgcagtctcgtcgtaccaatcggccgcgctggaaagactaaggaggttgcaacgggtttagcgatacccggacgtcaattccacaacacggcaatccctgaggattacgcaagggtacaggtcgccaaggtccatagcgaccacgtttccttggaactagacatacctgcacctgaggggattgaacttctcggtgatgcagtgaatcagtttatcttgtggcaccgcagagacataatcctgagcgcggccgttcctgcagcaggatcttcaaccccatcctcatcgcaggcaatgactgctgccgctcctgccccaccgtcgcctcctgaaccaccgtcacctcgacatccgccgtcaccaccaccgcttaggtcaccgcctcgccaacctacaccaccaccctccccttctcaacaaccgcctctcccggccccgcaaccagttcaagcctctcccacctccccagctaaacagcatgctcccccggctccgccctcagttcaaacctctccacctacaccccaatctgctctggtagaacaagtgcacataccagatggtattacatccgaaccgaagtctaatactttggaactgagtcgtataattccaaagttgatatcgacatacgacccaaaggagattgacaaggataaggagaagttcatgttttcagctttcaggaattctgagaagagaaaagaacttgctcacgtcttgtcagactcccagaagttagtactagcggcccaagatgaagtgcaatcctggttatctgctgatgtgcctgaaacttatgagtatggcaagccattcttgccaacttatcttatgaacaagctaccatgggaaatgagggtaatgcacgaatggtatatgaaggcatctaggaaaggtctcggtttcataagcgtcgccgtcccggaaggcgctttcatgagtggtcctaatggaatattttttatctctttccaagacctttacgccctctacaagctagataaaatggacgttaatctcgttgcggctttctgtctgtaagtctgaactctttattacatgttgtacgtttcattcgaaacaaataaaccaaatctcatttcttctttattcattgtatagtatgcaattccacgaagctgatagaactggagcaaaggttggatacgtcgatccaacaagaatatgcaaaacacaacacaccgtagagctgagagaggactgcgagcaattggttggcaagaccccggaagaaaaggaagaatatgtaaagacattgcacaagaggaagaagctagaagtagcaacatacttggcaatagcaatgttggcgcacgccgacaaagatgtcttaatggtcccctaccagttcacgtaagctctctcttctttttgtttaattaatttatcttcttcggaattttctgtctccaataagcctatcttatatgtagagaccactacatattattccttgtatatccgaaagaccaattgatcatatcattggaccccgcacactatgacaaggagacatttatggaattcctcactattttgaatttgtaagtgataaacatttcattactataaattgtttaggtcgatcaccagtcttctaactactaataaaacaattgtttcttcaaacagagcacacaagtactaccgcaaaagaggtggaccagtacatattccatcccagaagaagttatccgtcaggactggctggccggtactatcaaatttataccaatacaactaattatcgaacagtacatatatactaaatatatctactgagatcggtccccataattatatcgcagtgctacaaacaaccaccaggaaccaacttgtgtggttattacgtgtgcgagatgctcagagtaaatgggaggtacaaaacaaccagtaaccgagtaggtcatcgaactcttctctacaaagaaacccatctcgcacacacttctcactgagtaccattttattttcctttctgtgtgcagatccccgaaatcccatatattgcacaacgattcaacgacactactatcttgaacgtggccgctgacctctgccgattcatccgtcgcgatgtctgcaacgcaagaggtctcttctatgacaaccagagtgaactcgcaatggacgacaaatttaaacctctcagagagtgggagaaagaacatatacaataacatgtacactacttatacatatgcaataacatgatgaaaaaactgtgccacttgctattatatatttgtatgtaaattacgattgaattaatggttatgtattacatgtttgttactgcggcacttgtcttatcttatatgcttactactccgaaatacgataataaatccctcaataatttaatattaattacgaatcaccaaaatgctagaataaatattattttagctattcggaaattgaatttcgcatacggtctacttaagacgcccgcatgcgaaaatagatcttcgcatgcggtcttcttaggtcgaccgcatgggaaaatatatcttcgcatgcggcttcttatatggaccgcatgcgaagatctattttcgcatgcggccgtcttaagtgaccgcatgcgaagatcgatcttcgcatgcggctgcgacggccgcatgcgcaaatggtgatctttgcagaccatttcgcgcatgcgggccggccaaccgcatgtgaagatcgattccgcccgtatgcaaaaacgctttctgtagtagtgaacctgcagccaaacgcaggtaactaattaagcgactgcattttactagttctttcttttgtgttggttcgatctaagcgaatgcatttcttcaagagtcgagggatcgatggatggacatagtatatctagtttccatgtcaatggatgatttttaaacttttgtggaagtttagagacgtaacttcaactttttataaattatttgcaaatctatatatttattgcggtggcgtattcctcgtgatctcttgcatgtgtactgacatataattaatcaatagatcgagaaacaaatgggtcaattgaacacattatttctgattgattagggcaaattaatggatgcttccgcggtttatttagtttgatgagcttaaacattgaattcttgcttcccttcttgatgttgctctttattcacttcgaacaggcactgctgtagaattcgcacatcaaaataatgtcacaaccaccggggtgca

SEQ ID NO: 27614 - DNA, 7643 bp, Oryza sativa
aaaggctccatgtttgccgacagtgtgacgaagcgatgtgggcagaatacaggacaatgtaagggagacacaaataactactaaatttatttacctactctctcatttcatattataaatcgttttgactttatttttctactcaaaccttttcaaacttgataaatttataaaatgtttagcaacatctgcaacaccaaattagtttcattaaatgtaatattgaatatactttgataatatgtttgttttgtgctgaaaatattactacaatcttttttgagcttggttaagcttagaaaaatttaactagaaaaaaaaataaaaaaaaatcttataatacaaaacgaagagagtagctatctatatcattctagcttctctcagttcctcagccaaattcgttctgtggggaagagctcatcatgactcgaagattgatgaccatggcagctggaccatgtaatcaaccatatttatttaactagcaaatttaattataatttcagttttgttccccagccaattttcccgccaaaaaaaaagaatccccaggcaatttatttaatttgttgttctttagtggaccatggatcaacgtgggctgatgctgatgtctagtcctccagttaagagagacgccaacgaccacatttatttagctagcttgttaattatacgggaacatatcctatgcatgtaaattttccatgcgcaccaactagtaattataaaaaaaattatagaaaaaaattgaacatttacttctaatagtattacatatatatgcaaagctcatgttaaaattcattatattttcgccataacaaaaatatgaaaaatctaacagttttaagagtaaaaatctatcaaaatattgtctttttttaggctaaaatataatgaatttaaagataagatttcgcacataggtgtaatactattagaagtatgtgtctaattttttctaaaattttctgtgatatttgctagttagtatgtatgaaatgtacgtgagaagtttgtgtgtatgtatatgatatgttccctaattatgctactacaaatgataaatattaggatactaaaaagtaacttagcacctgttatcgatagagaaaaaaatgttaagaaaacgtggacatgatcaagtgggactcaaacctaggctggtccaagcgccggtatagcgctcttaactaccactgggcatgagaccggtctcttgtactacttcatccattccaaaatataagagattttaaaagatgtatcatgttctagtagtacgaatttgtatcaaattttactactacgaatctgaattgttactccctccgtcctaaaatataacaacttttaaccctcatgatttgtcccaaaatataactacttctccatcaacattcttttcccaaccaatcacaaccctctactattcacttttcccacctacctccattactcttccaatgcaacccttcactactcacttctacctactttcttaataaccgtgtccaactctaaaactccttatattctaggatggaaggagtatatcacatctcactaaaatctcttatattttgaaacatgatagtactattttagtacacatttgtggcagattaggtcacatatcgtatggatccgtccattcatatagtttgagtttaaacattgaattatcatttcccccgctgaatttgttcttattcatgtggaactgctgcagccaacaaaccggttccaccagtacttaataaaagctcaaccggggagaataatatccagatcactgtggaaagtactagtggggaaaagaagacaacaggtagagacgcaaacaactattataattttactttctaaattccctatcctagttgatttttttaatgttttttgtacgatcattattacctgaaaaacagagcatataatcctatataatttttgccttcacataacgccaggtccgaatgggaaaggaggaaacatgtaacctttaatcgacgagctctgcgtatccaaacttgagtggacagaaatatagtccagctggactatatacatctgatgttctgcacaaaaaatcaagatcgtagagctccaattcccagtttggccagtcatacatggccatctatgtatctttattatatattataccttgtggcttttcttccttgcttgatgtgattaaggtgtgttttgattattgatgaacaattcgcataagagatagttggttttgatatttggtggattattgtcgaagttgtgctgactgtgtgggacccagtcaaactggcatgcggtgcatgattagaccggccggcccgatggtctgaacggctggctctgtaatagagtcggtttcgagttttttaattggatactcgtgattatttcatgattactatacttatgcaatactgttgtgttgtgtgttaatgttgagtcaacaattgttgaaaaacatgtgctcgcatatggttttttgtttattcatctgtaggtgtgttttgatacctcgggagagcattgctggtgatagattgggaggcaacttgagagaagatggcatccagatgattaggaataaatcatgtagtatacttaggctaaacaacaaaataaatatggtggtgaagatttcatgcgtcatacaagagggtcgtgtacatgtagaatgcagagttgaatttgggaggagtccaaacttgggaaggttcaagtttaaattgaaaagaaataagttagatacttgtacaggaatgttttctagtggattaagactacttgtacaagtagtattcatggctttgggccaatcacctctaggtataaatggaagagggttgaccctctcggtatcgattgtgtaagagacaagataagagaaaagttagggtttagcctatattttgtgtttaatcgaatgttgagagagtagtattttttttacactttgtaaacataaattagaagcaataaagttgatttgctttcagagagttctttgattatgtttttcttgatcttggcaattagaccaatgagaaaccggcggcatctaggcggttgcatcagcatcttcaagaggttgcggtggcaaggagggtaataggaccagccaatccacaccggttagatcggcagctagggtgcagtcagcccagtgtgcacacagcagtcagatcggactccgttgtggacttcgttgtgatgacccgtgccgtcattaccaaaatgacttcactagtccatggattattatttgccatagccgcgctttagcgaataattaatgatccacatcaaagatagcagtagaataatagctgtaaggtttagataacattacaataccatgccacgcagggctaaattctgaaacagggcattacaagttcacccatttaataatacaagttctaataagcagtagctatcagtactttagtcattacatgcttcattatcccaggttctctgacatagctaggatcggagtagctactagaagtaccactcccctgcataactcatcccatcctccataatacacatcacatccccttgattttcagcacaccaaggggcatagcaccgatcctccaatctataagtatcatttaactcaatggcttgcccaaaattgcttgcgtctaaacaaggaaggttaatagcaagggtgagtacaattacttagcaagcagtattaatagcaaggatgtatggcatgccatttcataagtcatatcaaatcatcatttcgcaattataatttctttaaaaaatattattgtaagaagagtccatatttaatttataagaaaagctactactcacttgcactagtacagatccttccatctgtgacggcccataacaagactagaatttgcgggccgtcacaaggaagtaaaactaaagtactgtgacgtgcccatccgaagttttgcccgattgagatatggtcgcacagccatggtatatcggcataaaactaaagcccgtcacggatgacacttatctgtgacaggctatagttgaggcccgattgacatgagggttccatatctcaatcgggccctaaaagaagcccgtcacaaatgagggtcatctgtgacgggctccaactagaggcccgattgagataagtttaatgcccgtcacagatgacactcttttttgacgggcttttattaaggcccgatagagattacttgtatgcccatcacggttgattgttttagggccgttacagatatttgttgcacagtataaataccccccaccacctagtgtaactgtatcccactgttcactattttggtgggaggctgtagggggcgattttttgtcctttttccaaggaaaacagaaattaaattcccaaaaattgatcaaaatggatcaatcaagtgagtaatattattcattaattgagcaatttcatcatgtcttacttttgcaatactgatcttacaatatgtgcctctaatttgttttttttttattttgcagcaattgatcgaagttggatgtatgagaaaattttgaaacgtcattctatggagtacagaaagggcgtaataaattttatgaacgctgtggaggaggatcggaaaagaagaaacagtgattatatgtgttgtccatgtgcagattgcaagaatgagaatatgtttgatagcggagaggacgtacacggtcatctgatacaacgaggattcatggtctatacatgttgggtgaagcatgcagagcaagaatcaggaattggagcagcagcagacagaagtggtgcgcataatcaggaagatgaagatgagcatgacatgtttataccttctccattgggtggtgaaatggttgatgtgaatcacgatctgctgcaagacatgttacgcgacgttgaggacccagcccagaatgagagatatggaatgaagttcagcaggttggtaagtgattccgagacgcctctgtacgctggatgcaaagcaaaacacactaagttgtcagttaccttggacctaatgaaactgaaggcaagtagtggatggacagacaagagtttcacagatcttttaggaattttgaaggctatgcttcctgttgagaacacattgcccgagacgacatacgaagcaaagcaggttctgtgtccactggggttagaggtccgtagaattcacgtttgtcccaacgactgcatattgtaccacaaccaatatgcggacttggatgcttgtcctgtctacaaggcttctcgatacaagcgaaagaaaagtgctgacgaaggaaataagtcaaagaggggtggtccggcaaaggttgtgtggtatctacctatcattgatcgtttcaagagaatctttgccaacccgaacgaagcgaagttagtacgttggcatgccacggagagaaggaatgacggtatgcttagacacccagcagattcgattgaatgaaggaatatcgatcgaaaacacaaagactttgctgtagaccctagaaacatgaggatatgtctgtgtacggatggcatgaaccctttcggtgacatgagtagtactcacagtacttggccagttcttattgcgaattataacctcccgccatggttatgctttaaacggaaatatattatgttgtgcttgttaatctatggtccaaggcaacccggcaatgatatcgatgtattcctagagcctgttatcaacgatctagagattctttggaaagaaggtgtggaaacttgggatgcatatggtcaggagaacttcaagctaagagttctattgttctgcaccattaatgactaccctgcactcggtaatctttccggataaaatataaaaggaaagaaggcatgctccgattgcaaggaacatacacgaagccggtggctgaagaaattggggataggaccctcttggaccgtagacgcatggcatggatacgatataaatggatacacattttacaccgtcaaacaagatgacaaaagcacagtgcaaaacagcggcgttcgtatagatgcattccaggatcaagttgggtcaaacacatattacgcccgcattgaggatatctgggagctaaactacatcaagttcaaggttcttttgttccgctgccattgggtgaatatatgcactggtgtcaaagccgacaaggaaggtttcactttagttgatctatctaaggtgggatacgccgatgaactatttgtacttgtgaaacaggtcgagcagatattctacataaaagacccttcaaacaagaagatgcacatcgtgagggatggaaagcgccgaattgtaggagttgaaaacgtcgtcgatgaagaagaatacaaccataatcttcatgtaagacctcacattgatcttgacgatgatccataaccttgtaactgatgcatctatacttatctattgtaatgaatgaagtattttatttcactgcaaagacttgatatgtgtagtcattaatatggctaattttgttttattacaaatgaccaaaataaaagttgtagatcctgatgagaggatcaaatttgttgttgaccatatttcaatttgaaatcacttagtatttacaaatgctgttaattagatttgtcatattgtcaaaatcaatttcaagttgttgggaaaaaaattttatagaaaaatgaccaaaataaaactagtagatcttgaaaggctctacaacttttttgttgaccatatttccatctgaaatcttttactatccgaaaatgtattctgactaataaaatgaattattacacagctactatatattttgcactcacaacaaataaaagatggaaaatgagtcatcgatgacgggccttagtttacggccgatagagattaatctatctcaatcgagctttgctgtagggcccgtcacagatgacgcccgattgagatgacattcaggcccgtcacggatgagtcatctgtgacgggccctatgataatgcccgatagagatagattaatctctatcgggcttgaactaaggcccgtcactgatgactatttttccatttttccagataagtctttatatttgtgagtacaaaatatatagctgctatataataattcattttatccgtcataatacatttttggatagtaaatgatttcaaatcgaaatacggtcaacaacaaaattatagaggttatcaagatctacaacttttattttggtcatttgtctatataactttgtttccaacagcttgaaattgattttgacaatatgacaaatctaaacagcatttgtaaatactaaattatttcaaatgggaatatggtcaaaaacaaagttgatcctctcatcaggatctacaacttttattttggtcatttgtctatataactttgtttccaacagcttgaaattgattttgacaatatgaaaaatctaaacagcaattgtaaatactgcatgatttcaaatgggaatatggtcaacaacaaagttgatcctctcatcaagatctacaacttttattttggtcacttcttcatccgacaaagtgatagttatattattcacaataatcacatttctctcatctggtttatagggctgcagga

SEQ ID NO: 27615 - DNA, 16423 bp, Oryza sativa
  unsure (1)..(16423): unsure at all n locations
cccatcaccgatgagtcatcgtgacgggccctacggcaaagcccgattgagatgactcatcactctactatatctagggtttctcagatcggatcgaaaatttttctaagtcccactacagtttcccgcctccttagaaccctagcgccgccgccaactcctccttcgccgccgttgtcctccctcgccgccaccgccaccgagcccgccgcctccaccgagcccgccgccgccgccaccgagcctctacaccgaccagcgtcggccttcctcgtcgtcgccgcctgcctcttcaccgacgcgaacagctgcccccaccgaggccggcgacgtccttcctcatcgtcgtcgcctactcctcaccgacgcacgacgccgcccgcccgacgccgacttgcccgaccggcgtctacaccgaccgccgccgccgccgtgaactcctccttcgccgagcccgccgccgccgccaccaagcccgccgcctccaccgacccacgaatccctccaccgagccctcccggccgatctcatgtgagtcctccatcgcgcctccctctgctacctgcatgtggttgatgatgaaaatgtggatgttgggatgaaatgtggatgttgggatgaatttagtgatagatgattttagtaattgatgacttgatgatgaatagatggaatgtggtgcattaatgaatttagtgatagatgattttagggattgatgatatgtggtgaacgaatgattttagtgattgatgacatgatgatgaatagatggaatgtggtaaattaatgaatttagtgatagatgattttagtgatagatgattttagggattgatgatatgtggtgaacgaatgatttttttgattgatgacatgatgatgaatagatggaatgtggtgcattaatcaatttagtgatagatgcatgatatgcggatgaatagatggtatgaggtgaatttatgattttaggatttgatgatatgtttaatttagttatatgtgccatttaattttttgttattttgaaaaaaaagtagacgatgtctcggcaaggcgaaccaatgtcgacgacaactagtgggtcctcaagagcacgtactcctaggacagggaacaaaatctctaaggaacggttccgcataacatcggtggacgccgtagggttgccaacatctccaaggaaaatagtgagccgatttaggtctatctgcagggtcatagggagacagaaattcagtattctgcaagatgacatcaacttcgtgccggccgcagagaaggacattgcttggctaacgttcaagaagagctgtcacgaccggaaataacccaacgggcgttccttacgtgtgtgtattattccttgtcccaggaggcaaggtacaccaaaagttgatacatttcagagtttatcaagcgaaagcgtaaatagttactttattacatgggcggcgaaggcccagcacacacaaagacaaacgggaaacagcggaagactagggcgacgaccacaggcgcttgacggcaggcacgagctagacaccaaagccttcatcatccaggggctcctcttctgggtttgggaaaaattgagcaagactgagtacaaccaccgtactcaacaagacacacccacaagtgcagaataaatgcaagggagtacaagggagccataatatagggggggttagggtttgcagtaaacagcactaaatgacacttagttgctcaaagctattttgtaaacacggtcctagagctatacaagattattaatcaaggccgtgaacccacacgaacctgccttaacccaaggcctacgatgattcagaccgaactggcaacccgaccctgggtcccagctcgtcccaagccaacccaggccagccattccacattttagttgttaagcaggttttaagaattaaaaacactaacttgggtacattgctcggcttgcccataaccgagggcgcggctattcgaatagattatactctgatcagaggtgtacatctttacccacaagacacatcttcctcacgtgtaaccacgtgccacataccaccacggtatacggatggaagacatgacatagtttccaacccatcctagccataaacaagagtaccgacccaaccccacctacggccgaaacccccgggacaggtaggcaggactgagcccctagcagcaggacaccggccctgtgccatgacatctcgactaccgggccgcagctcgtgtagccttcatttgccctagagatgtccatcgacccccgacttcgtccatctccatccgtgtacttttgtttataaccagactgagccacaaactaagccttacccactagacatgtggaagtacggtagtgctttgcaacagaggcccaaagaccggtccttatatggccgaggtgctactgtcaaaactatgcaccccgagcccagcctaaaaccattttgagggttttgaatagagggggaggtgtgaatccaattccacaataatcccaccattccatagtgtccaggtgatatgaatattcccaaagtctagagttgtaaaaccacctaatgttgcctaattaaccagcgaagcatctacctaaaatcatactagtggtaccatgagtagagtgtccactagttggtgttttgtttattctagggtgaacaaggtaataataacaataacaataataaggtcataacaaaggtacataggcatggctagataaaacagtgataacgcgggaatttaaataaagcgataatgcaataatttaaatcaaaataattttataaactaggattcaatatgttcaaggatgatgtgacttgcctcgctcactttcccaaacgtcggcttcaacctccacaaagagcggatcttccgaagctgcaacgtctacacgaccaacggaaaagaaaaggcttttactctaataaactccatataaccagcaggaacaaagcacaaaaatgggttcttgacttcttaaggaaaaattagagacttgaacggtccaattccgagttcaaatggccaagttatggccatttgaagtttatatgctctttaaatgaatatttgcgaatttcttcatttaaattttaatttaaaaagggtttattgcgtcagccgaggggagggggcgcgcggaccgggtccacgggagtggggcccacgcggcagcctcacggtccacggtggaccgggcgcacccgggctcgcaccggccggcgccgtgggccccacgcgtcagccgcacccgagggccctggcggctgacggccgggccccacgtggcggccactcggcgtggccggcgggaggcggcgcccgcgcccctatggtcgccggcggcggccataggcacggcggagcggcggccgagagaggggaagggaagggggaaaagaggcggcggtccgcggctcaccttaggtcgacggcgacgacgaaaaaggcggccggagcggaggaaggcggcggcgcggctcgggtcgtctgggtcgacggcgttccggcggtccgcgggctcgacgaggggttggacggggtcgacggcagtgcggcgaagccggaggaggcgacgccggggcgggagacggtcccggcgagcggagaaggccggccggaggtcgtcggcgacggaggagagagagggcaatggcgcgagctcgattccggcgaggagacggtgcggcaagggcggaaacgggcgagggaggcgcggggagggtttatatagggttggaagggggagagggcggccggaggggaaggaaaccggcgcggcgctctcgggctccatcaatggcgccggcgggattagagggggggtttccaaacgaatccaagggagaaagggagggaaaatagggggaatgggagagggaatcacggggaataattcccccctattgattgcacgcggggaggacgggatgcggcggattcggcagcggcggcggcgcttggcgcgggcggagcagcgggagcggcgggaggaaggggatgacgggtgggccccacccgtcagcgagggtggcgggcgggcccgcccgtcagcggcgcgcgcgcggggagaggctagatgggccgcgggggagaggagaaaggggcagggagatgggccggattcggcccaagagagggaagggggatttttaaggtttttctttttataaaaccttttcaactttgtttatttcttaataattattatttgtgctctgaaaattccactaaaatttatttacgcattttaggcttttaggaaatttacaaaaatcctctaagccttatttggcttttaactttgcacattttaaatgttggaagctttcacacggattttaattattctaggcataatttaaaggatatattttagggtcgttttgggacgtgacaagagctttgattatcctgtggagcatgataaccgtctcaggcgggctgctttcaaggttatgggcaatgcttggaagaacttcaagactaagctaatcggcgagttcgtctacaaccaggcgaatccagatccaagagagaaatttccttggatcacggcacaagtctgggaggaattccatgcgaagaagtcgacccccgagtatagagctagaagcgaggcatatcgcttgctctagatcaagaaccagcatccgcaccggcttggcaccgccggatatgccggtaaggaagaggaatggcagcgtgaggatgaagaagcggaggaatcgtgcacaccgctcgtgtttggcgatatcccacaccctcgggctaggaactaggccagggccaggtaccagaggaatgatgatggcacaatcttcatgccaaatgcagaagatcaacgagtatacgaagctatagtaagtgtctactcaaactagatgttcgcattgtttcccatcgtgcagtttatttaaccccactaaattgtaatgcagaaggagttggttgccgagcaacaagcctcacaagaggcctgctctcaaagacgcgaggacgacctcctcacgaaagcgttgggcaacaaggaacactatggacagacacggggcgttgggtcttctgttccctagaagtatggatttccagactacgcttggcagtacaagaagcggacttccaaaaaggcgaagaaagatgcacgccttgaagccaagatccgggcgtcgataagagctgagctgacatctgaattcgacgaaaagctcgagtcgatgagggccaagattaggcaagagatccgagaagagaaacagaacccccaggccgccgctgctgctgcgcacgaagagttaggaagtcccacccaaaaacacagcagttgcgcatcaactgagttggcggaaaatccaacatcggtcgacagcgccgtcgaccacataatggtaaccgtgaacttacttaatacatgaaagacttaacaaatccatatgatatataatattctaaaaaaattgattaatctatcacaggaaccaacgagctgcaccctcacagttagggtgatgccgaccttcacggttccagcagccaagggacttgcgtacaagccgaccccagagacaagagtgcatggagcgcaactcaggacggactgtgcaaaagttcaagtcgactcggtgaagcccgaatacgagctgttccctctgaagtatccaccgaacgatgaggtcctctcactaggaaatgcccatggtaccttcatccaatggcccaaggacctcattgagatcagggttacagcgaggccaaccactgcaccaggcggtcatccaccaaagagacccgcctctgctccttcagcccctgctgctcaagattgtcatgcacaatcttacgatgtgcagttgcagtacgacacggattttggggaggaccgaacggaggccgacagcaaggcgattcatgaacccccaccgatgaagaagagcaggaaggcacactcttcccctcagagaattactctcgataaacccgaagcaaaggggagaggaaggggaggaaaggtgcagaccttagttctggctccaaggaagctagatctgggcaagggccaggaagagactaagggcaaagaggtcaagaagaaatacgtcgctccacaggagttccaactaggcatgcaattggttggagatgacgtgcttgccgcaatgggcaccgcttgcaagcaccttcacttatagtacatggagaaatctaacgccaggaagccaagtaacgctaccgatatccttggagagcacgatggaaagccattccttggtccaacaaattatatcgtggtcaacttcaaggatcttttcgacctctacaggctccgagcggtggacacaagcctccttaagtgctactgcttgtaagtattgtcgcccaactcaatctggtaataacaatcggtttaacttgcttataagatcgtttatcttgtgtgtaggttaagttggcagtggtgtcagaagcatgcaccagaagttgccttccttgatccacaagtggtcactgtcacaaatctccagaatgaccgtctaggaatggtcaactacatctacgacaccttgtggtcccgccgagacaaggagtacattatgtgcgcctataatcaatagtaagtgtgttaactaaatatacacaacggcatgacacattccttgagtacttaattaactttcactatattaatgccgcagtgcccattggatccttctggtcataacacctaagtggagtacatgtcactacctgaactccagaattgataagaacgcatatgattggaccccaattcaactagcgatagatgaagcgtgggcccaatacgtgcaaagaggaggcctcaggaagataggacatgacaccctcatccacaaaaaagacttcctggtgaagcaacaaataggtgaccagtgcggattccatatgtgccacaacatgcgccttctgtatagagaaaaggtgaagactttggctgagtttgaggtcggtagtctcaattgtgatagactaactacattttagtacttatatatgatcgatcaactaatctggaattatgacaatgtagggcacaataaccaagtctctgcctaccagctttgaagaggttcgcgaagagatagccagcttcatcctccgcgaaataattaaccccaaaagaatgtttaggcttaaactaaaatgatgaacaatgttgaacttttatgtttaggcaatgatgaacacttattatgcaactgtgatgatgtatatatttcatatgtttatgttaggacttgctaaataaatatttgatccaattaactcggttttgcaggtgaaatatgataaatatttgaatggatgtgaaatatgagatggctgtgaatgtgtgtttgtgtgaaatatgttgatgtctgtgtatgtgaatgcatatgtgtatgaatgggtgatgctggggagctggggatattggatatctgtgtttgtttctgtcatttttgcagcgggcatggctagcaaaggcctgaggctagccaaaaaaacaaatttttttttgtggattatagtcatctgtgacgggccataactaaatgcccgattgagatgaggtcatctgtgatgggctctaggttaggcccgattgaggtcagtagtcatctgtcacgggctctagtttatgcccgattgaggtgagtagtcatctgtgacgggctctattttaggcctgatagaggtcatcagtcatctgtgacgggctatagtttaagcccgattgtgatgagtatcatatgtgatgggctctagtttaggcccgataaaggttagtagtcatctgtgacgggcgctagttgtggcccgatagagataggtcatctttgacggactatagtttgactggtcgtctgggtcaaagctatcggtgacgggcttcacttagggcccgaatgagatatattcattcatgacggccgtttgcccgattgagataactcttcacatcagtgacttctagcctgtgacggacgctgtgcctgattgagatggggcttaccgcccgattgagatgagggtatcccttcttgtgttgtatagtgagaaagaaccacaataggctccgatatcctctaatctaagagacaggcgtgaatcacaatctatttgagcacgcactgcacaagcttgtatcactgtatccattttcactccatatattataagtcgcatatttgtaatatttagagtacaacgcacttctcttatttcagcacattacactccactccactacgtgctactgtactatcttgatggggtttatatcatctcccatccaagtactaacgttttatggggtttatatcatcttccatcttaccactatatctatagttacgcatcatgcggagtgtaacgacttgataagatatgaagcgttgctcgtcttgcgacaaggatatcgttgacacgacttctataaggcacacgtatacaagtgagagtgattttagtccctaattatattatatccgtatgtaaagggtcccgcttccagtcaatccccatccatgggcaccctctacccttctagtaagtgttggaaggtcaattgctccatcaactgcccctcccagtatctatcatcatccttatatatctgacttatattttggtaaatccattttatgcaaggtaacagtactataaagcaaaattaggtttacaataattcaaatcatcatgataaaaggattgctttcctgaattctcgtagttcaaatcaaaactagctagtgctcccaactgacctgactccgcctctagttcctttccgcattcggtcaaatgtgtcgagatttaattaaactatactattagaaatacaataatttacaaatacaaatgtgcttacaaatttatctatctatctatctgtatctatactaattagacactttatacgagcttccacgttaactgaaaagatctaacaattgattaattaggatattaaaataattgtgaccgtagattaaaagatctcatgtgggccattatttaaagccgatcgtccaacccttcccgtatcaatctcctgttatccaagaaaacaaaaggacagtatatatgtatacaatcatatctctaggacgaatcgctctcaattcccaagcatataaacacgaatatcgatccattcgacgtagacacatagtagtcatcgtgccgtctgagatcgacttcgcatgtggctcgggattggggaacgacgacgcaacacttgatgatcctgttagctgatgttggacgcctgcgacgagatcagtcgcgtgagagcggaatcgacacagcgaactcttatctccggcgagggtgctcagtgtccgctctaataaatctatatatacctgctggactgatcaccctgctggcactctctaccacttcgacatgcgccggcggctgcagcgtgtgcatggtacaaacgtcgtggatgaggaggatgatcctctacacgtcgagcagctcgcctactgtgacgacgacggccgaatcaaacgtggctacgtaccgggcatgcatggtaaatttgctttcggctccgcggctaatatattcaagtgcaagtgtaagagcgccgtctcgactcttaagctagctctgagattactttctccatcaagttatttttattcaaactgaaatatcttgctcggttaatttgctattttcttaatcaggatgtgattatcttttttccaattcaagatctatctgggccaccgcaggaagctatatatgatccattgctttttaccctaacaaattcgtatgtccctttgttggtctagctttcaatgcctttagactaatccacgtgtactgtacaatagatccgcatattattgatgattatgctattatattttcaaaatattgtatgaaaggcatacaccatacgttcttacacaaccgcaaatgtctctccactggcaaatcttgactcactactttaggtttgattcataatgacaccaccttcttagcttgttatgcagatattatttctttagcatcttacatatccaagattgaagaagaaacacaaacaagtcatggcataataaaattcgtgaaaaataggctctgaattgggtgagttgagataaaataaattagtatatgaaagtattagctatatttattttaactatcaattcagtttaaatgtttagaaacatattataacgtgaaaagtgaaactaactgaaggaaattcaccgccacgtgttaagcaaggttgtcattatcccgattcgtatcctatagaatctatagaatcttacgatactacgatcctaccaagccgaaacgataccgatctcacatctatacctaattaaaaaaaataagcaaagcttccggtaaaaaaatttccgtccgtcctttcctttttcaccgttttcctctttttttcgtttgcttttcattttcctttttttttccgttttctgttttttcctttctttccgtccactttgtttcccattttttctcgcccttttttcctttttttttctctgcccgcttatttttccgtttctctccgtccctctattttttccatccaaaattttcaccttttcctccttttttcggtttttttcatctgttattttatttttacttttttcagtaggatttgtttttctatctgccatatttttttcgtcgtcgagccaaaccctagcgttgtagtcacgtcaatttgtctccccatgcgttccccctccaattagttgtaaaaatcaattccccactacgctctcatcattttcccatgattttcccattcaattccgctttaattcaccgaatttaatatctaattgaaagtcactttctttatcaagttttgcggattcactccgattttgataaaaacaaaaagaggagatcgagtatatcaaaagtcctcaatcaatcttagaagatcgagatagattcgactgaatttgatggggaggatcagttttagcatcgtatggatatgagactatcttctggagggttggctatgtgagctggaattgcagctaaacttgtgggttaggtcttagagaggaaggtccagcagagggaggtagtgggctgggctaggactataaaggaaagaaggaatgagttttggtcgaaaatcaaagagtaaaatgtatagcgatccaaaaataaatttacccgttgcaacgcacgggtattttttttctagtagtatcctaattttcatagtatctcgatcctactattcattactacacgatcctatgaaatcttagggggtatgccgattctacggtccccacgatactacaaaatattatttaaaataacatggtttgaaaataatgtaaataaatatgctcaaatttttataaaagtcagttaaatatatcaaaaccaacgtggtttctcttgataaatgtctctatttgcatgccatatatcattactacatttttttatatagaatggctatatataattaatataaatattaattaaacataaaaaaataaaatctcatagtatcccgatactacgatacgatccaacgatacgatattacttttagcaaacgatactacctagtatccaggtcctgacaaccttggtgttaaggtagtcccatccacagccattaaaaagatccaaaggtatatatttattattttaaatacattgcattttttcactagcatgctttgcaattgattaaaaagactaataatattacctatgtgtaggttactattattaaacaatgataatcaacaagtgcagcatagtggatattcctgaaacagtagagcaatggaagaggaatgatactaaatgcccaattatggtgagtcaaatttccagtctccactaaatgccattatcttataattacaaagttttgcatttatctgggtggcacaaaattaaaattataacaagtaacatcacatattagaagagccaaattagttttggatgagaatagtatcgaaagaatagtatttgcatataagacaccgagtgtttctaggtaagatgataagaagactttgggtggaaagacaggtcatggattcaaactttcaagccacatgcacgctaacgtggaaaaagaatcttgttagttatttgaaacaaatagtaaaataccaaatatttttttagaatattttttgatgcccaccaaaataaaaaaaagggctgcaccctacaagtgtccgctctaaatttagaaccggcacctataataatgccattgtgccagttttagaactggcaccaatgaggcatctcaacatgacagcctgaatggtgccagttgctcggcacacgacactttctgcagtattcactactagaaaaagagtttttcttgcggcaaaaattgaatttcgctgtcgtcatgcaatgccaaccgccagtaagcaaaggccagtgaaaataatgaattttcactagcgggcagccagccgccaaccaaaatcgagtttcacaggtggcgtgttaagacaaccgctagaagaaaaaccgtctttgctagcggttaagtttagaggatctccagtgaaaacattttttaggtaaaaaaaattgaaaatcagcaccgctagccaccacggccgcatgcaccgcccaacgcctagccctgccacggtggatcccttgccaccgctgagccccatccccagccggtcactgtcgccaccgcggagcctagagaggaaaggctcccctgcgccacctcactaagataagcccgacagtcgccaccagatcaatcgcccgcaggagtcccccctgctggttcgcctcctgcacgagtcgccgccgccgagcctggagagaagagactccccttcgccagagagaagagactccccttcaccaccccgctccagatctagaaaggagagaagctaggctcccctacaccaccccactccgctgagccttgccgcctccctaacgccctactggggcaatcaccaccatggacaccgccttccagatccactctcgcgagggagagcttggccggccggtggtggatccgccgctccttggcccactgacatcggatctggagcccttcatcgcctccctaacaccctgccggagccgtcgccgtcatggcccccaccctcaggatccgaactcgcgagggagagctcgagtggccggcagtggatcggccactctgtagctcgctgacgacggatccgcggaggccaatcatgtttcgttgctgctatcgccgccaccgagcggcatcaccgcctagcccaaccatgcaccgccggttcagccccacgcgtcaccaccgagtcccctcctcgctgccgctgccggtggacctgccaccggtgggaagggaggaggagatgggtgcgatgaccgacagtgggtgagcaaggtgctgctggtgctgctggctagtaagatattaaaaattgaagtttatgacaagtaaaatttcttatgtccaataacaattatttattaaaagtcagtctataaattcacactaagtatgatcctgtatgtcacgtctgataaattcatcccgaattaaaaatcattctctaaaaggaataatagaattaattaaaattcgaaaagaaattggcaaacactaaaatacgtacaagaaaaattcgaatgtggcccggagaatttttgttaaattctccttggtctaaaaggagccctcaaattttacttgaattttcagagcaccggaaataattattaagtaacaaaaacaattatcaaagtttattaaaaagaaaaagctaaaaataatccctctccctcctttgggccaagtctggcccaaagcctccctctctctccctcggcccgcggcggaagtcctctcttcctccctctctttctctccctctccttctctccctccttctcttgggctccccttcccctcggcccagcttcctcctccctctctctcccgggctgcctctccctcctctcctcttgggccggccgctcggcccaagccgcgccccctgcccgagccgcccctccctcccgcgtgcacgcgcgtcgcacgcgcgctgagcgcgcgccccgcgtgggacccgcctgccaggcgcttcttcctcctcccgcacagctcctctctctctcccgtgaaccctagtttcttgctctctcgaatccgcgcgattctagcgttggattccaaaattaattggggggaattaatcccctttccttctttttggattcggcccggtttccccttggaaaggcgcccctaatcgtcggaaacggccgcgcttttcccggccaccaaccatggccgccggccgtgtttcccgtcgccgtccgccctctcccgtgcccggctccctcccccatcctataaaatggaaccacctcggtacgttctccagttttagccccctcccgcgctctctcgtggccgccccgcctctccccgccgtcgtcctctctctcccgtgccgccggccgcctccagccgcctctccctcctcgccggagcgtcgtccggtcgcgccgtcgccgccagcagcgtcgcagctgcttcccctccactggcgtcgcctccgtttcacgcggagaccaccggagacgcgtccccgccggcaaccagtggcattggtgccactgtactccctccagccggctgctgtccctcgtcggagcgtcggccgacgtcgtcgtctcgcggcgccgcctccgtcatcgtcatcgcagcggcgtgttccacgtcgtccccgtctccgtgcagccactgccggctgccctcgtcgcctcctcgccggacccggtcgtcgncgtcgtcgtcctctcgtcgtttccggtcgtcgtggcgttcatccctccgtcgagacattctcgtctgccgcccgcgtttcgtcaagtgtgcagcagccccgtcgtcatcttcgtcctcagctccgcgtcgtcaagccttgtgccggccgcgtctcgccttcgtccaaggatcgccgccgaagtcgttccctcgccgttcgcctccatcgtccctgagctgtctccgccgcgcccgttcgtcgttgtcgttcccacgcctcgtcgcgtggtggtaaggatccctctccctcgctgccctgtcctcgtcctttcggtgtcgctcgtgcccgttgtgcggttgtcggccccggtacccgtgtatcggtgtcggcagtcgttcgcttgtgcgcgtggtgaccgtgttagtgtgtccgctcggtagccgcgtggtttccacgtgtgcagctcgcgtggtgtctagtggagtccgtttgtcggctactcgcctcggttgacacacggggtccgcttccgtcgacccgtggaccgtctctgtgtacccggtctaccgcggtcctttaggttgacatgtggggtccgcatgtcaacggcgcagccttcctgtcttttccaggctagcgcttacacatgttttatggttgcaaagcctaattataataatccgcaaatctccatataacagcattaaacttcggatgatcatatcttggtcatacgaactctgaatcgacccgttcaagtctcctaatgtttgttataacctaaagaaccgtgtgctttctttttatgtattgttattgcttctttataggcttgtagctttgcttgtgtgcttcgcgtagcttctgtcgttccggaggttctcgaagcgtggtttgtggtcgtcgccgaaggttcggaaggccgttctctctgagcaaggcaagtcacatcatccttgagcatattgaatcccagtttataaaattattttgatttaaattaatgcattatcgctttatttaaattcctgcgttatcactgttttatttagccatgcctatttacctttgttatgaccttattattattgctattgttattattaccttgttcaccctagaataaacaaaaccccaactagtggacactctattcatggttccactagtatgaatttaggtagatgcttcgctgattaattaggcaacattaggtggtttcataactctagactttgggaatattcatatcacttggacactatggaatggttggattattgtggatttggacgcacacctccccctctattcaaaaccctcaaaatggttttaggctgggctcggggtgcatggttttgatagtagcacctcggccatataaggaccggtcttcgggcctctgttgcaaagcactaccgtacttccacatgtctagtgggtaaggcttagtttgtggctcagtctggttataaacaaaagtacacggatggagatggatgaagtcgggggtcgatggacatctctaagacaaatgaaggctacac

SEQ ID NO: 27616 - DNA, 10046 bp, Oryza sativa
  unsure (1)..(10046): unsure at all n locations
tgtgtcttgtgggtaaagatgtacacctctgatcagagtataatctattcgaatagccgcgccctcggttatgggcaagccgagcaatgtacccaagttagtgtttaattcttaaaatttgcttaacaactaaaatgtggaatggttggcctgggttggcttgggacgagctgggacctagggtcgggttgccagttcggtctgaatcatcgtaggccttgggttaaggcaggttcgtgagggttcacgaccttgattaataatactgtgtagctctaggatcgtctttttttaaaatggctttgggcaactaagtgacttttaaatgctgttttctgcaaaacttaacccctatatcattaccccttgtacccccttgcattaatcgtgcatccgccggtgtggcttgctgagtactgtggttgtactcattcttgctctatctttctccccccttcagtaagagaagctttggagaagaagtcttaggtggagtcttggcttataccccagttgagcgcctgtgaagatggagccgtaggcccgctagtccgctgctgtttatttttgattgtcaggccttaagtgcctttgtaataaggtaaatattatcgatataataaagatgtgtcttttatatcatgtttgtatggtgtaccctggcttttcctgggacggggattgatacactagcgttcgggaaaatgcaattttctcggtcgcgacactgtatataattgccaccatataatcctaactttagaatgatattgggaaagtgtaatcgagactgtaaatcgattactgctcagtatttattaattctaaatttcagaattattatatcaagaaaagttggaattatatacttactaatacctaatttccaaattaaattatacaaaatagtaaattaaaactctaacataagtacggattggctctttttagttttgaatattaaaattattaaattaaccaaacagaaagtaacatgaaggattctataggtatttgtaaataataattttgatattttctgacctgaaatagaaattttgagttttgtaagtacaaatgaaataaaaccatttgtcttttgaactttaaaacaaactttgcatatatacaacttttaagataatttaaaatagttagcctatctaataatttaatttatatggtgcttaagtaagtgcaacgcactagtaaaaaggattgtggcacaactacagaaataaagattggtgctggttaggaacccaacaaatgtgccggatttctgtaccggcacctagaaggtagcactgatgtgaagagaaatgggtgccgattccatgaatccaaaaaaaagctggctcaatgcatgcatttagcatcgagcagccccttctcccacatccgcatatcatcatccatccattccatatccatcttgtttacacccgaatttggcgccagattcgaattgggaaaatattgccaaaatttggaagagtcttggcttcctttacaaagccggtctgaccgccgtatgttggccagtcagaccactgcttgtgggccaatctgaccggcggcgtgtggctatgaacactttcgaaaaactggactgacatatcttgagattgacgaagttatcatgagcgttttgatatcgactggtagttacctaccactgaaataataattagctgtaaatgcgaacacttgtgtcaagtctaggacttgaacctggtggattagttgtaccataaggaaactaactagtggagctacactcaatttgctaccgtttagtttttttttttaccagagtcataaataaaaagtcctatagagctatctccgagtcactaaccaacctgctgaacttcatggaatctttctcgttgtaagatgggtcctcaacgtcacgtaacatgtcttgcagcagatcaaggtccacatcaatcatttcaccatccaatggagatggtataaacatgtcatgctcatcttcatctccttcttcatcattgtctgcaccacttctgtctgctactgcaccacttcccaattcttgctctccatgcttcgcccaacatgtgtatcccttcataaatccccgttgtatcaagtgagagtgtaaatcgtccactctgctttcaaacatattcttattcttgcaatctctacatggacaacacacgggcgaagctagagtgaaatagagaggggtgccacatgcttgctttactctgttttggatcaaatttaagctgatatgaatgtctaactttgcactgagggggtgcatatatggtgaaaaaagataaactatagctaaaaaaatttcttgaccaggttcctgggtacctcctttgaacatgttgctccgcccctgacaacacatgtatttgttgtttcttcttttcctatcctcctccgcggcgttcataaaacttaatatgccatctctatactccttgcaatgaagcttccaagtagtcgcatatatccaacttcgatccatcgctgcaaaaatgaacaaaatattagttaacatcttataagataagtactactaaattaataagaaatgattagtactacaaaataagtactacaaagtactacaaaatttgcccccttctacctcccaccaaaatagtgaacggtagaataacttcagacaacaggagagtggagtatttatagtgtgtaaaatatatctcaatcaggtcaaagaaacgatatctctaacggcggcgcacaattatctctaacggtcataaatgaaagcccgtcaccgatatgaactattggtgatgggcgttaacctcatctcaattcgggccttatttggagcccatcacctatgtcattcatcgctgacgggtttagtagttgggcccgattgagatatatgaggtaatctcaatcgggtctaacggtgtgcccatcacagatgagtgtcaccggtgacgggctatagatatatgcaccttgattatgtctgtacgagtacatctacaatggtgttaatttagaccagattgagatgacttcgttctgacggcccacgttgtccaggcatgtaaggggccatcacagatgagagtatctgtactagtgattacattttttttcagatctatttttgccttacaaaattttagtaacttaaatagtaccaaaaatagatgtttggtttgctataaggttttgcccatacctgttcaaattctatcttaccaatttgctagtgctaaaacttgtcaaagtttttacattacaatattttggtaattttgatatggtaaaaattggctctaaagccctaaataactgtacacttagtatggccatcatcagtatatgagcccaaggcgtagtgatgtccatctggtgacaaaaccgctgattagtggtggtgcgccaggaggggcaaggcacgtgcgtgcggttttttctttctttttgtctttttcccgttttctttttcggtttttttttgttaatttttgtttttccaggtttcttttggttttctaatatatatatacatattttttaatctataagtacacaaagtttgtatatgtacgtatacaactttatgtgtgtacatcgtatataaaatttatacacgacatatataaactttgtatatatatgtacaccatacacggctgtcaatggtcgaggccgggctgccggcgttctggtggaccagccagtttcgacctaatagtgggctggcgagcggcggcaccccagccaaggatgagatggcagcaatggcctgaggatgacggggtggagatgatctagtcgaggagaggacgagccgaggggcggcagcaccagccaccaagcgcatagccgcagatgaccagatatctggacaggacagggagtctgttgctgccgcacagatcaggacgtgagcgtggtagttttcagattttttttttcctttttttttttggttgttgacggcgttttcaggattttttttcttttgcaaaaaaaaaaaagatgtaaatgtaggacgatatataaagcgtctcacccaacgtctttactttcatggtgattttgaaaattgagacgactactgtctagctagtcttaagagaaatgtctttatacattcatcttgttgtagtgagagggaaaagaggaagatgtattttcgcgtgcgatccactaagagacgcctcacggagggcagaaatcgaatggaggtggataaggtggtgctcaacaatggagaggagagctcctaaaacagtccacgacaagtatatggatgtagaaagtgtaaaaaaaaaacaacagtaaaaatataatattttaaattctagagactacatacagaagttttcaaagtcagtattaattaattaatcagtcaacttatatcattaagcgcgcagagttatataagttcacacggatttggaaattattgtgtacattattttatcccaaaccgtagggaataatgtctcctattttggatcaagtgggggttagcaaacaactgtttcggatctagctcggagattagcgaagtacctgacaaaagaatccgattttaaaattacgtaacgaactactgcaagactgactcttcattaattaactacaaacaaattaatgtctatttcgcgaacagaatgtgatattgtacgtgcgtacaaatgcaattattgtgtttgaacatgtcaatatatacaacccaacattgatggatggactgatcgactacttccgagtcaatatatatttgcgttcgttcgaatgtgtgattattcaatgtgcaatttttaaacctaaaatttaacttcaaatttgtaattaaatttttagtgacataaattgcacattcctaaatgttaaatttcaatcatatatatttaagcattttttgcacgtaattgtagcttctatgaatagtaagtttatttctggtaattagttaatttctttatgttaaaattttttttcatccttttatataagaaaaaagaggggaaatgagaaccactggactgtcatctagccacgaaaaaattgactaaaatttcagtacatcacatgaaatgtagaaactccaattatatttaaactacacgagtataaatatgtaatcggagtttctagttacattattatttgccaatacattgaacatatgtaatatagaacatatgtatttactggatattagacatccaaaactgtgtaacggttaattaaccaaaaaatacacgttggcaagtccaaaattaaagttgaacatgcaaatcttttagttcactttaactacaacttttctttatatatgattttagttcatatgttatccatgttttatttttatattttttatgaattttatgtttatttcatgttgaggttagaataatttatttgttgtttatccttttatatatattaaagaatatactttgtttaaaataataagtatagggaagtgacaagatttagtcgatttccattcaagaaaatacaaaattctgagtcgactaaaactaaatatatattaacctatgcttttcccaaatggcccggatccatttctgcatgaaggcggaccagccgtctatagcaagcaagatgtttgtaaaaatcacaattttctcaagcgggaacgatatccgcatgcaaaacggaattttgcaggcaaacaagttacgacgcccgactacgacatgatttttggtgaataaaatataaattcaataaaaaatctagaaattctagcccaatccgagctaaaatcagccgctgcgacggattattgtagccaacattcgtaccaacggatccaccatcgtagaggtcccaatgctgaatttggtgtcacccagctcctttgcacgcacatccgcccatggccaggctccacacgttgaatctgccattggcaagttccccatggcccgattccaccgccgctgagctcacagtgctgactcngtgattgtcaagcttccttgcactagaaacactgttgccatgctcccagcatcggatctgtgtcgccaatgtccctgctactggatctatcgttgtcaagatcctcgccaatcgatccgcccttccctaggccggcgctagcgttgctgccactcactccaatgctgaaggcagatccaccctacgacaattgcgagccttctacagctgatctcgagcccgccgcgcgaggataattgtgagacaaagagagggagggaagaggataagagacaagaggtaatggggggtaaaggagaggataggggaggtgtggaggagataagtctcatgggattggtattcatagtttgttacgaatttgacaaggtggccattttttaattccaaggcattccaaggcagaccttgcttgcaaaaatcagatttttacatatgcacgtctccttactaggcttgcttacaaaaatagccatacttttacatatggccgtcacaggatgaccacttgtgaaaatcaagtttcccaagcggttcttgacccgggatttctatgcatttttacaaacggatcttattttttcccacttataaaaatggagggtgtctataaaaatcattttctggtgcttttaaattgccaagaacctattttgacgctgattatagccaataaaatactaatatcttgacattatttgaactagcaaatacaacaggattacacatatgacaaaatgctaatgtttagacattaattaattacggtctccttgtcacaaaaaaatcgttcacaattaaatatatacacacatgtgtatatttctacgtataaacaaacacatcttcgtgcacattatacacagatatgtacactctagctgatttgtatgaagggatatatctaataatcagcaagcgggtttatcgatgaattaatgcatccgatggtcaatattcatcgttataacgattctaattaattaaccgtctaattcatcactaacaacgaccataattatcattgatagcttataatgatgaacagttgtagactaactaggaatttaggctcaaaagctgtgactggattactacgtagccgcaaaatcactgacccaatgtatctaattaactgtttttttataatgacctaacgtttaactgttaagattacacagtattatttcgaaccattaattagtgatcaagtttgcaataaatatgtatatatttgagtgatagatctattcaagatgcaagagcccattaattgagaggaactcccatgagaatgcagatataatgtgtttccataaaacaatgacccaagctatagctatatgccaaatgtgtcatatacataaccaaattaaaccatattagatatggttggcagaactgacaaacatatacctgttatacattgattacaacacagttgactcaaggttccacacgcaagtaactcgacaccaatgtatttccatgggagattaggaggggtcaacaagacttcattcttcttctttcgtacagtaatatatacatcaagtaaacttatatagcatgaaaaccgtccaggatgtctctgctcttgttcccctttatatgttatatatatggagtagttaattagaacgagtaaccaataaaaaatgtcaatcatcacgcgtatatgtgtgtgtgtatgaaagaatttcgttgagattatattacgaataaaactgaacgattacgtgcacaaataaaaaaaaatattttatataaatatgtataaaagaatattctgtcatatgaaaagataaggcaaatattttagaagctttttttactcaaaatttttaaagtttaacatcagtcttatttaaaacgatagttattattttcaacccacatagagtactgctttacaaatttcacaagtatatttattgtatttatatttttgcgttacgtggaaaacgcataataagtatataattcttcagtactcacacaccatatgcattgctgggtccacaattatttctctctcttggatgacaaccaaattaagagctcatgcaaggtggttgatacgacgtactgcagcatggcgtacatacctaatgcaacaaagaagtttccgtatatacacacacgtaataatggttgtctcgctatagaccggacaaacatcaaattaattagtactccataccaacgaattaattaaggagatctaggcagtagtgacaagaaactaattaactaacgcaaataagatggtacgagcatgcgcacctattggagaagcttctacgcatgcatgcatgaagttggtacgtatagtacgtagctagctctttcaaattgttgtggaacgaatccatccttccgagttgaattaggtttcgacctgcgcgcgtcgagagaaattaaaatttaagagaatatcaaataagatatagttcaaattgttgtgtatcgatcgatcggtatatcaaataagagattatagttcgttagctagtacgtacgtcgcggatcggaccgcgttgctcgatcactatatatatctgtcgatcattttgctcctacgtcgtactcaaaccaaggcaaaatctagctctccatccatctctctttctgcttgcattgcgtcctctctctctctctctctcgctgcttgcgatttcattcctttcctgcttcaggcagctgcaattaatatcgtcgacaccaggatataaagctccatgtacgtatatccaacaaacatctcagtaaagctgcacgcatgcgcgttcggatcttacattttctgtacgttttttatcttcagggcaaatgctgatggcatttcctttggagcgggtaggggcagtcaaagcacgaggcagcacaatgctagtaattctcattcctaactatatatattatgttgcttagtttctgaattctccgggcaatttattttgtttttcagtccgaagtgctacaggtgggcagtttactatgccttcaggtatgacacggtccgatcaaagccagatggcccggttgcccaattctcaacgtcatgggcacaacgagatgacagaacgtaagaaacatatcaataaacatactccatcggtatgtaaatatttaacgctgttgatttttttaagcatgtttaaccgttcgtcttattcaaaatcttttgtgaaatatgtaatatatatatatatatacacaaaagtatatttaacaatgaataaatgatagaaaaacaattcgtaattacttaatttttttaataagatgaatagtcaaatattttttaaaaagtcaacggcgtgaaatatttagagagagatatagtatttattaacctatctatttcattttagttactcaatattcctaccttgcataaccggtttattttattaattcttcagtggaaaatgtagctcgagcctcggcgagtactgtacatggtactggccccgaatcacacagccgtcaaaacaaccaggaggtgccgccggcgtcatcaggcagggactacgacaccggtttaactattttatacacttgatgactatgttttgtgtgcaagctagtcatatcgtttgtatatatcattgactaactcgtttctctttttttcccttgtctatccagatttcaacgatcgaccatttaataagaaatctaaaaagaagagtacgtctcattgcattttttaagccaagtacgtcattatcttcaaacacagtatgttatcacatagatagttgatgcatgcaagtttacggatcgatctacacacatgtgtgctgacgaaacatttaattttctttctcattgacattacgcaggtgatttgtgactagtgagaggatgcaacaagtaaacctttaatcgacgacctctctgcatatatacaagctttgtgagcataatggccggaagttaattatttggctgtcagcaaacccccccccctcccccccaaaaaaaacacatacacatacacacaaaacatacacacaaaacgtagaggacatatccggtgaaaa

SEQ ID NO: 27617 - DNA, 7618 bp, Oryza sativa
tcaccggatatttccctgcttactttctacttgtgttgtccggccattttatattatctgttctgtcagggttaagtgtagtagatacaacagatgggtaaaatgagctactttctccgttccacgatataagattttctaacattacccacattcatatatattgatttattaatatctatatgaatatgggcaatgttagaaatattgatttattaacatctatatgaatatgggtaatgttaaaatgtggacaatgctaaaatgaaataggtgccggttctaaacatggagccgagcatcccctcgtctactctactcattgagaacaagcacatccgcatcacattcatcaagaacaagaatgaacaagaacattcatcacagcaagcacatccacatccaacattcatccacaacacaagatttggactcaaatttatgcaataaaaaaaagaagggattcacacctcgtcgtgccacctcccgtcggcgagcccgccgcctccctccggccagcccggcgctgcgtctcctctgtgaacccgccgtggcaccgcctgccgccacctagtcccggcgagcccgccgcctcccctcccgccagatctggcggaagggaggcgtcgcccgccgctgccgcctcccgccgccgcaactgcagcctccctcctaccgccgcaactgtagcctctcctcccacccttgccgagcacctaccgggccgatgccgtcgccgccgcccttcctcccgccggatctggcggagggaggcgcctccgggccgccgccgctccttccgccgcgcaccgccgaagccgccgacgccgcccctccagccgccgtgagcgagaattataggggagagagagcggagagaacgggagtgctggctcctcgacactatctcctcgatcttatctcgatgctagtggtggggcccgccgtctcagctcatcccggctcggctcaattagctggtgccgcatctataacaagtcataggtgccggtttttaatattaaaggtgtcggtttttaatattaaaggtgccggtttttttaaaaaaaccaacccaaatgtaataggtaccggtttttatttagaaccgacacctataattactaaaaggtgtccgtttttacgatttcagcccgcactattggaacctatagtggcgacacatatttgatattttgtagtagtgcttctataatccaaaaataagtccaccatctgcctggcacactatggggtataggtatggcatacaggtcagcccccgtttgatttttggttcctataggtatgtccgttacgcgtggtgacagtttggccacatgccaatcgtcaccaatttgagaaaataacttttcataaaaatataattgtggcctctcacatgcaatcacatgtcatccccttatatcttcttcttcctcactctccctcctcttctctctcatgccaccgcctcatcatgcaacctgctcgcctgtgcttgttgtggaagaaaaggaacctccacgagtgcgcctggccaccgtcgagctcttcacgcgaccatcctccacgagctagccagctccactcatcactcgtgtcctttatgaactcgatggcagcagcccactcgctagcacaagccaatatatcaagctcctaacctgatgaggaacacgcatgcccacgtgcattgagcaggctagaaagaaacaaacggtccagagcacatatttgttgaatagtatagggagataggatactatgaatattggagatgttgtatctgttgtttttataagcacataatgatttaatttattccataaataaatcataacattgcagatgtaaactagcatcaacacatcattagatttacatatgtaaactaatcagtaaaatatgaacaaatcaaatatgcgcaacatgttgaacacgtaccgagggttccggatgaccgctgccatgccatgcgaggcaaggcgagcacgtgtgtgttccccctcttctctccacctcacatgcttaaagtggtaaggagggcatcctcccttttaaggaggtcccctgtctagaatgagtaaggaggttctaaactcaccatgcatgccatcccatgaggtgggcttttgtgattttctaaagaattaatcttcgagtgggctaaggcccatctattaattccaacagtattgagcctccgaagccagtatatatagaagtacatatggagtagataaggaaggattacaaatatggaagaaatctactacagatgaatcatatcctaatatgactctaccatacactctaacaatattcacatcaaacagttcgaatggctagaaaataggctcaaagcggcgaccatgcatgtcttcttagactaccgctgccatggaaggagggtagcgggatctagctacaacgaggacgtaaggagatcaagcggagagagatgggatacaaatggttgtgtgcagtgctaaagagggaaggatgccgacggagacgacgagctctgcgcttagctcaccggtggccctctcctccacgtggctatccgatcgggtcctacccccaacagggacggtagcgaggcagccaagcgagtaggcccattatttatttataattttagagctgattgtatatcacatggaacggaaatcactttggagtgaatcaggggtataatttgtccagttaaaaaagtttgggggtatgaaatatcttgtattagactttaggggtataaatcgaactacgcaaaggttagggaggtaatttggatttttttttccccaccacaattccatgagccctgctgcaaaagaaaaaaaataaagtgggacctgccataatatttgttgatttcgttcttgcttgccagtgataagtgatcccccaactccaccatctccagagatgccattgtcgtcctagtcgaccaccgtagtctttagcacccaaagaagggatccatcgcgttatgccacccatgcaatagttgatgccccccgtatgcccagtagcctgctagtggattgggtgggaatgggtttattggattggatttcctcttggattgtgtttggatggtttgtaatgggctgaggaaatgtgggttggtgtggtttggatttggtcgccgtttttctggactagaaatggtttcaatccatgggtttctattggatggcagaatgggcacaacccaaaatggttgccgtgcatcgtcaatccccaattcctcttctcctcgacagccaagtcaacacgacaaatcgctcgatgcaccgccgctgtgcttgccaatgctttcctcgctgccgtggctcgccggcgagacgcgcaatctggggcaagcacatgtggtggcgaggtgagggcgatggagcgtgcgcggggggcgtggaaggaggtggagctcctggacgagcggcgtgactagcggtcactgctgcaccgacggtccagccaccgcagctaccttttgctccgcctcttccgcgccggcaggcagccgttgccatcggtgacgatggcgccatggagttttgcttggaggtaattgtggcaccatggattagcctatgccgcgcgaggaagacgattggttcgtcaaggtcagcatccttgttgatggtcaatggattgaaatgggtttgagtggtttggaaaggtggattgaatccatatgaggggaatggattggcttggtttggactgaggtagaaaatgggttggaatattggtttgggttctaaaagttgatttgtggactggattggtttgggctactttaactggttgtcatggtttggactgggaatggtgcgggttttgatccattggcaggctttattgctcacatcccatcaccatcgatgagttgctgccatttcgccaacctcctattcaagcttccccgcgtcactctcctccatctaggagttgattcttggatgctccgacacaattgattttttggatcagttttctagttttcaaggatctagtagcgagaaaatatcttggattggcttcttaattagcaacatgatttagaatattcaaggatgtgttcgagagaaggggaaagaagaaaattgagaagatatgcataacgagataaaccattaatgcatgatctattacatattaattattttaaacataaaaatgattaatataatttttaaaacaatattttttttattttttctaaaaaaacacattgttagtagtttggtaagtctgagcgcaggacaccagctatttctcgtatcgttcaaataatctgctttgggtgtgtttagttcacactaaaattggaagtttggttgaaattaaaacgatgtgatgtaaaagttggattgttatgtgtgtagaaaagttttgatatgatcgaaaagttgaaagcttgaaaaaaaattttgaaactaaagtcagctttattagtactctgctgataatctgaatctgcagcttaaggtgacctatgtgcttgctcttgcccgccgccaacaggagctactcctactcgacgtgtgcatccttctcctgcgcctcaacaacagtattgattgagggtgtttttgattcatggtcatgtatggataggatatagccatctatattttattgaatatggtgatttaattttctgtttggtttgtatggatatggcgatccaatttcttgtttggttcgagggatatagcatagatgagaaaagccaaaagttagtaggacccatttgtcatatatatatatatttatcaaaatataatcatccgagatcttgttttaaagatttaattacaaatataatggtgtaatcaaatcataaattagataaatggtttagaagaaaaaatcatttggagcttgcttaagaggacaaccacagccaatcggaataggacacttcacccagtccaaaactggatggcttcatccagccaaatcggccggatgcactcatccagcatagtaagggaatactctctattatgtaccgtctcatccaccctgacctccaaccaaacaccacagaaactcgagcggtcatctcccatccagactcatccacccaaccaaaataactgatgccgaccatgtaaagcagcttagcagcgacgctctcgttctcgctgggtcggttggtgcgtcacggtgcgagaactccgggcggggatggccctgggcgtgctggccgaacggcgcgggaggtggcttggttgggcctactgaagctgctcggtcgtcaaagcgagcggcgcgacgaggtgcgattcaggcaccgagcacatttcgagcgcacacgtgcaacatgcttgccaggctgcctagctgggccggcctgggaggaagaatggagtacatttggaataagttcactttagatccctcaatttgtcatccagtctgatttttatccctgaaccgcaaaaccggatacaacgcatctcccaacttacagaaccattgcacataaggtcctaaggcggtttggatggcggttttagctgacgtaacgcctatgtggctagtttgactttgtctttgtcctacgtggcagtgacatggactggaagtaaaatgtaaatttttaaaaaatgtgggtcccacatgtctgtcatacaaaacataaaattagtggggcccacatatcagtcaaacaaaacacaaaaaaggtgaggcccacatgtcagtgggtcccacatgagcaggtggaggagatgccatggggagacacccctgatttccagctgcatgtagccgaggaatgttagaaggggtcggagagacttctacaggttgtcgagcacaatctcggcggtagacttgatcggggatgtttccggcgggaagaacaggtcgtggatcttcacaaggacgaagaagggtatatggttctccaggaggtagaacacgtcacggatgtgctcgatgttgtcctgcgcgcacatctcgccgccggaggagctgcttcctcccccgaatctgccgataccaaagcaatggaggatgtagaacccatcgaccaacaacagtttcgacggcgtcaggtcgtcgaacttattggcgccgtctgcgtagtatctcctcacttcggcaaggaagttggcggcggcgatctcacccaggtagcggtgcagcgtggaccgctgctcctgctcgtcgccggggagggcgccgtggagcgccgcaagcttcacgggttccatccgctggtcgggattgcggtggtaggggccgacgaggatcgagtcttgggtgtactgggaactgtcgacgttgcgaatgcctctcttcaccattgagatgtggtactctgaagaagggacgattcccttaaccttcaaatcaaattgcgcatgctctcgtacaaaccctcaaccaatgccttcatgtcgatgattgtttgcggattggggtttcctgcaaatcaaattaaaagagcccgttgctaccattttagaccagagaggcagagactatctaatgatatttacttatatactatttacatcgtcagatttttttctttttcacaataatattattgaacgtctacaaattatatggtaaactattatatatacaacaaattaacgcttggacacactgagagataagagttagcacgggcattttaaaattgaacaagtgaatgttattttcaaccctcccaccccctccccccctcccccgggcttaaccatagaagtcaaaagttcatcatgtacaaacgtagacgctcatagcgcgtcatgttaattatagccacaagtcatgctttttgttccttgcgtaatttctgtgcatatgttttcaggcatatcattaacatctgatataaccacaacgtcattcattttatcataagaccacatataaaaaaatataaattccttttggaatactatactttgttggattatcacagtacatatttttaggatgtgtcactattttagtaaaactagatatgtatcctgcgctattgcacagaccctgctatttttctaaatgttaaattgttttttggtaactaaaatttattagtaattacatatttatatccgatacgattttttatatataaggcaatcatacgtcatttaataaatccatcgaggcttgcttgcaggggaagaattggagttcttgtttgcatgcatcaagtttaatatatactactaaaattgagatcttagataatacaaactaattattatttgaaatttgttttttcaatgttttccttagcgactagcgcatgtctcatggctgatagtggtacctaattggttgttcataacattaatatcaattccaataattttaactagatatggagctcctcggcccttttcaaataaagatgatactaataataatatatagatatacaaagttcaaaaaaggtttagtcatcacaaattagttgtcaagggattccattgttgtcatgtgttggtggctcgttgtgatctttgctggactcatgtagtattgtggttggttgactagaaacctaatgcaacttgaccctagtcatcgtcttctacaaccctactctccttgtgacggcttaata

SEQ ID NO: 27618 - DNA, 766 bp, Oryza sativa
gtggctcagtatgggcagaagagttatgcagataaccgacgctgtaatctggaattcgcagtggacgattttgtgtaccttcgggtcacgccattgcgagatgtacacaggtttcagacgaaagggaagctcgcacctcggtttgtgggtcctttccgtatcattgctcgacgcggggaagtcgcttaccagttggagctgcccgcctccttgggcaacgtgcatgatgtgttccatgtgtcgcaactcaagaaatgccttcgagtgccgtccgagcaggccgactcagagcagattgaagttcgcgaagacttgacctacgtggagagaccagtgaaaatcctggacaccatggagcgcaggaccaggaaccaggtaatccgtttttgcaaggtccaatggagcaaccacgctgaggaagaagctacttgggagcgtgaagacgagatgaaagcagcccatcccgatctcttcgccagttcttccgaatctcggggtcgagattccgtttaaggggggtaggtttgtcacgtcccaaaacgactctaaaatatatcctctaaattatgcctagaataattaaaatccgtgtgaaagcctccaacaattaaaatgtgcaaagttaaaagtcaaataaggcttggaggatttttgtatatttcctaaaaagcctaaaatgcgtaaataaattttagtggaattttcagagcccaaataataattattaagaaataaacaaagttaaaatgattttataaaaagaaaa

SEQ ID NO: 27619 - DNA, 7632 bp, Oryza sativa
gagggagatgggccgagccggcccaagagggagagggagggaaaggggtctttttagagcttttctttttataaaatcattttaactttgtttatttcttaataattattatttgtgctctgaaaattccactaaaatttatttacgcattttaggctttttaggaaatatacaaaaatcctccaagccttatttgatttttaactttgcacattttaattgttggaggctttcacatggattttaattattctaggcataatttagaggatgtattttagagtcgttttgggacgtgacacgttctcatctgctccggcagcgtatagtaccaaggagtagacctgaaggaattcttctgggtcggtactcccatcgtacttctctattgccccgggtcggaatctctcaggccatcagacatcacgtagcgaatggttgaaagctctacacccggcgctgggggcggtgggttgttggcgatcgtacgtcctccgtggatgtctatcggatggtgaggatgaagagcaagatgatgatgacgatggttcacttggctccggtgtccgattccgaggacgacgttcgggttctcgagagtcctgtcatcatccaccattgtcgtcccggcgccgatctccattatcatcaccgtcatgtcggtgtcctcgaccaatatcgtccggcgtccgctgttcgcgatcatcgcggtcgtggcggttgtgacgattatcatggcgtcggttttcgctcgagcggcctcctcgctcttcgttctcgcgacgtcgtgaagagacacgatgtcgggaacaattctcgttgtctcgcgcgcgtcgtgcttttcggcagccattcagatggtcgcggagatcgccggtgccgcgaggtggaggggtagctcgttgaggcgacgtccgttgttccggtggttcgctgtcagcaccgccagctgtcggttgttctggttgcgctctggtagcggcctcctcgaacgcgttactgagattggctaccgattcccgtagtcgttctgtccaccgtgcgaggtcatcgttaagtacgggatcataggggatttctctcagtattgcgttgatggtgccgaggtgctgggccggcgtgaccgcttgattctccacctctgcgatagcatgtgcagacgtgctggtcccaccgttggcaaatacgtcgcgtggtgtactggaggatgatgagccatagtcactagtggagataggcacatctatgacaatctacttttgtcatggaagacgcgcaaatcgtcataaagtaacttctatgacgaatttatgacgaaatgggattcatcatagaagtcgcgtcacatatgtttttctatgactaaacagtagatttcgtcatagaaatgcttatatccatgacgaaggtgctcgtcatagaactgctttccagctggctaggacagacgtcgtccatgccacgtggctatcacacgtggagtccatgttggctgtgatgtggcggatgacgtgtacgccacgctggatcatcatctcccgtacgctagagccaagtggcagtcgtatttaacgccacgtgttgacatttggtatgtccacgtggtggtgcaagctgatgccacgtggtcgaacgtggtggcgccacgtggcagccatattaacgccacgtgttggcatttcttatgtccacgtggtggtgcgcgctgatgccacgtggccaaaggtggagacaccacgtggcagtcatatttaacgccacgtgtttacattttgtatgtccacgtggtggtgtacgctaacgccacattgccgaaggtggaggcaccacgtgctctcattttgaagcgccacgtgtacatatctgatttgtgacacacgtctttacctgatgttgtcacgtgttgatttgtttggatgacacgttagcacagtagggatgaaggcccgctcattttttttttcttagcccagcccatttggccacatacttcacatattgttgtggcccatcccactatgagatctaggaaatttttagcattcacccatttcaagcaacaattaatcagaacttcgcagcacataagaaaataggcccaacatcaagattgatcacatggacaaacaatcagaacttcacagcacattacaaataggcccaacatcaacatatatcacatataccaacttcacatagcaccatattacaaaaaagttcacagaacctagcacacatatgttcacattaagtccacaaaagtttgccataggatgacattaagtccaccatagcaccaaacatcatttcacataatcaagtccaccacatgacaataagttcacagaaccatcaaacaactaatataagtagatggagttcatcacagtgcagaagatcataaaggagactaggacagatttaagttaccctgggaaaggctcaagatacgtcgaaggagcaaattgttctcttcctgctgctgcttgaactctgccaactccttttgagtctttgccaaggcttcatttgcaagatttgcttgttcttttagttcgacaacttctgcatggagaatggctaaactttgcttttcagctgcaagttcttcctgaagtgctgcttctgtcggtgtcactgatttcttggagctcatctgcagaccagcatttttcaaaaacgtggtattggagttgtcccgagagagaaccttggacacaacttctgcactagttcttggtgtctcaccatcaggtacaggttcttccataatagctttcatacttgactgcagcaatgattgaacattagctatgaaattagatacatgaaaaactggcagctgcataacacattcaaaatactggcagctgcacaacacattcaaaaagtcactgaaaactgatggaaagctaccaggaagcacaaactagaggtaaggaaacttgtatagaatgcaaatttaaccaaatttgttttccataagccaaaacagaaacaaattatatgagtaagccaagcattcccatatttagaaatattgcattgccctcttaactgtgaaagagaccagaaacattttgagctctaactatggtagaatgtaattattttctatctagcctctagcaacaatgcaggccaaatgcttcttgacagaatctaggatactgttttagcatatatcagaaggctgactttagactatatttgattagctttcatggcagcttttgattgatggaacaccctggtagctataaaagaacaaggttttcccctcaactactttcataaaatttggagggggtgcaatgttacttagcgttggttattttctattcctcctatgatgcctaaatattttccctagaaaccactaatgtttagaaagaaaatactagtgtggagtacataatccctcataattaagtttacttttccaagttacaatgaaataagttttgaagtagtaaaggctgaaatatattcagtcttatgttcatatgattcaaaacctcaatacatgcaaacaccactacagcagcttaggtaaaaatgagttttcatgaatcacaccctcaaacccgggatattgataaaaatacaaactgcaaccaggatcaattctttgttccttcttcaagacatagcgagcttgtgggatgcgaactgagttgccatcctgctgtaagtgcaagttatgtcttttgttcatatcatgcaaatctatcctcgaattgactgtgtcctttgtcttgccctcgattttgagcaatgtgcccaaaatgttgtcacatatgtttttctcaaagtgcatcacatcaagattatgtggcagcaacaaatctttccaatatgggagcttccacagacttactttgcggctataaattagtggcccttcattctctccacgttttcttttcttacttgtatcatgcttacccggtctaacatctttcaccttctctaactgctcgaggacctcatctgtgctgaattttcctggctcaacctggttttcatggtgtccatcaaaagcatggctttttcgccaagcgtgtgtccttggaaggaaacgacggtggccaaagtagcctatcttatttcttagtgctcgtgacaacggatttttgtcacaatgaatgcatgcataataaccttttgtagttcgccctgacaaggtgcttagagctggataatcatgtatgcaccatagcacggcggcacgaagattgaactttctagcactgaatgcatcataagtactaacacctatccataattcaagcaattcttctatcagaggctccaagaataaatcaaaatcctttcctggagatgttggacctgggatcagtaatgacataatgcagttcgatggatcgacagattcccatggtggtagattcaaaggcataacaaggacaggccacatgctatacgaattgctcaccttgccaaatggattgaatccatctgtagctatggcaagcctcatattccttgcatcttctgcgaaagttcgatactttctgtcgaagtccttccaagcctccccatctgctgcatggctcatttcattatccactggcttccgcttgattttgtgccactgtgtgtcttcagctgttcgttttgatgcaaatatcctctttaaccttgggataagtggaaaatgcctcaaaactttgcgaggaaccttcctgtcgccaaccccatcttcccatctggattcaccacatattgggcatagatccaaattggcatattccttcagaaatagcacacaattattcttgcacacatggatcgacacatatccaaggcccaattcacgaagatattctttgcctcatcataagattttggtaattgacattgagggaatgccgaggacaacaacttcaataattcagtgaaagctgtattgttgattcgataatatgacttgatatggagcagcctcacaagaaaggaaaatcttgaatggttagatcctgggcaaagtgcctgcttcgcatcttcaagaattctagcaaaccttggtggctgtccatcttcctctgccgcagtgtatagttcacctattaactctggaactccattgtcatcctcgggttcatacccgcccacatctgtcccttcattatggttagtttcatgtacctgttccaaatattcgacatcttctgtatcaactaattctccatgataaatccaccgggtgtatgttgatgacatcccaaaaatatgtatatggtcatgcatttcttgctgaggcagtgaagtgtggttaagacacctacagcatgggcatggtatgtcaacgtgttcatcaaatctttgtccaacaaattccatgaactgtttcactccctccatgtatgcaggtgtgaattgtctcccatgtatccaagttctgtccatctgctttggcatgttaaaaaaagcaattaggcaaacaaagctaatccattttttaggacagaatattttctaaaacattagatggaacagctggttgctacatgacttaaaccatgttgatttgttcataatactctgacttgtttctctgttcatacaacacaaagcataatctttcatagctgaacttgcatttcatactcagagtaatgtacttatggaaaatcataccttatatctactgaacggcgttggtgatgggctgtgcgcgctgacgacaggattgagagaggaggtgctaggataagacagtgggcgaggagcagccgatccgtctcagtcgtcgaggatcccccgcgccgaccgggatccctccgcagccccaccgaccaagatcacttcaccgcgccgccacccaccacgatgctccacatcacgatgccggccagcctgtggagccgcccttccctgcaccgatgggataagaaacctcctcctctgcgccgtcccggtggctaggatccgcccccactgagctccgcctgcgccgccgccaccctccctccctggctgtgaccaaaccctgcgccaccgcccccctccctccctgaccaaaccactaggtcgcccgcataaagcattcaatcattcttgtgttcgagaattgaaaggaaaactaaaagtaaaacatcatcagcatgaaagctccttgcagcatagtggttaagctagaattatggttagtcacaagtcgtgggttcgacccccaagtgctgcagcattttttttagaaaaaagagttcacatgggctgcacagattcacacatgggctgcacaaattcacggactgcacaaatttgggctgcgaaaaaaaagttcacatgggctgcacagattgacacatgggctgcacaaattcacgtggactgcacaaagcatctgctggcccgaaaacgcacctgtgctgcatatacaatgtggggtccaataacaatctggatagccacgtatacaatgtggggtccagtgacaacctagatagccacatatgcaaggtgggaccaacagcagaatagagatttacttacaactgacgaaatatatttcagcatattgtattaataaaggagcgtcataagtgtgttacatgaatggtgcgcaccattttatgacgaaattatctattgttttatgacaccattttaaatttcgtcatggagtttcgatgtctaccctccgccatgagtgatccatgacgaaacatgaaatttcgtcatagatatgctgtattcaatgacgaaattatacaacgtcatgagcaaaacgccatagatggacgatttcctactagtggtcttcgagcaagtgtaggactgatggctcgtggggatcgatgtcgatcaccccaacaaatcgatccgagatcagcgtcactccttgttccttgtctgcatccctaagagagattcgtgactgctagaccttagaaagcggcgtcttcatggcgcggagaaggaccttacagcttgagaagtcgtgattcttcgtcttgtgaataggacaatagacatcacgagttggagaagtacgctggattccacgctctttgcaggcacgaatctcagcttgtacattgagaaaaacccagcaagcttgcaaggtgtgtttcctggtcttgtggataggacaccagggctttgttacctcggaagttgtccttgtcggctcgtggttcttgtcgaaaggacaaggtttggccgcactaggatccttctcgggctcgtatgacgtcgacgttccgttcttcgctacggcgggaggatccttcgacatggagtcgtctggggttatagccacggcgtcttgcttccggtcattgatggaccagccgagatcggtaccgtggtataaaccgggaagacgatttcgccgacttgagtccacaccagcattgttgaagtagggactccttggatgaggccagtgttgacgctgttgtcgacgaaacttgatgtcatagtagtagaaccttgagcaccaaggccccctacctggcgcaccactgtcgacaggggatacccgtagaccggatatagagggtattggggtacgctggtacgaggatctacgtagtacgacatcaagcaaacaggtaaaatggattatactggttcaggccccttgataggtaatagccc

SEQ ID NO: 27620 - DNA, 4370 bp, Oryza sativa
cgatgacaccgacgagatcgtagtcgagttgcttcgactagatcacccggcgacttggctcctgtaggctccggcttcgtaggctgtggtggttgtcttggctatgagattcgatgccttaggtcctcccggggggtcccttttatatcgcaagccaggtggtttccaagtagaacttggagacatcggaccctgcacggtatagtgacgacccagtcctatacgagtaggaatctttccatcggtggacttcgtgatgaatttccttagcgtatacaaagaacgtccgtacacgtgcaaatataccatattgccgcatagcgtatatccaaaggtagagggtatgccttatccgtaaccctaacacatataatagcacatatgttttctcaatgtattatttaaatatattaaaataacaatataattttaaattttgtactaactttacgaaactactaatgtgtaatattcatattgaattttatataagtgttagtcattaattatttttaatatcaaattttagttatttgtaaattatattcctatatagactctagactcgtctttcaatatttcttctttttaattctgaatttttgttatttgtaaattgtatttctatatagactctaggctcttcttgcaatattatttatttttaattctaaatttttattatttctaattatatttctatatggactctaaactcatctttcaatattctttaatttttaatttcgaatttcacttacttctaaattgtattcctatattgactttagactcttctgttcatgttttttttaatttcgaattttagttatttgtaaattgtatttttatacaaactctaaactctacttttaattttattatgtttattgcgaattttagttagttttaaattcctatatggattctatactctacttttaatattccttgtttttaattccgaatttctattatttcttaattgtatttctatatggactctatactcaacttctaatattccttatttttttaattccgaatttcagttatttataaattgtatttctatatggattccaatattccttagtttttaattccgaatatcaactatttctaaattgtatttttatatggactctgtttttctttttctccgattaatatgagaatttctaggccgtgagagcgaacgtggaggctcatttttctattcctttaataagttaatagatgttttaaagaaatgcaacattcaacaaaattaattgcgacaccaataggcaatatgtgaaacatcgaagaaacactactataacactgtgaaacatcaaagaaatgcaatataacattaagaaaaattattgcctatgcacaccaacaacaaggcagtgcacaccaagcaagcatgacatccagtcaaatagggtaagacacacaaacacagtaaagtgcaacaaaataagcaaggatttcgaaaaagaacatcctcaaaagacctccagcagagttctcataggccccaagactcggcaatgcagccgcacaaggttctacgtctgccgctggaactcacacccttgtatctactacagctatgtatccatcggagctcactgctgcctcgctcatcgccgacagatcgtgtgttggtgtctcatggggaggatggttccggtgctggtgatgcaaccggatggtagatctgaagtggaaatgagaagggaggatgaagcgaacacccaccatgtgcaaggagggatgatgcggtgctggacgaatgatggccaagggggattgagatcctctgcattgaagaagaaaatgaaaatgtagaggcgctacaatatcttgcattgactcatgttttgatttgttggatcttcatcgaatggtacaaactgttctttttttaagaatgcggtacaaacggtttgctacaatacttttccttgtattatagatgtaatttacatcctatgttcaataggggatggatggatggtatgctttgtatgtagaaacgtaataatgttttgatttgagaatttggatttcatttgagacaactaattttctttccagttgtaactaagtatggttttttttcccttccttgggtgagttcatgcatacttctacgggagaataggtgggaccgttggaggactaatagtttttatttccaatgataaataatatatgttttttagttagtatacgtacacagaagtttgttttcctttttttctactatttacagatatttttgtattcagtgggaagttaggtgggaggcattattttttattagtagatctaatctaatggtttaaaataatgggtcaccaatttaattgaaaattcagggctggatgtttttcttttttctcataatttctaagattttctctgatttattagaatgccatgtggcaatctagaagcgtttgtagcagtgccacgtggagcgtttgtaggaagttttattgactagtatataatagatcaacatccgaactataacggtatgcatgctaacatcttttattttgtttaccgacatatacatatgtacacattattcaaatgatacaatattatgtttgtaaaatataacacaaacacatccataaaagatttacttttagcatttgagtctgcatagagcacaccaatactatcactaacaccatccataatccaaacatatcaatgagaactgagcattgctcagtttatgtgctggggggatgttcacccagccagccaacctagctatagctaggttcaggtagcctctacttgggttcaaatcccgaacttatgtgtgtttctcatggggattttgtgtgccccgttcttcttaattcacagatagccagctgcgctcctcctggctattaacatttttccagcaaagtggtaggaagcaattgccttctcttgtaacttaccatcagttccccatggggctcaggcacaaacttggtaaagtcagatttaggcaatggagacaacaatctgagctcaaagtttctcagcaaatgactccaaatcgctttaatctgcatgtaagcatagccctcaccaacacaaccggtccttccgccgccaaaagaagcgtaagagaatttcccgccaaccttgtcctcctctctccctgcaggaccaaacctgtctggatcatacagatgaccatccttgtagatataaggtacctggttgctgatcactatagggcttgcaatggtgtgccctgcagggacagcatactcatggccttctctcgtccggacggtgaactgcttgtgcgccgtcctgactagcatgggtacaggagggtgcagccgtagggtctccttgatgcagctgtgcagcgtgcgcatctccatcaaagaaccgtagcgatcatccgtgattctgccgccgccgttgatgttgctgtgttctctggcgatcttatcctgctcgtcgacagccgcggtgaggaacctctcgtggctgagcaggcgagcaccggtccacacgctggtgtaggcgctcgtgtgcttcgcggcgaagagcaggcagatcatgagcgcggcgacctacgcctccgtcgtggcgcgaccgtccgccttgtacctagagtcgatcaggctttggagcacgtccttgtcgacattgtctccctcccgctgcttgcgagatctcactatgtcggagaagatggcgtggagcctcttgcgcgccatgtcgcggcggcggttggaagggatgagtggggtgtaggggaagaagacgctcatcaggttcacgccgccctcgatatcgcggaacaggttgcagacctcgtcaaacatcgtccccatcacctccttgccgaggaggcatctgccagagatcaacaggagtagttgctccagttcacgtcttaggtcaacggtgccatgttgcccccatttcgcaaagtaatcctgtacaatgcatagatgatgccatattgtaagttactcaagtttctgatgactgggtgctgtatttttagatgttggtataattaatcatctcaaaagtatcacccaataagatattactccttctggttcaatggttcaatgattcttgatattttggataacgacatggtttatataatatattttcactatgattttctattacaatatataaaaagtaaatatttatctaaaaaaaactttttaagactaatctatatatcatgttctagtgtccttaagttaaatatatatatagtctctttaaattaaatattttaaaagttataaatagtcaaaattctaactatttgatcccaatcttacccaaaacgttaagaattaaaaaccggagagggtatg

SEQ ID NO: 27621 - DNA, 3785 bp, Oryza sativa
atatatatatatatatatatatatatatatatatatatatatatatatatatatatatatatatatatatatattcaaattagcgttgaatatttgtccagtgatatttgacaccatacaaatataaaatatgatgtgaaattatttaaaaatatcataacatcatttattacatgtcgacgcatatgtcataatgtatttagcactatagtaaagctattatgagtcattaatggtttgtttaattaaaggaatacaacatgatggtaaattgttcagtcaaaaaaaaacatgatggtaaattgcatgtataatttaaaagttatgaacgtttcaagaccggtgatatattatgtcataatctatgtcgtcaagtttgctacttttatttgcataacatgtaaaatattagaacatagttccatgtgcaacttttttaataaaagcatagttcttaacatattttcttaagataaattatctggcactctattcaatcatattgacgaaattaattacaatctgcctaaaaattaacagactcaatggtagcgagaaacacatggaaaaaattcactcgagtaataatctcactaacatgagttagtgggttttgatattattatggatctaataatttttagatactttttactacttatatcgtaaccccgcactatattaaagaaagtgtaaagataagctatatcaaagaatactcacggcgtgtgtcacgtggttattatagatctaatttagcaatgcatgttggtgagcaaatggttgtcaatactaattgatgcgtgagaaggacatgcaaaaggatataatgtgacatttttttattagaatataggctatttcactaagaaaggctataataaaatatttcgacaacgaatatgacgcacatgtaggtgcactttcaataggattatataaacgtgtgttagaaggtgcatttgcaggcatgtgagtgtgaagttgcgtatgtagtggtgtgtgtgcgcgtgttcgtctactttataaaataaataaatacaatattccatatgtgaacattttttaattaaaatgtagttagtataaaaatatagttaatataggatgcaatatattttcttctgttttatattgaagatagatcctattttaaatagtgaattatggtttaaataatcactatggtagaaaataaagagagtaaaagaaaccatagaggagggtgcggaccatgaactgatcatgtgtatgtatacaaacatattacaggtttgaatctaaaattacgagggaaggatggatttactttttcccaactgtatctacaagttttattttctgcttttttttcagcgtatagtgagtaccacgtgtacttatgtttagaaggacagatggtagatacgcatacaaacataacaacttttggctatgttcacaggtctaggttctaatcctcgtttcccgcacatacgatttccgctactactaaacggtgtattttgtttggcaaaaaattttatagaaatgtggctgtaaaaagtcatattaacccgttttaagttttttaaactaatacttaggctgtgtttagattccaacttttttcttcaaacttccaacttttccgtcacatcaaatatttggacacatgtatggagcattaaatgtggacaaaaagaaaaactaattgcacagtccgactgtaaatcgcgagattacatttaaagaaataattaatccgtcattagcacatgtgggttactgtagcacttatggctaatcatgatgtaattaggctcagaagattcgtctcgcagtttacggtcggaatctgtaatttttttttgttattagtctatatttaatacttcaaatgtgtgtccgtatatgtaaaaaaaaattggccaaacttttacagcatcgaaacatggccttattttttttaaaagaaagctaattaatacttagcattgaaacatgtgcataataataagtaaccccgtattccatattaggacggaaggattaacattttttttcctaatcgtacacgtgtacagaggtagtatgtatgtttatttcctactttcgtccagtgaacagtgcgtatatacgtattttccttgacgtatatctgctgatgacatttttgaccggcacaataccctcgcacctacctgtcatacataggcggaagagaaggggtgggttattttttaaaatctaatctaatggtccacaataatgggtccaccaatttaaataaaaattaagggttggatgtatttctatcacgtggtggtttaagagcgtttttagattgtcacgtggcggcctaagagcatttgtaggaagtttaatagacttttagtatataatagatatttcataaacattacaatcgtacacctgttgtttttttggatttatgcaaaagaagtaatcaaaatctagtgcttgctcacctcaacttcttgaaccatgggatcaacatggatcctcagcctggctggcttcagagcatcaacaaagaagcgagcctgttcattcctggtggcgctgtctactccatgggcgatctctttgccaaacataggcaccgtgaactccaacaggttgccatggctgatctctgattccaaaccttggaagaaatgggctgagacctctggtccgaccaagaaggtcatcttcagtaatccagccaaatttatggtgaacacgctgccaaacttcgtgtacagttcatgcaatatggctggcaaaccactcctgaaaagagtaggcaagagtcgtaggagggcaattgaattcacaacaggtggaggaggtggcattttgcaggtaggatcagtggcacttcttctccttcctcctcttgcaatcttggtgacggctgcagtgatggccagaataatagccatggcgagccacgtgacgcagtggatgggactacgagaggaccattagcaatttgaaaaacgtctgtgcggaaaacaagataatggaagttaggaacttgccctaccaaatgaactctaactgtagttactacctccgtcctaagactctatttctggggcacgcatggttagcaataaacactttttatatagtagcttctaacattgtgaatggcgaggatgggaggcttaaccatacacaaattttttgttagaccgataatttcacactttattcttgtcttatggatccgcggtctatcctccctacctttctatagcctacaaacaggttatatgaataaggaaggtgcaacgtctatatttatatttactcatgtgttagacttatgatttcatcctttattcatatctatctcgttccaattctgttttttaagtcggttgtacggataaggatgtaaagtcctttgcatggataagaatgttgtgcctatatatatttatgctttggtatcaatctactatcacattaagtcaatccattaagttaatctttgctttcacttttttgaaataatagaaatggttcatatctcttgcctgtgctaataaggcacaagagctgtgcccaaaaaaagcaacaattggttcttccacggggaaaaaatattctaacccatatctatgcattatgctacatttcagttcatcttgccaacgaattcatgggatagaaatccatgctgcatactcacacattcaaaaggaacacaaaactgatgttacctaattctcacgatcaatggaacaacggatgcaggtagagatcactcaaatatatatttcagtaac

SEQ ID NO: 27622 - DNA, 22746 bp, Oryza sativa
agagcatacctgaatacaaagtcattcttctcctcgcagaactgtacactgcatatgtgtaagcagaaatagcctcctctcaactatatatactgcccctccagtttccaggatgcatatcctaaaagaaagaaaagaaaagtttccaggatgtatgcatcaacctaagtcaacagcaaccaaactattagcttgcatgtgccacgcgatcgcctaaataaaacaggctacaatagctcgaattttttaaaaaaataaaaaattaaacatgctgctagtattgatgattcagatctgttatcttagtccccgacgaagaaccaaactattcgcttgccaaaaacatgtttacataaataaaacaagctgcagtatcgtttgaattttttttaagaatgaagtgtatcggcgcgcgatccttgcatgtgtgtattacttaggtctcaaactttcaaaatgtatttttgattctcgaactcgttctgggtgccctaaggttcaaatgggtttaaacccattttgtgtactgatgtggtaggtagtacccactttgattcttttttgtttttctctcttctccttctatccttttttcgctttcttttcttttttcctacaagctcgagcaagagtctggagcagggttttcaattttgatttcggccatttcggttctaccaaattttcagtatttttggtacttattggaccgaatatttttgaaattttaacataatttaattgaatttgacaaattttaaccaaattcaaaaaaaagagaaaaactgaaaattttggctgagataatcacttggcgggggtcagtaattttggaaatttcgaaccaaaattacaatcactggtctgcagaagtttgacgcatgcaagatttgactagttcatacttgccggagtttgtaccatacgagccttgttatcgttgacgacggggacgacgccctccagtccatgctctacggcggccggcgagtcgttggtaggggccggcgcagctagcccaggcgaataactggtagcggaccaacgatggctccagcagaggagaatagatatttttatttttatttttcctatgtgactgacaagtgagtcccgctcacacaaatgcatcactgtgatattccggaggcggctacgtgtgcaaatcgtcggacggtgttgcaccatattgttgagggatgtttcacatgtttcatctcttgataaaaattgctttaatgaaaatgttccagatgtttcactagcagagaaaaaatgtttcagtgcttgtgcaaaattgtttcaattcttgagcaaaattgtttcaaccaaatcaatagtggaacatactgattgcaacacaaaaaaccaatgtgtgcaacattgaatcaaaatagaatgaaacaaaggtggtgttcttttctcctgaagataaaaatgaatatgaagattgagttttttacgcaaaacgaggtgatattaacgtaagattgattgagttttaattattacaaacttaaaaaatagattaatatgatattttagagcaactttgatatagaaagttttcgcacgaaatgtatcgcgtttaacagtttgaaaaacgtgccacaaaaatcttaatattcatccaactcttgttggagaaaagaacatgacctaaggtctagatcagagtgcaacaaaaatacaaataagctacaacatcactaaaattcgcaacaaagcccacctttgtcttcttctattccggtcaccgaaataaagcgaacgacatagggagacaagcgaggtgaggtgaaggtgtagatgacaacaagggcaaacaacgatatcaggagggcgacctcaccagggccagtcatatcggcatccggtccaacgccaccttcgcgtcgtgagctcacagctgctttgccggtggcaaaggtctagcgcctcatcttgtcctccctttcgcgtcagcctgatccatagtcaccagcaaggtcgtcggcatcctcccccctcaccgcttcgcgttgccccaccaccgccagcatggtcggcggcgtcctcctccctcttagcgtcgcgctgcccgccaccaccagcatgtcgccggcgacctcctccctcttcccgtctcggtggtcgctggcgacatgctccggtgtctctctctctctctctctctgatggttacgagaaatgagaggataaggttgtgggaatgacgggtcgaatcaatagtgggccccacctttcgtttctgttccgtccgatattttttgctccatcagacggtagatgcaaagcattttcgtgatattccacattagcgaagaagggagtttttgcccgtttggatttgcatggaactcaagacaaagtttagagacccgaaaatatattttgaacgtttagggacgtagatgatacgcctgtgaccggctggaccgctcatacacttcactcctttaattctcaggtgtgactttgatcgtgaacttttatcggaataagtttataaaaactaattaattattttaagagattatgaatggattttttaaagataaatatacacatattttttaaaaaaaattaatctaagtatttagaattcattgatggttagagttctaaaagtttgataaaaaaaatctaaatactccctctatcttaaaatatgttatttttctttcataaaatgtaagggattttgtgcatttgactttatggacaaaatatgttatattttgtgatataggtggtagcaacttataacatttaaaatttgtcatagtagttcttttttcatctatttattcatttcaaccgatcataatcatgcatctcatatttaattgtttacatactccctccgtactcataaaggaagtcgtttaggacaatgtttaagtcaaaccttgggaatataaatcatgaataactctcaagttgttgagtttgaaaatgtaaaaattatatgaatagatttgttttgaaaaatactttcataaaaatatacatatatcacttttcaataaatatttttatagaaacaagaagttaaaagttgtgttttagagaccgtgtcgatgtcctaaacaacttcctttatgagtacggagggagtactttctagtttatttaagcaagattaaggttaagggaaatgatttgtttcacttattttgttagctaaattctaaatcgttggattccagtcctatgtatctgattgcctgaaaatgcttgaattttcgtgcattgagatcagtgtctgaaatacttatatattttgtacaaatcctataataaatacttgagaacggatgtggtacaacgtttaattttgctgcattccgcacggaaaggcttttctaatcggtagctgctatcggtgcctttcagtctgattggtgtaagatatatttagaaatacgggaaaaccagatcgggacgctaaggtagtcaacgtgccctgtatggattcgttatgatcaccgttttttcctagagtgtatttggtgctcatttattttttttaatataatggaataaaaattctggccattgcttaaaagaagctacaatcacttattataaaattctctcaaatagagcaaacacttagacaacaataagaactgaaataataaagccaacacacaagaagaaaacaattattgaagtctatttgtgaacatccatccctagttggtgaaaatctacattaccgtatttggtactcatttatgaccacaaagaacgggtgtggctaatgggcgggtgatcgcccatagtgatcacccccatccccctatacgctcctatcccccttcctcccccccttcttctcttcctactacaccataaatttttaaaaaatagaaaaaataaagttggaaaattttatgtatagaaatactatatacataaaatatttgaattcaaattcaaatttgaaatggatatgtaaacttttgacttataaactttgagtctataaactaatatttgaattcaaattcaaatttgaaacgggtatgtaaacttttaacttataaactctaagtctataaactttaggtgtataaactttagatgtatagaaatactatatataaaaaatatttaaattcaaatttaaattttaatcggatatataaacttttgatttataaattttgggtctctaaactttagatgtgtaaacttgaggtgtacaaactttaggtgcataaatttactaaaataggaaagtaatgcggtgtaaaaaaggaaaccgcgtggaggaaggaaggtgatcgctaggggcgatcgatcgcccgttagtcttttcgacaaagaactatcgaggtggatcttacgacaaattaaagaaaaaattctcaccggtcataaatttttttgtttaacataaaactttgtgaaccgacaattttatatttaaaataagtttataaaatctgaggtattattatattgcaatattttttcaaggcaatttttatgcattcttgtttcttatgtgagcattttgagtttgatcaaatcttgttttaaaggttacacatttttgttagaaacacggtacaaaatataggtaagcacaaacacacgtacacatttacctttaggaccacacacctacaggtggtaatgggcctaattttagtctatgagggctgggtttaatatgtgatggacttaatttctatatatttttagcctaagaatatttgatggataggttggttatgaaaaaactcattggtcttgactcattaccacctctacccacatcctagcgctatgagtatctccaagagactggaccgtcatatcttgagattgacgaagtcaccatagatgtcttattgcctagtattactttagctgcacaggtagtctgatcgataaacgcagctatgatgtggacgacggaaccgaggatggctgtagaagatgatgcccaggcacaaacccgaaaggggcctccctagattggaggttgaggaagccttgaccaattgtgaaaacttcagccataccttgaagaaccatcgttggagacaaggatgaagactaacgcggtcgctactagataaccggagatgaacatcacggccagcacaaccttcattcaagcagatcctccatgaattccgaccattaattaatacgttgtccaaacgatgaataatgaattgagtattaattattataaaattgaaaatggatttattttgtaagtatttttttactttaaaaaagaaagcactgtttaacagctcgggaaactaatagtgtgctaaaaaaaattgagatagtagctcactctaattattaagctgaatcaagcatgccccaaatcttacacatgactcttgtgccaagactaaaacacaggaaacaaatctcataaaggataaaactaccacatgaaaatgacataaatgttgttgaacactttctttgacagagaattgctgagtacatttgtgggagctgcaggctttttccttttgacttgcttcctcacaagcagttaaaatgggatgtcttgaaatgattctcggtccaatatgaataatatttgagaacttttacaggacaatatactgctagtatatatgatctaacagtgtagattgatttggttttttagttaattagattacagtataaagtttgaaagggtaattttgtcttttctttgttattctatcatcaaatcgtgctatcgtcacgtgcttcgtcatcaaatagcgctcaggatgctcctcccctagcgcatgataagatccagaaccgggtactcctaattagattcaatctaaaacaaaaattactaaagtgttgttttattttctatcaaattcttaacatacccttctatatactgctagtatatactggtagtatattgtaccgtaaaagttctttaatatttaactgctttcaataatctactgctttgtacagaagcttgggcactcccctttcctcatccacgctttttttttctccacatgtacaatttacaatcgcaaatgcagacatgccgactgcttttgtccacatgtttggttcaggccgcttcccttggttcgaaacacgaactcagtgtgtttctttgaaatttaaatgtctgtgctttgctatgaattaatttgaattatatgcatgcactcgtccctgtagataaacttgattttagggatgaaatagatagccacaatgtgtagaatgactatcttgtaatataaaagtacataaggattagatggtaagaaaatataacatagacttggtggtgtggcagtctagcagattcactaccaccaccattgccttcttttagaagagtatatctagccagctcctctgagttatatttccttttcttttcctaacatacatattggcacatatctatactttctatatatattaatagtacataacttcaccgtatctagtaagtacataacttcaccttatcggttaagaggtaggaagcaattgccttctcttgtaacttaccatcactttcccttggggctcaggcacaagcttactccagtccgtcttaggaaatggagacaacaatttgagctcaaagtttctcagcaaatggctccagatcgccttaatctgcatgtaagcatagttctcgccgacgcagctgttccttccaccgccgaaagatgtgtaagagaatttcccgccgaccttgtcctcctctcttctaggaccaaacctgtctggatcatacaggtgagcatccttgtagatgtaaggcacacggttgctgatcactatagggctagccatggtgtgccctgccgggacacagtattcatggccttctctcgtccggacggtgaactgcctgagggctgtcctgacgatcatcggcgccggagggtgcagccggagcgtctccttgatgcagatgtgcagcatgtgcatctccatcaggaaaccatagtgatctgtgacgattctgccattgatgatgccgtgttttctgacgatctgatcctgctcgtcgacggccgcggccaggaacttctcgtgggtgagcaggcgagcgccggtccagacgctggtatgggtgctcgtgtgcttcgcggcgaagagaacgccggtgatgaggccagcgacctccgcctctgtcgtggcgcgaccatcggccttgtacctggaacaatgttttaaatagtggtttaaggcatttagcagttagtttctcaaacagctatagcggcaactatagtaggctaaatggagctatagcggctaatttgtacttcctccatttcatattataagactttctagcattgcccatattcatatatatattaatgaatctagacatgacaatgctagaaagtcttataatataaaccggagggagtacatgagagcaaatagatagaacccttctcaaacagctatagcgagagatagtggtagttatagagggagatttaaaaccctgacctggaatcgataaagctctggagcacgtccttgtcattgacctcctcctgatctccctgctgctgcttgcgggatctcacgatgtcggagaagatggcgtggagtctctcgcgcgccatgtcgcggcggcggttggaagggatgagtggggtgtaggggaagaagacgctcatcaggttcacgccaccctcgatatcgcggaacaggttgcagacctcgtcgaacttcgtccccatcacctccttgccgaggaggcatcggcctgagatcaacagtagtagttgctccagttcatgtttcagatcgaccgtgccgtgttgcccccatttcgcaaagtagtcctgcagaacatgtaggtgatgccaaattgtaagttactgaagcttgtaatgactgggtgccgtatgtacaaatcttgatctaattaatcatctcaaaagtgtcatccaactgtagtcaggtttcccaaactgtcggggtcggagttaccgcgcataaaaaaaatcacttaagacctatttggcagaactctccaactccgcattataattaaagtgatcatgtgtaagctaatcttcagatcttataaaattagaaacttacacctccaactaactcacaagtaagtgtcgttctagaatccgtgcaactaacccaacctgactttgaccaactttggaatataatagattttgggcatacgaaagtaacacaatagatcagatttatcttaaatttggaggcaaacataatcataacacttgctaattacaattacactgttgcttacctcaacctcttgaaccatgggatcaacatggatcctcaacctgaccggcttcagtgcctcagcaaagaatcgaccctgctcgatccgggtggcgttgtctacgccatggccgacctctttgccgaacataggcaccgtgaactcgaacaggtcgccatggctgacctccgattccaacccttggaagaaatgagccgagacctccggtccgaccaagaacgtcgccttcagcaatccggccacgcttacggtgaacacgctgccaaacttcgcgtacagctgctgcatcgtggctggcacatcgcctctgaagagagcaggcaggagccctaggagagcgatgcaattcacaacgggtggaggaggtggcgttttgcaggtaagatcagaggattcagataggcatcttcttcttcctcctcctaatgcaatcttggtgagagctgcagtgatggcaagaatggccatggcaagccacatggcactgctactagttaactccatgtttgttgtagcctgaaggtaaaacatggagacaattaagtagcctggaaatgcgacaagaagatgaaaatgactctgaactctcatcttggatttaagtgtagtttccaaccaattgtgcatgtgcgatgatgggaagcttagtaagcaggcccaagaaagagagagagagagagcatcaattggctcttttcgcagaagaaaatgagaatctaatccatatgacaaatttctgttcatcttgtaaataattcatgggataaaaaccatgctgcattcaaatcgaaaactaggtgtaatctgaccaaaatccacggcttaatggatgcagaatgatgaacactccagtataaagttcgacagctaataaccaaagaatcgggtcatctaattagcgaaattgagaacagagcatacctgaactgaatacaaagctattcttcaacctggcagaactgtggtcttcatgtaagctagcagaaatagcctcctctgaactatataatctgcagtgatggaaacagcaccttcaggaagcatctaatcaaagatgaagtgaattgtcaatctcttgtaatagcctactagtataagtattagcttgcgtgacacatgcccacataaataatacaggctgctaacctgctactgtgtagtacattgtatgattgactattgatcaatttagaattgggaaatcatgttttgtttatggttatgaaacttctggaaaaatttgataacgtagataattatgtgagatatcactacactaacatacaagtttaaatttgacctcaacaagttgaaaaaaaaatcaaatctgactgaatagtacttatactactcagggtgtaatttgttttcttatcaaatttgaagttgattttttgcaagatgatagataaataatgtaccaatattgtcccttttttaaagattttttataactatttaaatagtatttgagataacaaacaagagagtagacatacgcttaggtgaaaaaacagaaccagttccatttagagttagctagtcgccgaaggataatcaaaatatatatgtccaactgattgaattagaaaatatgccaatatggacaatttaggtgggtatagcctcgctgctcatgtcacaaatatgtcgtttgctattttttcggtcttcggggatgtaactctgacgaccatactttttatatacaataagtttatgaggttacgaaagtaattcaagacaagaatatgcataccaattttaagttttcaaattaagtattttagaattcttttatggttggagtttcaaaagttgcatagaaatcaacaacatatttgatatatatgtaatgcgcatatttgatcattaccgtggaaaatatgggtaccgggtattcacacggccttcatgttcgactagatataggaggtatgtcagatccatgtactatgtaatagaagagtatatgtaatagaagagtatgacttgatcgtaatgttgccttgtgttatatgacaggacctataatatcgatcgagtattatcatgtgatagattggaaaactgatgtcaagtccgattaggttttcctctttgtaatcctgccccccaacctatataagattggcaggaagccctccaaagacaaatggcgagataagtcacgattagatcatcagatcaatacaattcccgtggatacaatccccaaacagaattagggtcttattaccttcgtttcaggttataaaactttctagcattatccatattcacatagtgtctagatctatatatatatatatatatatatatatatatatatatatatatatatatgcgcaatgttagaaagtcttatgtccgattaggtttttctctttgtaatcctgcatccgtctaatttcggtcttgtgcgctacatttttctcttaccgattttcagaattgacaattgtctttttctaatcatatacaggcagcgtttgcaaccgtgctgcaaaacaaggtctccaactataacctgctggctgccttgggtgtagccgtgcaggtgtgcaccacattggaaatggtcgtataaaagccaccacctcctataatattcttgcgtgattgattagtgtgcggtagatgcggaaaatacggaaaccagatcgagacgccaagaagtcaacgtgtcctgctaatggattagttatggtcactattactttttgacaaaattttgtgaaactatatcaaactattacaaaagtacatattcattataatatactcctatcatgtcttatgactacacacaacatgtcttatgaaaaagtatggtactcctagcagtgataaatatttgtcattctattctaatcaaaacaaatatttgatgttctagacaatatttgatacaattttgggaatttgattattaatttctgtatatttagaataaatgtataaattacaattttataaaatctaataactttaagatggtatgatagtgcttttcatggaaaaagttatatatagcatttcaagtaagtatttgagaattattgatgatcaaagttttaaaagtttttatcaccttttacgcgtccctaacacacgctaggaatgaaattggaggcactagacctcagtgcacgggaaacgtgcaatcccactgaacgcgcacgcgtgtgtgtaccctattacctagccaggaccaaccgaagtcagtcccggggaaagaggggaaaatccccccgggcgagcacgagtgtcgaacctggggtttgaacgctcgcgggctgcgtgcccaccagcgacgcttgccacctgagcaagcgctcggtctctgaacatcaaatatttattgtctgccgcagatgccattcgatgctaaggagaaggtcgagttcaaatcaccgcaaatctggggccagggctatcaacgctacaaacgccgacatcggcgatgcttgtcgacgccatacaccttcctagatgcgatgtcactgacgcctcatccctctccttcgtgccttgggatagtctccgggtcaaaacctggtacggatgtttggagtattgatgacgatattgtagatgtgatcttcttaggccatcccaaccctccatgtcatatagtttccatagcactaaatacattgacacataaaaaaaaattctatgtggcaagagagttaatgatgagagaggtaaaaagatgaagaaacaatttctcatgcaagaaaccatttctacacaagaaccaagaataaaattaaggggataggtggataaaaggagagagaagagaggggattggatgagaatttaatttgaagacaccatccattaaaaacatagtttctacacatgatatctatatgaaatgacaagtatggaaactactagatgagttggggatggccttaaagacgtgtcgtattggaagttccgtaatggtgggtatctttagcgttggatcagctctgattgtaatggtggcgtctaagatctggacgtatgagtgaatttagagattacagttcagttaccttctgacgttatcttctgctttgattttacgtcacatacacatggtgatgcttcaattgatggagatggaaaatcgaattatcgatctcgacctgacataacatacattggtcgtcctgtaaggcatgtttcttttagtttgggattattataatccagattattgggagtaagctgaaagaaacagacaacttattgaagtagcttattataatctgtagcccaacttattataatctgataagcttatttaggtgagctttttctagattattgggtgaaaaattacccaccatgccaccccactccctatttagacttgcaaacccaataatctaggctctaataatctaggaaagaaataactaaccgcgaaagaaacaactaaccgcttattctactacagattataacaatctagtttatagtaatctgactcaataatcttatattataataatccaagttgaaagaaacagggctaatccgatttttgatggagattatgcttgtgggcgcgcatggtggcccacaaactgggccctgctccttattgtggcctttgtgggtacgaattcggcggcccaaaaacctctgtgggctaaggcctacccaaacccgtacttgtgcggcccaggttgggtctacgggtccacatggaccgtcggatcataacatctcgtgatgcggatcgagctataattttacggaagagcccctgctttaacctgtatttaccgtttaagcccctccccatactaatcacggcaaaaaccccttgccgccgtcgacgccttcccgccgccgcccgacctcgccgtcgccgccgatctcgccggccacctaggtggtcatgtaactgattccgcgctctatcttcctcgcctgtctccgcaggtatgctacacgggcgcaaatgcgtgagccggctggccgctggcggcgtggtggaggcatcgccggcggccaccgtggagaggccagcctcgtacctccgccagctagcagtgttccagaccagcaggtttatctctcgttttaagcctcctcattagccttcacttcttcatcggttttcccacatctctgatttaggagtagcttttgtaggtttgctccttgcagtcctctccctgaacatattctgaatgtttactcttgagttttttttggataatgaaaatggattatatctctggtctctattgtaagacaggtagccataactttgttaaagaaaaaggtaaaaataaaaatggatgaaaatagaacataagatatgggatatttattattgattagcgttaaaccatgtagattttttagctagcaattctaatagaattacagcacccatagtggaatacaagaccattggttaccaattccaagagtttactcttaaattctgaagtaacagataggtatattcatgtgcaggagaaattatcagtatctgaactgcaacagtatgctaagttgctaacatgtttggttttgtttatggaatgggacaaaatctttgcacatgccaattctacaccaagggtaaaacaggatagcatatctcacagggatacaattactacatgaaaatgagaatgcaatattattgaaacactctcttgtaactcagagttcagttacattggccccagccttttcctttgactgcttctgcttacagcggttaaatgggtgtctgaaatgattttcagtccaatatgaataataataataataatatttatctgctttggatatcctactgctttatacaggagcttggctctgctggcgcggaacgtccataaccagttaccggtccagcagcgatccctctatgattcagcaagcacctgaagcgtgccagtcttgcgctgagcgctgctatttcccactcctttgaaagcttctcaaacggagtccacaaccgctcttcaaattaacaagtgagttttggtgagataagaaaaacttttctgttattttgggataaaagtttacgaattctagctaatcgagtatataagagtgagaagtcatgtatctgattatacctgcagctgctgcagcacgtggccaaatggtttgctgaatgtcagacgcatctatgtgttcagcccacatgcatacctcaccaccaagaaccaacttctgctgtgccgggttcttgatatttctcagtggttcattcatataaaatccatcccatgtaacttccaagtgatctaggtaccacttatcctggttgctcacaatgcatctcaaaccagcagcaacaactttttctgcaactccacctccaagcctgttataatttgtggtgaaaaatactagctgttaatttccaatagctgcacaaacagatgatttctggctgggtcctcctaattaggagaagaaactgcactatataatggtattgaaacttttcttgcaatcctttcaccttttcttaataaaggtttgcaatcccattacttcaataaatttccttgtttaaacaacattcctctagttttatattacttgttggacattgcaaaatacagatactaccataagttgttctctatgaatgggcatttactgacgtgtaaacaaactatgcaaactaatttgttcaaagagaaatttagtgccatcacaatgatgtataaattgacaaataccatccaatgtaagcataacatatggtcgcaggaccaatattagaaatatctaatgacatattccagcttggtgatctttgccttcttcaaatgagaatgtgctatatttgagatttggcaaatgtggtcattgtttcttataataggcatgacaatataatttggcaagagcatacaactttgttttattttcttttcctaacaaggatgctgataattttttatataatgacaatcaagaggcagttaggaaataccagttatgcaccacagttctgcggtctagtttgtctccaaagttgttaaaggtttcttccctacaaggacaagaaagtgtatcaatagctatttgaaagatctagatctgcaaaaccaagtcacataccagttaataacttcgtagccatgtgattttgctatcttttgagctctcaatacaaaatatctgtaggcatcagattctttcataccatgttgggccaacctgcacaccaggaaaaatacttcagattagatcaaatgactgatcatccctgctacagaaggacctggtgatggtggtgagtcggccatcaccaacacatctacaattggtgggatcttctgcaggtagaaaaatagatgataatgcatatgtcatggttatttatgggttgatgcttggttgcaaaatgttttggcctcagaaacatatataattttcatgtttagttcttatttttttaatctgttccaaggctcgggtattttgctacaataaagagaaaatattgtcaataagtgcatatcaagtatgctggtgctcttattctttatactagttctagataagagcataccatgctttaacgcgtgggggggaagtccagcaacctgaaattcatagtgagtaattattagattactaaactactatatgatatgagatctgctgctctgcaggggagatacttttgcagacttacttgtattgacctcatcacctcccaaatggacaaacttgaacttaaaaaccttgctgaaatctgaaagagcatcaaaagttattagtgaatattatacaagatcatcaatttgtttttcacaatatattcattattcggttcgttgaactgcttttttttttccttttgttggtaagtataagataaatggctgtttttttctctttcaaagtaataaaagtaccactcaaaatataacgtgatttctgttggtaaaccgtgaattacctgaaagaattccattaatcacttggaatgtagattcgctgctgacatcaagtggttctttacaagtagctgatggccacaacgacggataaccaacacccctaaaacaaaaagaaatgcgcaatttatttgcaaccttttgatattcctactgtcatatctagttaaataacttcatccgtaaggcactgtgctttctggatttaaaaggtataccatgagtacaacaaaaacaaaggattcaggttttcatcagtaaaacctgaatagtcatggagcatatgctagagaagaacagcattggcatattaaatacttaccatgagagagcatggccaggaacatcaatctcagctaagacattgacacctcgtcgttcagcatacctgcagattattgataagttatcttaccttggttaaatccaacagcatagctaactgatctctaaattgatcacatcattctccaaagaaggaatgggttttagagttttgttttttattttctgctgagttccctttgcaatatttatataaattacttaacgtggttttactgcatgctcttagctcctgttacttcatagtgaaggtaaataaattcttatgtccagccataaccttagagtgatatttgctaaattctgctctttcacatgaaaaatgaaagacagaaaaactcactgaacaatgtcgatagcatcatccattgtatatctctctgagtaagagtatgcaccattccataattttgggtatgaaggtatttctataggaaatgactgttcatccacgatatgccaatgaagaacattctgcatgatgatagagtaagcagattatatgatgcaactaaaactaaaggaatatctggagaaggaccattgcaatggagagaattatcaatcaagattgaagaactggtttcttgtgaaaagatcaaacctaccaacttgctgtaggtcatcgaatcgattacgctttttattactgggacaggaaaggtaatgccttgaagtatctgtaggatgccagtgcattgagttgaaaaaagatcaggtattatctttcctcaaactatttgaggacaatagtagatgtatcagataaatcctttaaaagaaagagatatcagacgctatttttacatgcacaatatttactgattcttcatataagcctagtatggaacatgtggagtaagtatgagcatccatcttagaattattcatgatggtggttaacaacaccaaaaaagaaaaaagacttgtgaacaaatggaaaagagattatgaagaaatggaatatattttggttcaaaacttctgatagctgtaagggtttatattaatggaacaatagggatggtccctgctagaagttctgaaaaaaaggacaattcacggcaatatgtacaagagcaaatacaagataaaggagttcaacggaggaaggttacaaggtactatttctcccatggatcaatgctagctttcatttctagtttcaggcttatgatatggtcagtagattgtgagtatgttacttttacaattttacttatgggggtgagcaacattaactatctggatgctactgttacagtcaagtatatttattacaataccctaaaggccttgatacaactgttgttgacaaaaccaatccaatatttagaatatatctcaccaataagaagccctcgataaggaaatctgggcatgtccgtgatgctccaaggggcagactgaagttcaattaaccttgaggtgaaatcaaagttacacaattggctaaacgtctgcaacgatagaaggtacactgttagattgtctgaaagtgatcgtgttgtcttttttatctatgatcatccagatgcattgagtggataaaccatgccaagttaccttcaaggcatgaagtgctccaaaaactgtttgggcctgcaataaagacatagtgaggtgacagcaaaaaaaaaaaagtgtcacaattcctagaactaagccacacgatttcattattttccgtgaattctcaaaggaagaatgtctgcagttaaagtgtcggcatctgatgtcatattctgccaacctttcatgttgacagcacagttagcagagcatatattttttttatcactaacctcaatttgagcataaattggacttccagttgcaggcactgacaaattgtataattcatccacccagaagttgagctgcagaggacaaaatcaaccaaatacaggtcacaagaaggtaagaaaaaaggagaacacccaaagttcacaaggctttacctcatcgccgggcaaatgcacgacgacattcacaccggcgagcagcggcaagccctgggagctgccattgatgacgtggtccagctctatcagcgtcaccatcctctggaacgcgtccttcaggatggcctccccgtcggcgtacttgctcccctccgccgtcatcctgagctccctgctgacgtgcagcgtctgcccgcctttgctcgccgtcgccggcattggccacacctcgacgacgctcccctcatcggcggcgacggcgcaggacaccaccgccgccaccgccaccaccaccagcaacctcagagccatcgctggcgccatcctatccctgcaagaaacccggcaagtacggcttcacacctactatatgtagcagaatctgcaagaaacgcatggagaattttaagagattatattaactgcgacgaggatctcgcacctacttgaatgcagcttcaaaaaccgtcgccgtcagtaacgccggcgaccagaccacgccggagcaagaagatgaagagaaacgccgttgccgattgatccggggatgtgccgaagtggaagagcttaataatgtgcacgccagcgactaggtgggtgcaagaaaaggccgcaacttttagcgcccttttgcctctgccttcccgccttttgcaagaaaaacaacaagaagaagatgatagtgcatcctgctcctgctgctgctgctgctgctgcctttatgaattgtgccaaactatggagtgcacaggtggatagcagtggcagtagagaacatcagtaacaatggtggctaatgcagccacaacacaagcatgtgatgtgatggtgtggtattagtgtagggagagatctgtgcttggatgtggaggaagggtactctctccgtcctaaaatataagatttttatttatgaatgtccagattcataactaaaaattgctatattttgggacggggtagtagttaattaggttggtaggatagggtaggggagagaaatgtggatgttttggatgagtgatgatattgttaacaatggagtcttttttgctgaaatgatcagaggagaagaactaagggaatggaagggagtgtgcctagctgccattatcaggtaggtaaaagtagtttactgacaaatgccgagcgttggagtatcacttaagattgtgtcttgtgtagttgtgtgcttaaagcatcgagcttccgtctctttgaacgtgtgttaaaatagcgtaccagtagattacatgtgtgtaggtagtgtacgtgggtgatgtgtaagtgcatgtctcattaggaaaaatgataaaaatagattatagggacagagaaaaaatgataacaatgaatgttgctggatttgtttttccttttttttcaggattttggttggcaggagctctatttacggtgtgcagcagtaacagaagggggagcatctgttggcgtaattggtttggtagatcacatgtacatgtccttttctccctgtccagtgcatgactactgacacgtgatggtccttgatctcgtgactcgctgggtctcgtggtctgcctcggattatgcttactccattctggtttagtccctggatcccatagaaaaccaaccaaataccgaataccgaatatgatatattctattgttacgaatctggatatatatctgtctagatttgttgtcttagaatatatcatacccaattctatattcactttttttaaaggacagaaggaatacctaactcttaataaataataaaaccagaccaatctttttccatgtgccagtgagagaatgtttcatggcagggatgggagactgatcttctatttgcttaggatgatcatccgcatgtgtaatctgcagacctgcagaaaacaaattcattaataatcaggcagggggtgcaacctgcatttgagtgaccatcctaaactggaaggttgatcttgctgtaaccagcatgttaggcactactgaactcataattaaggactactgttcgagagtagttttcacatctcgtgctagattagttccgcaggagattctaccagatttctcctaccgtcggttgccatgatgaccgggcttacttatggtacaataaaagctcaataacaatttcaaataaaaaagttaaatatttaaatatttttttaccgtgttaactggaattaccatcgggggtgctgtaaccctttcgatgtacagtaattaaaaccctggggctttgcgcgatcccgaagagcaacaatcagttgcctttccgtaacgctgctggaatctccggttttggtcagtacagagcttagcctgtccagttaatgttgcgtgcgactgcgtgcggtgcggccatgtgcagctgcggctcgtcgtaatcaagtccatcaggaccattagatcttatccgttcttattttagagaaagagagagagcttgggctactgatccaggctatatatgattagggcatggctaactcagggtaccctctcaagtaccatgtaggatgggacaatactcccagaaagctaatttcttatagtgctagttactttaagtggtagtcttacatttttatttcagcttctagtgtttttccatttagtcctcataatttttcaatttatatagaagttcaaattttacactaaacacctcaaaatctagaaattaatataaaatctctcctccaccctcttcttcctagttcccattgaaacccaatccccctccccacatctcttccacttcacgcctctccagcttgagttctcctcccactggctctcctcttctctcccctccccggcggagtggaccgacgcggcggtggcagatccaagcggtggcggcagccgggatcgacgcggcccttctctccagtccactccctctccacattcttcccgacgtggggtgccggcttggggtgaggcatctctccaacacggctcctcgcccgttcctcggccaaaagctgacgaaactatgcggctctctgctggggtcgcggctctatgtcggggtgcggtcctggccgagctgttaggaacccaattcctccaattcaatagcaaagatccaccatacaagcaaccattgttttggggtgaaaaagaaaagaaaaactagggaatacaagttctagaagcttctaaaactaggagaggtagctagaggtatgaagagaggtagaggagagagatcgccaaggttccagcccggaaccaggacgccgccgccgcccgtggccgaagccgccgatgtctgtgttctgttcgatgccttccaacaatgctgctgctgcttttgtatgctgccccttctgcttgcttgggcctcgcttggacttggctagcttggcccatatacagcccaattacgttccgttcagctggacaatgccgacaggccctacacgttagtgcaccgcgtgtaggcgctgctcggcgagcaccaaggcaccaaagcattatgtatcgttgagagttgtgttcacatcaaatacattatatatgcactactttcccagcccatgtttcagtagtttgatgtctctaattcaattgacatttcttgagacaaaataaaattggaggagacacatgatatatagtgtgatggaatgtgtatgtctaaatttatgtagtacatcagccactaataaggttttttttaaaaaaaattgtgtatgtttttttttctgcctgataagaaaaaaatattaccccatttttactaccattaagcattactagcttttatcacgacacaattcttcgattactccataccggtatagcctctctcttaaaggtgcgttggctcatttacatggcctctttggatcgagattttcttttggggtgtatttttgtgaataatgttacgatagcagcatcagcatgcgcagaacgtcatgggaaatgctgctattgtcaactatttggacagcccatgcaatatatatactattatgaaatatactattatgaaagacactggtgattgtggttttgccaacttttatactttttgcaaattagttcctgatgtttcttgatattatataatagtataatgtttgtttgaatcaagtgaatattatgtattcaaataagcaaacaagttcatgatatattattaatattttcttttactcgtagc

SEQ ID NO: 27623 - DNA, 3163 bp, Oryza sativa
aaagtgtgggcatttgctagtttgtgggtaataatgcttataaaagaaaaaaaatcagtgtgcaatgaaaatgctcctttggtttttaatagttaacattggacatatgcttaatcattcatcttattaaaaaatataatatgtaattatgatttattttatcattcaagttatttaaagtatgacttaattttttttatatttgcatagattatttttagtaagaggaatgtacgtaaaaaagctaacggcatcatatattgaaaatctgttaaccgaagagattgaaccttcgaaatggttataagaaatgttgatgtcttaaaacatttatcttgagattatttatttatgcactaaaaatactcacacagtacaacaaaaacctcatatagagacactttatagaggcacttcaaaaattgcctagaaaacttttactctggagacattttcagctcagtttattagattctattttgtagaggcattctttcggcactgtaaaatgcgcctgatatgtaaaggcattttcttgggatatttcaaactatgtagagacactttttggatgataatgtgtactaaatgaataaatataagcaactaagggcacaaacatacaagtaattaatgacatggatttgagttggttagtgcattgaagataaaaatgattcgtccaagagaccatgagttcaatgcatgacaaaacgcaaaggaactattttattcttattttttggactggtttcatatgtttgtggtacaatttaatgtttctagaaaatgcctctaccatcttataggcattttataaaatatctcttcgtttgtagagacaattcaccataagacacctattagatattttttaaaatacctctacagtattgtaaaggcaattttcttgtagtgacaacactagtgtctgtagtcacctttgttctagtttttagcatttttgtcgttatggttaactcctccattatcaaggcattttgtgaagaccattcatcatggcataatagattatcataaggtttttctttagatgaaaatcgcatggaaaataggttgtggtggcgccagggtactatgaggcttgtccatcgagggatgcttcttttgtgtgatatctttacatgtcggtctagagagtcgccttgtcaacatatggcagatgcagctggtgctgcgcggtgctaggacattatctgtgccgctttgcacttcttttcctacttgcccctacacgtggtagagaatacggtttgaactttttttcacgacttcctcaaataatccaataagacatggcatgaccaccaagtataccaaacaatatctaaaacaaagcatcaaatgcaatgatgcaaaactttacatatcacctctatctgttacataccacttgtacaactaagacgcacaccaaaaagagagaaattgatgagataatgagtcagtcctcttgtcgatactccgccggtatgtggggtccaggcaaagatgagtcaggtggggcccaactcgatgtcgcacgtgcacttcctttttcaccaaccccaccgagaagttgctataaaaggaccaacaatctttgcacactatcctccacaagagaaactaggatcttcaagtatagctagcattgcgccctcatttcatccatggcaatgcagctgtccttgcctgtcttgccaacgggttttcgtttccatccaaccgatgaggaactagtcatcaactacctccagaggcgtgctaccgggctatcgtgccccatccccataatcgcagatgtcgaaatatacaacttcaacccgtgggagcttccatgtaagccatatgtgtagtctagtgtgcattaatatttatgcttgattatagaatggatgaacttaccaactactatacacaatgtgttaatgatattggtgttgcagccatggctctatttggggaacatgagtggtacttttttacactacgcgaccacaggtaccccaatagtgtgcgccctagtcgctcagcggcgtcaggcttttggaaggccaccggcactgacaagcccgtccaagttgctaacatgcaaagcactcctgtagctatgaagaaggcacttgtattctatgttggccgcccgcccatggaaaccaagactacatggatcatgcatgagtaccgtctcacaaacacgggagggtccactgcctcccacccatccttgtcttcatccaccgcacacccttctgtgaaggtacaaacaacacaaactatattgagaaattattttttttcttgagagaatggtccttcgtttttagtgtgtcgtctgtttagttatgaaattctttgacaaggtaatacatgacaaaattcgacttctgtaacttgtagaaaaaactaactacactcctccttgcaaaagaaaaaacagagtacatattccattcctagtcgatctcaatcgttagttcatcatatatgcaaggcttaatatctcccccttttttactgatcttaccaatagattaaccatgttatcatggatctatatgcgtatatatgcagctagacgagtgggtgctatgcaagatcttcaacaagtccccagagccggacaacaccgcaccaccatcaaacgtcgtctcacggttacagtgctcgccgccgctgccgccgccggcggcaccgcccggcaactacccgccgctgccggtgggtgcgacgaacgacggcggcgtgttcgccggcgccggcgacatgctcttcaccatccaagagcaccaggagggaacaccatcgatgctgccgccgatccctaaccttgagccaccggcggcaacaattgggaattcctctctcaatggcactgctgctgctgctgctgctgctgatggccatggccgccttgaggaagaggacaccagcgcctacaccttcaccgaccaggaaatggagcagatgctcatggacctgatggaccaggatttctttggcaatgatcaaccccaggagtgaactgtgtggtggagtgattttcatatcattccatagctctgatctgtgctggagagtgaatttagtatctattgtaccagatagaataaacccagaaaagaaataaaagaaggccaaagaaaaaagcaaaaagaaa

SEQ ID NO: 27624 - DNA, 9163 bp, Oryza sativa
aagcagggctttcttttgtagtttgccatctcaatcttgcaccgtgatgttataaaaaaacaaaattaattattgtgctacactgtacttttggctgtgttcggcagcaatctttcccaactcatcttcatcgtcttttgcacgcaccctttttaaacagctaaacagttacgaaagttgttttaaaaattatattaattcattttttaaaaagtatctaacacttaatgaagcgtgcgctaactatttacttcgttttacgtgcacgacagattagttccaaacctcacaatctgaacacagcctaaaacgtttcgggaagaacgcatgctagctgagcaaaggctctgtttgaaacttgccgccggcaaccttagctctataacttggccggtaggagggcgagccttttgggcctatttagcacagctagagttcagccaaacagtttcagctctatctaaaagggagcgaagttgggtggtgctctctcacaaaatgaactagagaggtggagctgggtttaggcaactctataactccactccagacccaactcctgaagcttatttagcacagctagagttcagccaaacagtttcaactctacctaaaagggagcggagctgggtggtgctctctcacaaaatgaactagagaggtggagctgggtttaggcagctctataactccactacagatccaactcctgaagctaaatttaagagttggggctctatctgttactcttaatttcctagacaatgatatgtttggggaggttgcagcggagcagcacttgtctctggcgaggagcccagttgcaacgaatgggccttaggttgggccttattatgggctgtatgggatcctccctcttgggcctagtttagatgggcctcaagatccacatctatggcctgaagaactttttgtcaaattatggcccatccatagaagctttaggaaatgtaattagttcattttaggttcctcatgttgacgtcaactttgaaattcatccctgaacctcaatttgctaaaccagtgtacatgagattccaaggcagtatagtgctcggttccgactaacgtggtggctgagtcagcgtgagatccacatgtcaaggcacttcaatctaatataaaaaaaaacaaaaaaggtggaccccacatattagtgacacattctccccttctccctctctttgtatgccagcccaaccactccccattttgccggccatgtcgttcctctcgacgttgttgtacgacctctctgccagcgctgagcccaccctcgacctgcactctcacccttcctcctccagtcctcctgatcccactcaccagttgacctaacagcaggcgggtcgaaggccatcaaggagttgcatcgacgtcaaaggcggaggagcggccgccagaggccatccaggagctgcattggcaccactgtacatgctagctttgctcatggcggtgaccatctcgtttccgctgctgctcctgctcaacatgacaggagtattgttcacgccgcgcactcctcctctagctccgtccgccttagccagcgctgaggatggagaaaacgccgactttttcttcttccccttcctgaccctctacaagagtgtccatgtcctgctgttcattgacacggacacagtgccgacgtcaatagacctggccaccgacattgcgtctggccttgttgtcctcctctgcttgcctaacctcgccaacctcatggtggggaagcacagcagcgactggtggtggtggtctaccatgcaagcacgttcgtcacggagtcagcaacctcgttgaccccctacttctggggggaagcggccggtgccaccgaagacgcgagacttggaggccggccacccttctccttgccgccagccgaatgcaggacaccacacgcggcctgccttcatgaggatgaggaagagaggggagatgggggaagaggaaagagttggtgctaacatgcggggcccacgtgggtcccatactaactcaacacatatgaccaaagttaagcaccacattggacaaaatcgggagccatactgccttgggataaaagttgatctacttttgcaagttcggggacggctatacctggtatcgtagtctaggggcgaatttcaaactccgcatcaagttaagggacctgaactaaacttattcataggaaatttccatctctactcagcctacaaaggtgttccctcttccaatatagtgagttagtgacttatcctattaataaccaaaaactaaccaacaatccgaaattctgaatcatgaaatgattacctatgcaattagttgtgctttaaatggtactccctccgtcccataatatagcaatctaggacgggacacttcatagtacaacgaatccagacatgcttcctgtactatgaaatgtattatgaaatgtcacgtccggtactaggttgctatattatgggacggatggagtaataaggagacatatacaagtataatcgtataaatggtttgtttatcctaaagtacttcataacaattactataaaacactcattccactcgtaaatatttgatgtttaggataagctttagctaaacttttaaaattttaaccaccattaacttttcaaatgcttaacaaaaaatgggattcgattttgacttcaaagtactatcataataacatattttcaaaaaagattttataaacttaattcaatataaactaatagccaaaattttaattttttttactaaatcccattctaaacgttaaaaaaaattatggctggaagaagtaacgaatcacatgttttttcttatctttttaggacgagctaagtgtgcttatccattaattagagggaataaagtacatggaactatcagaagtacaagggaaaaacaaaagagaaattaagcaaggaaagatacttcacggttgcaaagtacttgccaattgccaaaacatcattattatcagaaaattgtttatatagtccttatttgaaaaggaggtaatattttcacctcctctcctaacatcctaaccttttcttttcgcgtcaatttccagtaaggttaagccagcaaccaaaggcccagtgaacagcgaaattcattattaagtgagtgggttgccatgttagcattgttcccaaggttgtggccaagtatcttcatatgcctccttttctctacaagccttcagataacggagctgcctccttaggtgcaatatctgtcaatataaatagtagctctacttagaatagaaggtagtgtttttttttaatcatgagatatgcttggaagccccctactaagaatgaaagcttgatagaacgggaaaaagatatgtagataggtgtttccttgaattaactgaagtaatggatcttacggttcttttatgtgaaagtaaaactcagagctgtgaaataaaatattgggtcactatgcgggatgttgggtttatgtgtaaacattgatttagaagatgactatgtagaaaagcgttatatgattactagagacccttgtttatctatactacttcaaatgttagtagtggtggtgtccattcccgcatcacccctaccactaatatctgagcctcacagtctatactattacaccacctttcaacaagtcatcctccatttcactatttgctcatcccaaatttgaaaatcacctacttgtttaataagaaaaatcacagtaccacacaaaaattaattaagactaaataagtgcttattaattgatttaataagctagcaacttaatttgttttccgtggaaaaaacatattggtactttggtagagagcaaaggtaaacaatcaatgcaaggttctaggagtgagacagcacacctccagtttaagaggatcaggaagatcgtccgtagaaacaaggctctgaaattcagctttcaacttctcatcttcaatgcacaaccatgtgctaggatgtaacgacagtaatagaacagttagaatgtctgtgtttgatggataattgacagtttcattgctcagagttgaattgcagaagcatgtttcagtcgaggatatcggtgaaagcttatcaacatgtccattgccttcagataccactttgcctgtaatgacatttttaagcccctcatcattcacttgtgtacatccggaacaagtttcactgaaaaataatccatctcttgatgacagattcccacttagcaatgcggttgcttcacagcacacactggctgcaatctgggaaatggaatcttcgtccgttaaagacgagcaactacaacagggctgcttagaacattgcagtttgtggaccagctgaaaaagcttagtatcacggatttgctgtaggaccttttcctgcaagcgaacatacaacattaacttggtgaacagaggaaacaaaactgacccaaccaacagaaatggaaaattaaaatgaccttcaggaaaggcatttcgttagcctctttacttgggctggatcctccttcctcttgtctcctaacttcaatgacccatttgataaaatttccagcattgggaggaagatgattcactaaacgggaaagaattgttaggacattgtctacgctgttatccctcaaaagatttgggacaacttctatgcaatactttgccatgctttgccagctttcatccctgcaattctgcatagcattgaaaggaatgagaaaaaaatagatcaagggtgacacttgacacttacatatttgattcaccaagcattggcatgttaatttaccactgcacggatcaataaaggagcttcagtattccttgagataagcatgaacctaccaaatatgaagatgccgacatgttaaactcgccaactacaaactaatttgcccatttagtctaaactgacacatcattgcatagtttcaggacaaaacacgtaggtagcgtgatattaaggccaacatattgcatatctcaacttctcaagagccccaatgaccacgtttaagtgctagacggactgagcatacaccctacagcattgtccaaattttcttcattaacgctaaacggactgagcatacaccctacagcattgtccaaattttcttcattaacagtaataaactgataattgcagagcagtgtttcctgattcctgattcctgacagtcgatgaacactagataacccaaattaatacagtcgcttaatccaagagctgcattgttacaagacactaatcccaacgctgcatacaagaacctctaaaacacattagggccctttgaaacgtaggattttaaaaacacaggatttcgataggaacgagttttaacaaaaatgaaggattttgataggaatggattgaggaattccataggattctatagtgtcggatcctttatttcaaaggactatttagggaaaattcctacaggatttgagaaacacccaagggtcttccgactagctccacaaggtggtgggctagacgacctgggttcgaagcctcaccccttctaattatttgatattagttcattgcctaatattcgcgtctttttaattcctacaggatttgaaattctacaaagttctaatgtttttcgttcagatcaaggggggccttaatgtccacaagagacaggaagatatactagagaatatataccccctgagaagcccagttgcttcatcaatcgtgttcatggcttcccaaagaagcggcagcggaatccaatgaggagggtatttgaagcgagcgacatccaggatcagcgccatgtcctgcccagcatggtagccgccaatcggcgagaaatgccctgttccagtctgcatcgaatccaaacaaacatcattcgttcagaacgaacagcaaacagaaatcgtcgaatttcgagtttcgagagaggtgcggacgagcaggcagcaacctggccgagaagcttccggtggtaggaggcgactagatggcaatcctgggaggaggcgcagcgcagaaggtggcggcggaggtcggcgagcgtggcctgggcggcgcggaaggtcggacgtcggcgccggagcagtgggcgaggcaggcgaccttgccgaaggtgatcccctccgccctgaccgtgtcgaggtgctcgcagcagtcgagcatggactcgtcgaaccaccgccaggggcccttccaccgccgccccgggtcgatgcggagcgcgttgaggacgacggcgagcgtggcgaggccgcagaaggccggctccgactgcgtctggaagacggagacgaggctgaagaacccctgcatggtgcccccctggagcgcctccgcgaacagccgccgcccctccgccgacgcgaactccaccgccggcggcgacggcagggcgcgcccgtacagcgacggcaccgccgccgccgcctggttgctttccgctcggctgcttggtttagacgccattgcggcaaaagctttcgtctcgtctcgtgtcgtggattccgagtattcgacctcgagcaaagggaatgtgcatcgcattccctcggcaggtggtaataggctggatagggtagggcccaagaaccaaaaacccaagggctctcaactccgaagccggagaagtccaagttggatagtgcttattaaaacgaaaagaaaagtaaaatccatgttattataatattttttttcaacaaacacatccttttatttgaacgatagactccgagaagtcattagtcaccactcaccaggcggtttacatatcccaatgttccatattcgaggtgagggaatgatgagaaaattgatattgtcatattcataacgaggtttcgctggaatgccactctcaaatgtggcttcatcaaaataccatttttcaaacgaagctaacttgtcggaatgccatttcatccatttcttatcaatagatgattttttttccttgtttttgtcggtgatttgaccaaaatacccctatagattccatctcttcaattgcttttctgttcgtcagtggcaagccaccatcgccatttcttctccgttgctcctccccaagcctgcattctaacgccaacaccatgcccccttcctcaattcgctctaggggcgccactccctgcgcccgcactcacccaggaggtccaccccacgccatcaatgcattctccgacgctgaacccacctctaggagcaaccacggtcgcaccaatcacagccgcacgagcatatgtgccttctacccgagctcctccttagtgacgtcgctgtcatggacctccgcccccatcgcaccagtcacgcccgtgcgggcatatgtgccttctacccgagcttcttcttagtcgtctcgctgtcgtggacctccgcccccgtcgcaccggtcacgcccgtgcgagcatctcccgaacacgacgtctccagcacctctgctcttccccttcctcgtttcgctttgctcttctccccttcctgccatcattcgccatctccatcgccaacgaccctctttctcacacatgtgggtggataggccaaggcaaaaaggtcggtgtatgtgtcaaaacatttccaaatcatataaaatggacaaaatggcattccggcaagttggcttcgtttaaaaatggcattttaacgaaaccacattcgaaagtagcatttcagcgaaaccccaccctaaaaatggcataatatcaattttctcggaaggcagaggtgctagctcgaggcttggccgacttggccatggcagaggttgtccagccatggtgcacggtaacaaggcgttgtccagagctggcgtcacccacgcagtgccttcctccaaaaaattgattatttttcttttgtgtcgatgggctaaaactataatgttgcagggtcctataacaaattttatcaaaaaaaatgattaaagcaacttcacatatactatctccgtcccatattacttgtctttttgagtttttatttgtcaatatttaatcattcgtcttattcaaaaaattttagaattattatttattttgtttgtcatttgctttattgtcaaaagtactttacatatgacttattttttttatatttgcactagtttttcaaataaaacgaatggtcaaacgttgtaaataaaaaaaatcaaaaacgtcacctattatgagacggagggagtatataactatggatatggcatataaacacaaacaatatatgatatttataaagaaagcatcatattgttcgtgtcgtatcataaatcacatggcacagaatttattcggatacaaatgcaggatgattaagaaggccacatctctatagattctgctactcccttcgtcccatcccataatataagagattttgagtttttcttgcaacgtttgaccactcgttttattcaaatttttttgaaattattatttattttatttgtgacttactttattatctacagtactttaagcacaactttttattttttatatttgcaaaaaaaatttgaataagatgagtggtcaaacgttgcaaacaaaaactcaaaatcccttatattgtgggacggagggagtacgagatactccattaaggttgtgtttagttcagcgcaaagtttggattttggttgaaattggagatgatgtgactgaaaagttgtgtgtgtatgacaggttgatgtgatgggaaaggactgaagtttggatccaaaatttggatccaaactttggatctaaacacagcctaaaacatcatctgtctttcgctgctactctaccacaggttctattgcgcttgttttttttattctggattctggatctttatttccacacttttcaagctaataaacagcgcatttcgaaaaaaatattttttttcttcaaatacattttaaaacaactttacaactatatactagttgatttattcatcaatgcattaacttttgtaggataaaaagatgtatggaaactttggacattattttgcacttaaataggtcaaagctcctcgaaaaagaaaaaaaatgtcgagacacacctgaacggctagaatttgtggttggtttgcaaaaataggtgcactagagttcatcgtattcggaaaggaataatgaa

SEQ ID NO: 27625 - DNA, 18769 bp, Oryza sativa
cggaaccctaacggcgatggtattttttgaacaaaattgtttgtgcgatggtatttcttggaacccacacttgtcgatggcatttctgggacttggacgcttgtcaatggtatttcttggattatctcaatttttaatcataagaaactagggcatagacttcttctagttttcaagaatacctaataactatttttctttgcgggaaaaacaggaaaatatattattcataaggcaaaatttgctataggataccgaaagattgtggcatttgccgtgagacacttgaaaatcgtgtatttgctcatggatactgaaaaaagtggtaattagctgctggacacttctcccattattttattatttccggtcaaaatagagaaataaactatggttaaagacaagtttgcccatgggttcacttgtcaatctttctctctgtttttcttcttcctttctttgtctgtccatctctttctcattgcgccgccgctgagctccgccatggccgagccatcgtgcgtcgtcaccgtcggcggtgaaccccgggtttagtgtcgaccaaaccgagcatcgtgctcctgctgcaccgcctcctcgccgtcgacgatgggagcagatcatcacgtgctctagatcatcacgtgctctagcctgagaagcttcggcgagctgctcacgcgagagctgaacacacggctgcaattgagccccgacacgtccgtgctgtcgtcatcgccacttcactccctagcagcagtaacggccgcacacccggcatcgacgtcgacgctcaactactacgcgacgttgttcgacggcctgcagcggagcacgacggagcacgacggcgccggcggagcgcgtgctgctcgggatggagatccgcagcgtggtggcatgcgagggggcggagcgggtggagcggcatgagtgggcgtgacagtggtcagcgcggatgaaggcagccgggctggagcgggtggggctgtgctacggcggcgccatggaggcgaggaagctttgccgaccaaactttgccgacctcatccgtgctctggaatgccgccgtgcgtcattgccgtcagcggcccccgggatgcgccgccaccggcgccggcaccgccccgccgtggccgagccatcccggctcaggccggccgccgtcgcgaggaagaatggggaaaagaaaagaagagagagaggaagaacagttcgtgtccaagggtattttggtacttacacagctctttctctctccattttgaccgaaaataataaaataataggatgagtgtccaacagctaattaccacttttttcagtatccacgagcaaatacatgattttgggtgtctcacagcaaagaccacaatctttcagtgttctgtagcaaattttgcctattcataaggagagtccacatcaagaagatgtgaaatgagattgcagctgttatcaggccagaaaggttaaggccttacatctgcccttgtttggaagaaaatgactaacgctattttgatataaattagaagtttggttgaaattgaaacgatgtgacggaaaagttggaagtttgtatgtgtaggaaaattttgatgtgatggaaaagttgaaagtttgaagaaaaattttggaactaaactcggccatcgatgaactttcatgactttgatctccctgttacttgacacgaggtcacacacctccttgactatgtaaaatcaaatatgtttttaattatattctgtgatgaacaatatgcattggagattattggttttgatatttggaatttatttgtgaagtggttttggagatgattggatttcacaggtgatctacaggtactgctgattgggtccggtcagaccgggcacgggttgccggtcagaccggcggtgatcgagcgaccagaccggccagctcgcggtttgaccggccgacgctgtgtcggtttcggtttcgggttgtttgtttgggtatccatgattgtttcatgattatggcttctagatggatactatgcgtatgtaatactgttgtttgctactaatgaattaagttggggatagcttggtctcggaatatggtttctttgtttgttctatgtgtaggtgactcgagatgccgggagagtatttgcggtgatggaccgggagtcggcttggggataagacgacgtttgtggtggtcagagatcatgcgggatactaaggctagagtccaatgcatgtggttggtgaagattccatatggcatacgatggaggtattgtgtatgaatgggatgcggagtcgaatttggaaggagtcaaaatttggtatgattggttatgtaaagtttgtttcttgtactatatggtttcctatgaggattaggacttctagtatgagattggttcgtggctttaggctgcctaccttgggtataaataaagagggagcgtgagactttccggcatcgcttttgagagcaatagagttgatagttgagttagggtttcgagtttagtcgagatttttgtaaggagtgctgttgatgtactttgtaaacacatagagaatcaataaagtcgtcatccattttaagagttcttcgatttgtgtttcaccgggtttcggcggtcaaatcggcgggtgacccgcggttagaccggcggcggcaacagagagtggcaggcgatctcggtggttcgaccggagttcgatctcggtcagatcgacgttcatcaggcggtcaaaccggcgcatacacttcggtcagaccgcgatccgttaaatttgagggtaacttttatttccgctaaatgttttggtttttgggcataccaaccattcaccccccccccctctggttggcttagttctgatgtttcgatcctacagactagaaaggctaataactatttaatgtgctatgcggatgaaaatatatgaaatataatagctacacaaagttttttcccaatatagcttcactttgggccatgttttattatcgatgtttcgctttgtaccaccctttaaccaatgttttcatcatacataatcttgttttggtttcactttggatcatccgactctcttctcaagtatatgaatgacctcgagtataccagctgctattcgtgaataaactggccgctattcgtcaataacttccttagctgtatgtagaccgcttctttgacatatgataaattgtatgtagatgaataaaagagttgacggtgatttaaaatgccacataggtaaaattacccggcccaaagtgaaaatattagttgaaggctgatccaaaacgaaacatcgacaataaaatgtgtcctagagtgaaatttactctatattacttagtttaattttttaaatgtgttaagaataaaattagccagaagtctatacttaatgccaagtttggatttattttttatgtacaataaacaatttgtcgcaaactttatgttcagagatgttaaactaaatttacacaatttgcgccatcttctctattgtatcggtcccaacttttccaccgtctccgttactacatgaccctcttatcttactcttatttttcattagtgtgcttgctttgaaaggatatgtgtttatgagttttaaattttgaattaaaccaatacctccacaaattattatgaaattgtcctaaatttagctattttaccatgcaaattttgaagtgttagtataatatatacaatttgttgtacccaatattaatttactcgtagggtcttgataaaaagtacaatacaatactatttttatggattgtttttcatattataccataattgggtggggcgtgtacagtagcaagcatggtcagtgctcagcggaaagccatgacgatggtttcaaccatccaagggggtccgttccgttcgtccccgccacggtcacgtcatgtgtgaaatcagccgaaccattccgagggcccagtggtcgttcaacgcttcccacttgcccccataaatctgtttgactagaaaataagcgctccgtttggtgcgttttatttataacctgtgtatttttggatatatttatattgtacatttaactctatttttttttatgtttgtgtttaaatctacatttgatcgttaattttgtttaaaaaatatatggttatcatttgttttgttttgattaatattgtgactaatattattttgaatatgactatattattacatatttgtataaaaatcttaaataagatgaatggtcagacatatatttaaatatcaacgttatctaactaaatgaataaaataattagtttaggctaatcatgttgatgacaatttattgtactttcaataactttattaaaattgatggtttcaaaagtaatactacaaaataagcatatttttattgcttatatatatatatatatatattaaagagagaatttagtgtatatgagttcgaaagacgactgcgtttgcgttcgttctggttccagctacccgcctcgtttttcgcgcgcacgcttattaaactgctaaaagatgtgtttttataaaaagtttttgtacgaaagtttcttaaaaaaatcatatttatctatttttgaaaaaataatagctaatactaggtcccgttcttttctccaataagagttagatgaagattaagattttcgtggcacggttttcaaattgctaaatgatacgtttcatgcgaaaactttctatataaaagttactctaaaatatcatattaatctaattttcaagtttgtaataattaaaacacaatctagtatcacctcgttttacgtaaaaaacttaatattcatcttcaggagaaaagaacaccaccttaattaatcatgtgctaatggatcgctccgttttctgtgcacactgttctagatagaacctccagcaacaaacagatcgttaagtggctaaaaagagtgctaactcagtgcgatggatcctgcatgcattccacgtttcattacgtactctctttctatcgttatcctctctacccaagtcaccaactcaccaccattgctctctacatcgcctctcgtttgagaagacaacttccacactcccagccatagcggcatacacggatgcatctagcgcagccaccgcagcaccgttacggcgctccctcatctcgatcgcccgacggagagctggaccgaggaggtgaccgtcgccggcgcatccccggcttccccgcacgagtgccgactgcgcccgtgcatctcccgactcggctatattctcttgtccctccacggatccactcccgaagatgcttgcttgctgttgctgaagatatgtgctgattggtgttgctaatgcattctttatgttcttgtgtacctgtatagtgtgtccgtggatccggccacgtagatcgagcagccatcgcccctcctcctcctcatcgcccaaaacaggtgacaccttgccggcggcagcctgcggcactgtgagtagggagatggagatagtaatctattttttcttgcgattgttttctgggatttttttctccaatacttcggacttttctagatgagatcgcacgtttgtaaaaaacccctctcaaaacttgtaatttacatttaggtccacagaacggtttaaccgtcgatactcatctaacggctgtggataggtgcgtatacgtggcactttctacagccaagaatcaggaggagagctccataagagatgccatgtggcccaattagaagcctgggatctgaccctgaaatcggtttataagatttgacctgactaatccctgtcaagttcacaccccctacctcggtaaccaaggaactattccatccgtacacaaatataatcacttaatatctactaatataataatttataatactaatctcattatcatcttcagtagaaacgaacaccatctaattatcctatcaatcacttctcgtttaatctttttcatcttaccctcaatcattcttacacttttatctactctctccggttttattttaattaacgttttggacaataacacggactataaaatatatctttgatcttatttttctattataatatatacaataaataaatgcatgtttgctgttattatagtgttttgaaagacaaatctatatatattgttctaatttctttaaactaaatatttttaaagttattaatggtcaaaattataaaagtttgatcccaaccttacctaaaatgtcaattattatgcaaccggagggagtactcctcatgacataaagatcttttctcctctattttactcttttctaaataatctaaaaaatatctaccgtatattatcatttcaatgccgtcaattgagcggcgccgatgtccactgcccagtgagatggtgagctcgtctcggttttctggagaccaaaacggaagaagagaggaaaggttgaatgaaaaaccatggtctttgatcgttgctgttcatttagcatggaatgggagctataaattttcattagaaagcttagttggtgcttaagcacaggaattttgcgataagcgctttcagattatacaaagaaaatatcatatcttgtgattttttttaaaatacataggctaggtgacaaaaagattgcgatagcatcattagcatatttatagttctcggacctaaaaaaatggacttcgttttatagtttttttactatatctacatagactaggggcatgtttagttcccaaacaaaatttttacgttgtcacattgaatgtttgaatacatgtatagagtattaaatatagacaaataaaaaaccaattacacagttcgccaggaaattacgagacgaatcttttaagcctaattgcgctatgatttgacaatgtattgctacagtaaatatttgctaatgatagactgattaggcttaataaattcgtctcgctgttttctgtcggaatctataatttattttgttattatactacgtttaatacttaaaatatgtatccgtatatccgatgtgatatataggggcaaaaatttttgccaactaaacgaggtctaggtgaacgtagctcagtttggtgcagaatatcaagaatgtaacaattcaccggcaaccatggctttcgtgctcgctttggtgaagccatatgcttcatggtggacatcccctttagcaattagcaaaggtgaggggaatataacattttttaaatactactaacattgtgtgaaagcaccaaccgaattttacaaagttggtttaatatcgaaagcgcttagatacgcgcctaaaccttctactttgcctaatataggtgtaaaatctttctcaagctaattttacttttggtgaatagtcaaaacacacgaaatactggtagtatcagcttccccataataaatgggtgagattaatctaacaatactaacatgcaacccaaatggtttaattaatgctccgttggaaaaaaaaaacctcaatcacattctattcgaagcacttttttcttaatttctacaaatctgatttcttcatggttcttacaaaatagatgttgtccaaacgtgggctcgccttttcttcccataaaatccatctaattccctggttttattgggctagtttgaaacaaactaattttaaaagaaatatattaagcgtatgttttttaatagttaaatgaataaatagctgaataattatgtgatacaaatgaatcactccttcaattctaaaatataacaagttttatttagatactaacaattatattttaagacagagatagcaactcttataaaatttaaaatatatttaaaataaattatatatatatataatatttttaattaccaaattcacatccttgataagtttcaggaagcacgccgcgttaatccattcatgcttctctaccaagtagaatgggactgtttggttggtaaccaaatttggcagccatattaccatacaaaatgggaaaatgtactaattcccaccccacccccctctcgaactatcgcggtcgaccgaattgcacccccgaaccacaaaaatggacattcttcaccccaacaatgtaaaccggacgaattaccctcctcgacccaatccgcggtgggtttggtctacgtggcgtacgcgcggcattccagttagcattctatttatttaaaaaaatgtgggacccacctgtcatacactcatactctctcttctctttctcattctctctctctcccatcgtcggcgcgggatctgggtgtgcgggagacagcagccgcggaggagttggccggcggtaaaggtgggggcgccgtcggagaggcgcggcggagggggcccgacgggaagtggatggccacggggccggggcagggccggacgtcagagggttgcgggggctgggtccgccgccccaagctctgtccttccccgccaccctcgtcctccccgcacgcatgccatcgagagggagggggcccgagctcgtccgccccccaccgccgtcctgctgccctcgtcctcctcgcgcgcacgccaccgagagagagggggaagccacgccgagctccgtccgccccaagcttcgtctgcccgcacgccgccaagagtgagggggaagccgtgccaagcggccgcctcctcatccgctgccgccgccgccaccgctccgtgtcccccgctgccgccgatccatgagagagagaggaagagtgagatagagagtgagagagaagagagagtatgagtgtatgacaggtgggtcctatattttttttatataaatagaatgctgactggattgtcacgcgtacgccacgtagaccaaaaccaccgcggattaagtcgagggggtaattcgtccggtttgcatagttgggggtaaagaatgtccggttttgtagttcaagggtgcaatacggttgaccgcgataattaggggggtaattcgtactttttcctacaaaatgtgaccaacaaaccgttcatcataaatgtaacaacattttgactagaagctaagggcctgtttggttgataccctgagtaccatgcctgagaaaattgcatgcctggcaggcatagaagaagctgatgaagatggcctggtcaggcagcctgacattttacttgtttgggttgtgacattttacttgtttggttgtgtacctttgcctgagaggaagaaacatgattaggatctggatgagaaccgctaagtcaggtactaattataattagaaggagggaaaaagaagggataaaagaggcaaaattgcatcgttcctccaaataaatcaatgtagtacccagcttttgataaacaaatcacttgtatacatcatgaagggaaaacagaacggtaaaacacaagaaaaaaaaaatccctaaatccacgcatctagcaaaacctgcaacaatttctttcagctggttggcaattgattcaatcaaacaaaccatgaaagccttcagtgtcttgcacggtatcagatctggaatggctgcagtgcctgcttccttcccgtgcttcacgcgaacggcggatacaacagagcgaagcagcaggatgcagagggatccggcgagtcagcctcttcctcggtgaatccagcaaggatggaggtggctgattcacatgacggcgatggagacaacaactgcagcagctccgcgtgacgatggcggcggcggcggcggcgggggcacgcgtgtggctgttgaaatcctatcgttctctccagatagaagaagaagattacggtggtaagtggattcgcctggagctcaggcgacctatttggctcaggctaacgacgtgcgggaggacatcaagccaggcgtggaatcttgagtcccagggagacaaccaaagaacctcgcgttatactcaggctagtatcgggtcaggcaatttcttcccagggcagcaaccaaacaggccctaagtctatgacatacaaatccaatagatattaaagtgtgttgtatcataactgtgctaaccaactaaagtctagactaataaattatgatatatcaaagctttggcgtggcaacgtttgatagacaatcaaacaacttctgcatgccctaactcttttttttttaaggaaatgccctaactcttgatattttcgtcctataaaattgatatttagtacttgtcggtgatatgggcccgggggtatcatgtttagagggaggaggctgcccccccaatgccacgtggccctcccccaaggggagtcgggcccgaggtagggtggcggccactccttcccaaagactagtcggaggaggctaccccccgatgccatgtgaccctccccggaggggagtcaggcccgaggtggggtggcggccactccttcccaaagactagtcggaggaggttgtcccccgatgccacgtggccctcccccgaggggggagttaggcccgaggtagggtggcggccactccttcctagagactggatgaaggagactgccccccgatgccacgtggccctcccctgaggggagtcaggcccgaggtggggcggcggccactccctggccaagactagagggagaaggctgccccaggcgccacgtggccctccctcgaggagggatcgggcccgaggtcgggcagcggcggccccctcccgtgactaggggtcaggctcccccgaccccctctttaggtcaccacgtacaggtgcccacctacccgtatttatggtgacccgagcagtcgcgccaatgcggcttgcagtgtactcaaccggtctgtgaccggtcgaatgactgatgggactgactagtgtgcctgtgcgctgctcgtgtgttaggcggcatgcagcctgacatatcccatcaaataatgatggtgagaggttctcatcatcttatcccagctggagtcggtcctcccgctctggttaaagctaggctcccttttcccggtgtaataggagcccagaagttttcacccattaaatggtgaatgacatgggcgctccccgtgtcaggcggcatggtgtggtaggccccacgaccaaggcgacgtgtatacaacttccaagttaaggaacaagacaggcatttaatgcaaagatggtaatatttctcgaggaagttaggttgttgggcctatttggtatccccttgaactataaaaggaggaccttgcctaccgagaaaagggacgacgctcagtaaacctgaactctaggagaagaagagcgagagtgctctccgtagtttaggaacccttgtaacactcaaccataatcccaaacacaggagtagggtattacgcttctcagcggcccgaacctgtataaaccccttttatctcatcgtctttggaggattgaaccccctcaagatcacacagcttcgctcaccaagccctcgaatctcacccgctgcccccggccgaactcacaaaggggggcctcacggttccctgatggaggagttcattcttcgacagtactctatttgttctaaaatataagagatattgggcggatctgacatatcctagtactacgaatctggacagattcgactctcccgtattttttggatggagagaatatataacttcgtatcaaacttgtggttacaagaaatatttcatattattcccttcgtctcataaaaaatcaacataataccgggtattgacatatcataatactataaatttaaaccaacatgtaacccattcaattttatgttatttttaacgagatggagggagtaatattttagaacgggtatggtggatttttttttttttagaaaaagcactcgtgttccaagtcccaactcggtcttccccagttccatctgtccacacactccacagcaacaggcttgcagcctgcacaacagtgcttgtgtagttgtgtcgcgtgtgtgtctgagagagagatcagagatgagggcgggcgggttgactgggagagtagaccaggaagtcgtcttcactgaaagtccgtggaatgccgcgtccctccatcgaaagcgagaggggccccgccctacactgccaaacgtccctctcccccagggccccaccaccccttgaaccaaaaaaaaaaaagaaaatctctcgcctacgcctagtagggattagtagtagtagtactactcctcgtcgtcgtcgtcctcgccttctcttttgacgggcttgcctcccctcccctccctcctttgccccccgcgtccaagtcttccttctcccaccatcgtcgtaactatctcgttgttcattcgcctcctccgctcctcgtcttcgggtgtgcgggctcccttcctcctgcttcttcaggtgagacgagctctgctttttaattcttgttcttgtgccttggtgtgttcttgtggggctttatttgggggtgtacagtggatatgatcttcgtgagtggttttgcggtttagtgttcttggagcgcaggaggatctcccggacccggaattgttatgcaaggatggagaggtgaatttcgggggtgctggtagagtggtagtacggcgatggaattaggggagaggaattctgttcgtattgctgctgttgttgttgccgatgcgtgggtttcttgaggaggaccaagggttcgtccaggactcatccgcttggggatttttgatgatcatacgcgaatcatttcgagtggcggagaagggcggccggagtgcctgaccacttttggtgcgagatcgaagagaaaagatagtgtttgtttgtttggatggtggtggtgccttcttttgggggatatttttttcctcgttagatttttttcgcaacaaaagtagggcgcctttttgagacacgagagaagccgagatattaaaattagagaccttttgatcgctctaaaatagaattgattgaggcatagaacgatggttttgtgtgttagaacctgcttccagtagacgattctttgttactcgttctcattcatgcatctacttgttcttccttttgcctatcttaataattagaaagtttaccgcttgtgtgatttgctttgtctaaggtggggatcagttctctactgatgtagtgatgttggctgcttacagttgggattctttgatgttgttgttactatcataaattaagtcacaatttccatcgtactaggataattatactgtggcacactaactttcaggctagagcatcgtatgtttacctgtaatttcgtgacatggtgttattgattcttgcaggcgactgctaattttgaagtgccatttctcatcgtcaaggagaggtggcattaatccgcagcaagtgctcgatgacagatcattattatgctcctctgaggcttattcttctcttgatattgagtgccacctgttttggctctgaacttgatgttcagtgcttgaaaaccatattccagtcagtgaccgatcccaatggtatactcaaatcctcatggagttttgtcaacaacggcacccctggttacatctgcaaatttactggggtggaatgttggcatccagatgagaaccgagttctttctttgcgtctcggcaaccttggtcttcagggtccatttcctgcaggccttcagaactgtactagtatgactgggctagatctgtcgagtaacaactttacaggactcattcctcaggacatctcccagcaaataccatacttgacatcactggacctctcctacaataggttttcaggccaaatcccagtaaatatttcaaatatgacatatttaaacacactcaatctccaacataaccagttcactggtcaaattccactgcagttcaatcttcttggtcggttaacatcattcaatgttgcagagaaccgactatcagggcctattccaaataatctaaataaatttccgtcatcaaattttgctggtaatcaaggcctttgtgggctaccattggatggctgccaagcttcagcaaagagcaagaacaatgcagcaatcattggagctgttgttggtgttgtagttgtgatcataattggcgtaataatcgtattcttttgtctgcggaaattaccagccaagaagccaaaggtcgaggaagaaaataagtgggcaaagagtatcaaaggaactaaaaccatcaaggtgaaaataccctactattactatttatttcccttttcttttataatacaaaagaaattttgtgtaacattattcgtaaaagaagctaacgtaaacttcttactgtcatggccttttcaattattcaggtttctatgttcgagaatccagtttcaaagatgaaactaagcgatcttatgaaggctaccaatgaattttgcaaagagaacatcataggtactgggagaacaggaactatgtacagggcagtgctacctgatggttcttttcttgctgtcaaaaggctacaagattctcaacattctgaaactcaattcacgtcggagatgaagacacttggccaagtaaggcatcgcaacttagttcctctcctaggattttgcattgctaagaggaaaaggttgttggtgtacaagcacatgccgaaaggttcactctatgatcagttaaatcaagaagaaggcaaagactgtaagatggattggactctgaggttaagaaccggcattggtgcagcaaaaggtcttgcgtatcttcatcacacttgcaatcctcgagtccttcaccgcaatataagctccaagtgcatcctcctagatgaggactacgaaccaaagatatcagattttggacttgctaggcttatgaatccaatagacacccaccttagcacctttgttaatggagaatttggagatcttggttatgtggcaccagagtatgcacgtactctggtggccacgccaaagggtgatgtgtacagcttcggtgttgttcttcttgagcttatcaccggcgagaggcctactcatgtttcaactgcaccggagaatttcagagggagcctagtagagtggatcaactacctatcaaacaatgccctcctccaagatgccgttgacaagtcattgatagggaagggcagtgacggcgagctaatgcaatttctgaaagtcgcatgttcttgcacaatttccactccaaaggagagaccgacaatgtttgaggtctatcagctcctcagagccattggagaaaagtaccatttctcggcggaggatgacttgatgatgctgccacctctaagcacagatggagaaacccttgacgagctcattgttgcccagtaactgcaaacccaatgttccacagaaggcaaccaagtggaggttgtttcttctgcgcgtcattaccatgcttagatgagtgaggtggctttacatgatgtactattaagtagtatcagtatactgcatccgctgtataatttttgtagcttgttgttatctaccattgggaggtgctagcagcagcaatgatgatctttcactcaaccgatatggggatggggtattaactactcctaatagtagtttgctcctcatgtgatgggaatatgccatattggcatttattcagtcatttttcatgatgtcatttgtacttacgccacgggatgaggaatactgaacgtcaaaatgtgtggaatgccaccttatgatgtcttccagccaaagtgcacctgagtatgcaagcaaacttgggaatttcattatttcaacttgcagtgtaagagtagtgggtcattgtcttttgtaaatgtagtatagcttttgctggttgaaactattttttttcttggtctataaaagcttcttttcatgctagccacttctattgttgaaatatgcagaaatatcaagattaaagaaaagaatggtgtaggaatattgcaaattaagcagagttatttttagcttataaaaacatgtcacctttatttggtcaaaactcttgcctggtcttaaagggccgtgtgcgttccagggaaattcatggacttttgtagtggttatctggttgatgcatctggaaatactgatattgatgggaaaaaatgctcctcttttaagtcgtttttttttcttggtgggggtggtccagaaaacctcttacacgtatgaacaccggtcaaaatttttgacttcaacgaatgttatatctggaatcatcaagattactgataaaaaatacctgcaagaaatattaatgaaaaatcaaggcgtatgcataccgattgctagatagcgttgctttggtgctctctacgggtattattataccactagtattattaggagtaaattaataactaatatactttttcatttatgttttttcttggctaaatcgatctatgatcacccattacgctggcatcgctcatgtttcatgaaaaaacaaaaaagaaaaaaaggtttagtcactgctaaatgatgattataccccttcgcacccttttacatttctactactattaactagggtggttgtataaatagatctgaacccttcgatcaaatgagatcaatagttcggattattttctaatacatgtagagagtaccgtaatgaggctcttgctagaagtatttcgctgctatttatttagtggacacataaaacttttgctctctgaaaaaatttcacatgtgacttcagaagcagcataaagtttacgggcttgttcggtttgtaggatttttcaaaacgtacgaataggaaaaacataaaatagtataaaaatacaagtgcaaacctaagaattgaaaaacataggaaactttactatggttgtgtagcaaacaatacaatggattgaaaacattgggttagagtggattatatttttctttgttttcccataaaagggagggatagaaaattttcatctggtgcattcctttgaaacgaacgatagtgcactgtccattccgaaggactatatattactgtacttttccttcacaataagccctagcagtgcaagccacgcttggcttggcgtgccttcagcctattccaacaaggattttggaccaaaattcatctctaggtcacccaccccacagtgctgtacccacgtcttcctcctcatcctaatccccacgccgcttttctcggcttttcatccccacacgctgattctcgccagaccgcctctttcctctcccctctccacctcaccgacggcggtggcggcgtcctcgatgccggaggcggcgcggtggcctcgcttgcggaggtcctcgaggcggcggctcagatctggacggacggcgacgcggcggcacacgtggcggcggcggcggctcggtcgacgacggcaacctcggcggttgcctcgtcgtcctccgcagatctggagcggcgcacacggtggtggtggtggtggtcgtcgtcgtcgccaccgacgcgcggtggtggtcgccgccgacgccgcgtcgtcgttgcccgcggtggcgcacgccatccccgccagccggactctccctcttcccggcgcgccgcctaccccaacgtcgagcggcggcgacatcctcgggacctggcgaagaaccggcggcggctgcgcagatttggagcgtcctcgccgtcctcaacgacggcggcggcgccgcggatctgaagacgtggcggcggtggggggtcctcgccccgccctcctcacggacggcggcggtggcgtgtcctcgccccaccctcttcaccggcgacggtggcgtggattggagctggcctcggagtcgcgcgttctcgtcctcgcatctctcatcagtgggccccgcgctctactttttaagcgaggttctcgttccttcgctggtaaccgaagaagctattgaagctatgggacacacaaactttttttgccagcgaggacgaaggaacgctccatgtagacgaagtaacgcccactgtgaagggccttacaatccccttttaaattttttttacaataacctgcagcagaagttttccaaattaaaaggcaggataataaatggttaacaaaattctagatcgaacgaacatcgttttcatataagtggcatctttttttttctttttaccattttaattaatttatttatatataaaatttaatttttctaattccgttccttgcctatattatgattgccactaaatagttaaaatctataaatatggaaattcctaagtgacctgcaaatcacttctgtaaaaatggcattgtttcggatcatttccatcacagtttttattacccatccgttccatattgtaaggctttctaacattgcttatatttatatttatgttaatgaatttagacacatacatatagcattgcaatgctagttatggaaaaacatttttaaaactgataaaaaatggttaaagcaggaacataaagcatctgtgagtgttgggttcggcggtgagcctcccccaacagtgttgcgaaccaaagcgaggttttttcgcgggtctcagaaggggaagcagccaagcttttcccgcgtcccgcgacgagggttttgggtccgccgccacccaccgccgccgccgcccgccaggtatgcgtctccctaattccccatcttgattagggatttataatagtctctttgtggggatgggggaaaagtacttcgcatttcacctgcatgtttagcattcagccaggtcccctagttttcttttttttggggatgaaaatgttgatccgatgtgaagtttttaggaattatttttagttttttaggc

SEQ ID NO: 27626 - DNA, 2161 bp, Oryza sativa
cgaatctcgaacgttcatttctcgatccaacggtagttttcaagttttcactacatatgtggtttgcactagatattttccccttttgttctgaactaatcatgatacctttggatgaactttgtagattttttttactaccggcttttactaaacttgcacacattaattttcagttcgaaagcttgagagatagatggaaggcgaggatgagtctccttctcctggagagaatgagttgcctttgtgggggcatgttaagatattggatgggttcgctcctcgctgtggaacaaacatgaggttcctatgcgactattgcagttgtgtctttcgtggaagctattccacagtgaaggcacatttgcttaaaatttctaaacaaggtgttccagcttgcccaggagtgaccttcaatatcttaatgaaactatccagtgaagttgatgcagcagaagattcaattctaatccaggtgcgtaaaaaaaggaatgtaacagaatcttgtagcagtgactattctggtgacgaaccagaatcttgtagtagtgactattctggtgacgcaccgtgtatgggcaaagttattgtacaagcgaaaagaaaaaagagcagagctgaatgtcgagataacttcgatgctcagtttgcaagaatgttctattcttcaggttactaccttaaacttaaaaacttgtatattttccttttgggaacatgcataagtttgcacataacagggtactctgtttatgttgtatccatcgcccttcactttttgttttatcttagcaggcttgtccttcaactctgcaagggacccatacttccggagttcattttcttttattttgaagaatattattcctggttatgttcctcctgattgcaaaaggttgaagacaactcttctgcaaaaagaaagggctcgcattgaagacttactaaaacccatcaaaagcatgtggaggaaggcaggtgtgacgatagtttctgatggttggtcagatattcgacagcgctcacttgtcaacattctggctgtcaatgaatgtggacccatttttctgcaagcaattaacaatgaagatgaggtgaatacaaaggagtacattgcagagaagctcattgctgttattgaagaggttggtccagaaaatgttgtccaagtgatcacagataatgatcctgtttgcagagctgctgggctgctgattgaagaaaaatacgatcacatccaatggatgccttgtattgctcatactttaagtcttgccttgaaggatgttttttctcctaacaatactggagatgttgccttcaaagatagccattggatttctgaagttgtagaggatgcaattatgatcaagaatttcataataaatcataccatgatatcatctatactgagtgagttcagtaagttgaagattcttgctatttcgaacacaagattcgcttcagatcttgttatgttaaagaggtttcggctgatcaagcaatctctaataatgttggtcatcagtgacaagtggtggccggtttactgtaatgataacatggagcaagcacagcttgtgaagtacaagcttactgataactcgtggtggaaacaagttgattacattctttctttcactgagcctatatattcgatgatgcgcgtgacagacactgaagagccacgccttcatcttatcaatgaaatgtggaatactatggtcgagaaggtaaaggctgccatttataagcatgaatcaagagagcctgaagaggagtcagcattttactctgttgtgcatggcattctagaagattggtggagcaggagcaaaactccgctccagtgtttggcgcactcactaaatccaaggtgaatcttgctttgtagttaccaagtgatttgtattcctgaagccattatttgatatatatgcctctttgtggtctcttttgtaggtattacagtgacagctggattaatcaagctgctaatcgtctacccccacatagagatgctgagatttctcgagtgaggaataattgcttgaggaaattgttttttactacagacaacttgagaactgtcaagtcagaatatggagagtttgctcttctgggaacaaaacattttagcttgaattcaagagctgatagg

SEQ ID NO: 27627 - DNA, 12088 bp, Oryza sativa
gtccatgttgatttgcatgtacagtagcatatctctattactagaatatagcaacacccactcttctagcatttaaaatttactccatgtttcatattataggttgctttgtattctttttctagtaattttttttaagtttgatcaaatttatggaaaaaatacaacgatagattcaacacaaaacaaacatattattaaaatatattgaattttacttttagtgaaattaatttagtgttataaattttgctagattttgataatatgaaaatgttttattagaaaaatgtcaaagcgacttaaaacgtgaaacggaggtagtatgtcgaaacgtagcaatttctacagctaccctctcatcttaaccaattacaacaatctctcatttaatttttcccatctattacctcatctcaactacctccatcccaaaatataaacatttggatatgaatctgaacacatagttatctaaatttaaagctaaatatgtttatattttgggacggagggggtatctggggatggctaattggcgcgcgcgccagctagcactccctcccctcgcgctagcttttctttttcgcaattttcctttttcgcttttacttgattttttgttaatcttctacacacgttttttcaaatctttaagttgaaagtttttaaatctttaacttgaaagttttcaaatcttagcttaaaaggttttcaaatcttaacttgaaaggttttcaaatctggacttaaaagttttcaattttgagttgaaaattttcaaatctcaagttaaaagttttaattttcaaatctcaagttaaaagtttttaaatcttaaattgaaagttttcaaatcttaaatttaatttgaaagttctaaattggactttaaagtttgcaaatttgtagtgaaaaggaaaataatgttttggaaaaaaaaagtttatcttgattggcctaatttatactacctccatttcaggacataagactttctagcattgcccacatttatatataatgaatctaggcaaacatatatctctagattcattaatatatatatatatgtgggcaatgctagcaagtcttataatatgaaatggaggaagtagaacctaattacgtataaaaattaagttaatcacgctgtcagggttatggataccacatacctaatagtagttgactaaatctcggcacgactcaccacataccatatcctatacggaaacaacctgcggatataggaagagttccggataaggaaagacaaccagagttctatatggaaacgacaaggactactctgattgtatccatattggtttacctagttctatttgtacaagggacacctatgggtataaatacaagactccctaggaggaaaggggacacacccaccatagaagagacaatcaacacccaccacaatctacggaacaatagatcaagacagaagatcaacatacaagccaatatacgctaagacaagccgccgggtatcgacatcagagatatgcctggatcgaccctatccggaacctacagaggccggccgtagggacgcgttgtctctgatctcgccgggcatgaactcgaggaagaagactaccctgatgtcgactatgagtcagatcttcagaccgccatgtcgataacagttagatatgctacccaaatattgtactggtgtgattatgatggataagagcaatgaccggcttcgaccaacaggatgtagggttattacccgataattcaggggcccgaacctgtataaaaatccctgtctccatctcttttacctcaatctcgcatatatcatggtaccgacgatctccataccatgcaaataccggaatcgcgacatcaaacgttgttagtggcgcgccaggtaggggattttggtgctttaggatttcgacgagatgggttcaaaaagatggattcttcaacaataagctactcgactacttcgaaccagggagatccaacccagccaaagtacgtcccccaacgagatctgaaccatcgtcgtcgataattcgatccggcgagatcgaccaagatgtcaccgccgcgggtttcgagactttcagccgagtccgattgctttgagaccgagcgcttgattgttccgtctcagacacaaagtgctactgacaaaacagaatactactacatgtcgcctgtatccgtggtcggattggatcgatctcaagtgcagcagccggacagccaagcgagaagacggctgactacatcacgtgttgacacatactccgtatgtcagcatgcatacagtgggaccgatgtacagtattgcatggtgtgtaccgaagagctgagctatctcagccataggtatgcatacatacgtacataggcatgccatctacacgtgccaatcgctgaggacaattcagtttggctaaaaggtaattagtggattgatttattaattaatctattaatttcatagatacatccggcatgtatctacaaaggtatacaatattttatctgcaatttatcatatctattcagatcatacagcattgtcagatctataatttattatgtttacctacaatatattttttatacaatatctgttgcgcgggtgtccccgatgttaaatcgactacgatctaatgctgagggctcgctctgtcttcttctgtataaatcatgcttgtttacggtctacataatgcctggtatttacatctgctcgttatatcctgataatactagaagatccatgcaattttttagtacatactcgatattctccgctatatgtcttgtcttctagaaaatatttttcaggaacaattgagcactcgaatagtttgtggtcgagtacaccgtattatcgagaacaacctcgacaaatgcagagtcgtcgcgcccaacctaccaacgaagaccgacgacctatctcatagcaccggccatggctggactactcgagaaaaggttgttaacggatagttcctcgcgaacgccgtcggcttgatcacccgacatgattgcgaatggacgtccggatatgctacaagttgggtgtgtgagtcatgctggccatatgagatgcacatgtaataaaccaactctagcacttccattggtgttcgagagatgattctactcgctcgctggttctcgaaccagtactagcaatctcccgcaccgcaaacctccattggtgttcgagagatgattctactcgctcgctggttctcgaaccagtacgtagcaatctctcgcaccgcaactttcattagtgttcgagagatgattctactcgctcgctggttctcgaaccagtacgtagcaatctcccgcactgcaacctccattagtgttcgagagatgattctacacgttcgatagtcctcgaaccagtacgtagcaatctcccgcaccgcaacttccattggtgttctagagacgattctactcgctcgctggttctcgaaccagtacgtagcaatctcccacaccacaacttccattggtgttcgagagatgattttacttgctcgctggttctcgaaccagtacgtagcaatctcccgcaccgcaacttccattggtattcgagagatgattctactcgctcgctggttctcgaaccagtacgtagcaatctctcgcaccgcaacctcagatggtcgtggtacgattacaacaataacgcagcggtcctcgcaccacgacttcaaatgatcgagagacacctactcactggttctcaaccaatcaatcgtagtgatctctcgtacatttacttctagtggttgagttacgactactacctggttcttgaccagaggtgtagcgattctcccattacctctacttcaacaaagttgatatcatgtacacaatatcgccaagtgttttacccagagatcccttaccacaaagacacctagcgttgaaacctatcctaatgtccctttacgccatcttgacaaggcctccgaggaacctgagggaacttcggctggggacgcccagagcggataaggccttgtaggatcctttagagacgaaagaccatgtaagatctggtcgtgtaagagttctcaccgtgcgtattaaccaagccgtgtaatcggaaatggattttctaacttcacggctgggggctaggatcagtgcttgttcaaccgaggcaggtcaaaggttcaagagctttatcctccgagaacgattctccgacgacaaggctgggggctacggagagtgtataactcaacaaactgactgatcgaagtcggtaaaagagtagacgctcatatacaaaacattggtctgtaagtttaattcattttcagttttccattcattctataacatgttaccctttgagcgttcgctcgggggctatttctatctaatattcttttctgagtattgatttcaggaaaattctattcgacattatcgaaggctccatgtctctatggttgtacaccaagatcaactaaggcgagtacgagaaatgttgacaaggcttcgtcgcagattctacgccttctcgatcactcgagaacagttggtggatctcgacaaggaatacggaatgaaaaaatggtgtacccgccgagataaaatttcttgacttcaatccaaattctcgattacagcaagacgggagacttagtcgtatgctctgctactttcttggttgacgtcggagattgactcagacaaaccctttaggtgcccgcacgaggctgataaaggaagtctaatgttatctttgaactcaccgagaacggtcacgtaagctcgataacagttcctccaaggtctgcagttgagaatatgaactcgctcatttgcattgaagtcgggggctactgtcagggttatggataccacatacctaattgtagttgactaaatctcggcaggactcaccacgtaccatatcctatacggaaataacctgcggatatagtaggagtttcggataagaaaagacaaccagagttctatatggaaacgacaaggactactcggattgtatccatattggtttccctagttctacttggacaaggggacacatatgggtataaaaacaagactccctaggaggaaaggggacacacccaccatagaagagacaatcaacacccaccacaatctacggaacaatagatcaaagacagaagatcaacatacaagccaatatacgccaagacaagccgccgggtatcgacatcagagatatgcctggatcgaccctatccgggacctacagaggccggccgtagggatctagcgctgtctctgatctcgccgggcatgaactcgaggaggaagactaccctgttgttgactacgagtcagaccttcagaccgccatgtcgacaacaattagataggctaccccaaatattgtactggtgtgattatgatgaataagagcaatgaccggcttcggccaacaggatgtagggttattacctgataattcaggggcctgaacctgtataaaaatccctgtctccatctcttttacctcaatctcgtatataccctggtaccgacgatccccataccatgcaaatatcagaatcgcgacatcaaacgtcgacacacgcttttttccttccgtacatgcggcagatttgttgcgtcgaaaaaataggaacgtttttcatagagcttgcttcgttgtgaaaaaatggaaaacgcgttgcaaaaaaaaggtaaatgcgtctgtgtagaggccagaaaacgagcgcgacttaacctctatgcgctaattaggattcgcgggagtatatatcaccaacttcacatccatgaataatttcagaaatccttatatttgaaatctttatatttttttatgggaacggacaaataccgtgcaaaaatggaacgttaggaaactaatcaccttttctaaaaaaaaaaggtaaaagaagaaaactaatcaccttaggaaacagttctggcaagtgggccctagctgccaggcgatgcaatgcacagctagtactactcgcgagtcaccatccatctcatctcgtcggcgagtgagcttccttcgcgcgggctgaggtgaaaaggtggagagggtttcccgcgtctcgcgacgagggtttaggcccagccaccgccgccgccgccgcggtgccagagccagctcgccgcgggcaacaggtatgcatgtccggcgcgcccctcccctcctcccccctgccccccattctctctctttccctctgcgtgtgcgcgtgctcgtgcttccttcgcgatggcggtcggatgcggaggcgttgcgaggggggaagcgcacgagacgttcacaggtttcctggactggttaccccgtcggcgaggagtgatttccccccattgagattaggttttttttttattttgacgcgtgcattttgaggcatggtgattggggggaaatattgcatccgatgcattttattggtgggagtgccaattttggtggcaaaatgaaaaatcaagtgatctatgggaggttgttgttgatctcctatattatttttagatattttttaggcgaccttctggtaggttttctttttctttttttaacaaaatctttcgttggtgtagagaggaacttggagcttcaatgggggaacctagtgttgcacggtatgtacattttcctgggattttctaatatcgagcaaaaaaggagcatttgcatactcaccttgtaaactgtttatgacatctttgtaacagttccaaagactgtgatatggagtatgatgatagttcttctagacaaagtggcgagcctttgtgggaacatgcggaaggtgtggaacgatctgtcgattattcagatggcttgccccctacaagcaagggtatgtttcagtcaaataaaagaaagagcaaagctgcagatgaggatcttcatatgaaacttcgaactcgattggatgctgaagttgctagaatgttctattcttcaggttaataccttaaacatgaaatcttcgtgttcatgttgtatggaatgccattgaacgcatgtttcaattttcaggattatccttaaaggccgcgacggacccattctttaagagcgcattctctcgtgccacctccatgcctggtttcacggctgaagaggatgagcatcaagatgaccagccttccctagttacacaaatgttcttttccataggttaacatctcaaacttgaaggtctttcagtttgtatgtatggattgtcctttagtatcattcatatttgcaggtttgtcccccactattacaaggaacccatattatcggggttcattcgctatggtcgcgttgttccagattcctggatatgttcctcctggggtcgaccagctgaagacaactctcttgcagaaagaaagggctgacattgaaaacatgctgcagaccataaaaaacacgtggaggaaagcaggtgtgacgattgtttctgatgggtggtcagattttaaaaggcgacctatcatcaatatcatagctgtcaatgaagctgggccagtttttttgcaagcaattaacaatgaagatgggtggatgtggatgatggatgactacattgcagagaagctcattgctgcaattgaagacgttggatcagaaaatgttgtccaagtgatcacagacaatgatcctttttgcagagctgctggggtgctgattgaacagaagtacagtcacatccaatggacgccaagtgttgctcattctttaagtcttgccttggagaatatttgtgctgctaagaatgccgaaaatgttgtcttcaaagactgccactggatttcagaagttataggggatgcaaaaatgataaatgattttataagtaatcattctatggtactatccatgatcagcgagttcagtaagctgaagatacttggcattgctcacacaagatttgcttcagatattgtcatgctaaagaggtttcggtttgactaagcaatctcttatagggattgtcatcagtgacaagtggtccgtttacagtaaagatgacgaggggaaagcaaagcttgtgatgaaaaaaacttactgatgaattgtggtgggatcaagttgattacattcttgctttcacagaaccgatatattcaatgatacgcatcacggacactgaaaagcaatgcattcatttgatctatggaatgtggaatgatatgacagagaaggtaaaggctattatttataaacatgaaggcaagggggctgatgaagaatcaactttttactctgctgtaaatggcatttagtagattggtggggcaagaccagaactccactccactgtttagcacatgcactaaatccaagatgagtcctggtttaagttactaaatgatttcttttttaagccatgtaatatcactatcttttggtctgttctgtaggtgttacgccgatagttggattgatgaaggcgctaatcgtcaacccccacatagtgatgctgagattaatgaaatggcaaatgactgcttgaagaaattatttcctgctgcagatgacttgacggcgattaaagcagagtatgcaaagttttctcttttgagcacggagtttgcttcctcaggtacaggatgctttaacttgaattccatcactgatagggatgttcttgacccaaaaacatggtgggtgacccatggcagtccaacacctaagttgcaggagctagccctcacgattcttggccatcctgcctcggcatcctgctgtgagagaaactggaccacatataaattgattcgcgcagccatgaagattgagagccgtcctaaatgggttgatgatttggtgtttgtccacaccagtttgcggctttggacaagaaccacagttttactatagtgatccagagtcaatgttttgggacattgggggtaacgccgatattcttgcaagcttagtccctgctgatttacttgagtttgctgacttctcactcgacgaacctgagttcgagcttgccattcttgaagggctggaaggtgatgatttggcatgaagatggaggtggattggtggaagactttctagaatcctagctcaatctgtgaatggcctgatgccacctttcctatcaggctgtcactcgggtctaccttgtcttttggggaaagtggtgtgttttggttatgtacttatgtggccactctggtagtatgcaaaactttgcagtatgcaatgctactacctccgtcccaaaatataaccacttttagctacgaatctggacacggttgtctagattcatagctaaaaatgcttacattttgagacggagggagtatatagtagtggtagtgatggactggtggtagactggaagtatgcatgcaaagctatgcaatggcaggtagtggtaatggtattatgcaaagctatgtgataagactttgctattatatatgcaaatctgtggaaactggacggtttgctttttatgctcgtgtcattgtgtggaggtcattttgagtgcattcttcacctcttccaaaacatgtttggattcacctgaccggtgtatagatgtggtagggtgctggtctttatgttctttattttggtttttgcgtggtccatgtgtgcattttggagtacgtgaaatgtgacacggtgtggattgaacagccaggggctgttcgagggacgagtggatccttttctcccttgcatccattcttgctggtggtgttcgaatctttctctcgctccatttacctttgcatccatttttgtttgtagtgtttaaaattctagttcttatttttcagttgtttggaggcattggttggtggtttggtgacggcttcgttgtaggcctggtggcatatggtctcgtatatcggtggtcagtgcagtgtgttagcccattggtgtaagagtcatcgacatgtggtggtgaatttgcttttctttttctaattatagccttcagggtgtgtagcattgtattttttttcctgatatatctatatgaaacatctccctgattggtggtgtttgtttgaaaagaaagtttatgtggtgctatggtagcatgtagcatcacgtttatgtctatggtggtaaaattaacatgcaaatctatgtgagtactttggtttggttataaggagtaccaataacacatttgatagttttgaggggacgaaaaactcagtataactataaattcattacgtgtttgaaggtgtgtgctcaataactatggtgtagtactactactacactataattaagtacacggttgatttttttttcaatctttgtttgcacgaactcaaagcggattcaatgatccagaaatcaagagtttttcctctaaaaactgtcacgagttttttttaaggaattccgcgtgcaatgcattttgggcttgtttactttgatgctattttcaaccatatcatttttaagtaaagttgctaaaaaaatgtctacatttagtttgttgccaaatttaatcaatatataagaaatcctattaaaattttaataatattatcatcttactaaaattaacgcttgggtagccctcactcccgtggatttgccaccgtttaaccgcgccctctttgaacgcgggagcttggactttgacccggtcagctaatcctagcaccaagcaaaaacgacgacttggtcagctggtcctcgtaatgtgaagttgtgaaccgccccacccaaatttcccccaaatcgacgacgacgacgcccccaattgctcgtcggcacaagcaacaaccgccgccgcgccaagctaaccctagcccacgagatgcccgcgcccgcgcccgcggcgccgtggcccgtgtcgcaggagatctcgtccctggccgaccgcctcctcgcccacgccggcggcgacggcgacggcgccgcggggatgcgggacctcgcgggcgcgctcctccggatccagcccgtcgcgcgcggggtcgagcggcgcggggacgcggggcagcgcgacctcgcggactggctcctccagctcaagggcgccgtcgccgaggccgacgacctcctcgacgagctcctcctccgccgccgccacgggagccggctcagcccttcgttagcgtcctgcttagctcgcggcaagccgccctcccgggagctcaagcgactggtgggcaggatcgaccgcatccacgacgtctccgagcgtctcgttgacgccgcggcggaagaagaagccggcgaggcgggtcgcggcgtgaggtcgccgaaccgcgtgaccggctccgtgctcacggagaggaaggtgtttgggcgtgagaaagagtgtggcgaggtaatcagcaggctggtggattgtccggagaatgcatgctcttctgctcttccggttgttgcaatcgtcggacatggtggaatggggaagacaaccgttgcgcagttcgtttacaacgatgagaggattgaacagaaatttgatatcaaagcctgggtctgtgtctgggatagatctgatgccgcagagctaacaagggagatattgcagtccattggtggtccggatgatacgctgtacggtgataattctgccaaattggatattctgcaggcaaaacttgaagtattggtcaggtcaaagaggtttctactagttcttgatgatgtttggaatgatgaggctaagatggagctggagaataaggatctgtggagaaaggtgctggcacctcttaggtctgccgggagaggcagcaagatcttggtgaccactcgaatgaaactagtagcgcggtatctcaattcgactcatgttgtctcccttgatgtgttgggaagcagcgactgctggttgttgttaaaggaggctgctctgggtggagaaagcaaggatattcctcctgatttgcaagagattggaagaaccattgctgcaaaggcaaagggctcccctttagtttccaaggctcttggacagatgcttagaaacaccacgagtacatggaggtggagagcacttttggatgcagaaattagtcataacatcattatatcgtctct

SEQ ID NO: 27628 - DNA, 3440 bp, Oryza sativa
tgttcacgattgcatgaaaattgatgaaggcatgcttagtgtgattccaccaacagtgcgccacttgtctgtctcaactgattattttccacagctcaagagtaagtgtaagttggaaaggctacggacattattagttcttagaagctcttcgttgtcattgagtcatcttcctagtaaatttctatctgaatttaagaacttgcgtgttcttgatcttagtgagtcagatattttagaattaccagaaaccattagccagttgtttcatcttcattacctagctttatgccacatgactagcaaacttcccaaatgtatatacaagcttgtacagagtggtgtcctggatatgcctatactgctatttcttgatagtcatcctagaggtatgagcaaatttgtcacacagaaaacatcttgaaacttgttgcaacaccaacaaggggtagtcagactgtatcaaggcctaattttgcttccaataaaagcagattattcctaaagaatatcaacaagggggtgtggttggtctatgaaggctgtgcataatgaagggagttgccatttcgtaggtacaagagatctggtggactcaaatctgtcagagactttcagtgtgtgtgcactaatttgttgtctgatcaacggaacaactaaccatgagatagtattctaatttggtggatcaagtctttccagaatgtgataaagcaaggatctggttgcacacatccttcaaaaggttgaagtatttcctgttggtgttttgtaccaatgttctccaggtcaattggcagtatttcaagccttgtatcactggagtagctacccactttgcttatatttggtattctgacaagatctgtacagtcttctctttctattttcattttcacattttgtaagctgttgtactttttatttcactcgggttgtccactactgatctttttctttcaaggaaagaagaaaaagaatgatgatttgagactacatttttgttgcatgttgctgtaatggattgtgcactccattttatgatggtgtgcattggatttcagtacctcattagtctcaatagacgatataccgtaagttctgatagatgggggaaacaggtacaagcaaagtgaaacttggaagcataaaccacatttgctatctctgtgcgtctttctgtataattcctgagtaaatcatgtaggtaacaaaattgaaatgcttatatgcagggaagataaattaattgtgatttagtttcatagaaattcagcttgtgatttaatctcttgattttgctggggccatgggaaggaaagcaagtagaagtaggccttggggggttgggttttgggagtggcggcgcaacttcggggaataggattggtactctctcatttctaagttgatcattatataatcgcatggacatagatttcatcagaatataattaatgcaacataggagaatatgtgcatgctaagtatttcatcagaatataattaatgcagcataggagaatataattaatacagcataggagaatatgtgcatgctaaggtgtaattggcatggtgttttaatcaatgcatgcattgtggaagaatgtgtgcatggtgtcttgattgatgtgatttaaattatccttggttttggtgcataaacttatatgatgatcaatttagaaatgatgaagtattatatagtggaatatgatgatcaatttgggaagtagggagtattacatagtggaattaacggtgaggttagcattgaaatttgatttttatccctaattcccctttttgttacaagttaccagaattattagagtttacattagagacttgactacttgagcccttgtttggagggagcatgggattttgagtagctagctggagaggatagggaatagttaggtttctagcttataacttctaatttattttccgaattctacagctatgattcttgaaatctgcgtggaaatttatactttttgaggagctatagattttgaaagaagctacatctacttaaaaactcctccaaacgatacctaaatcttatgcaaaaatggaattgtgggatttgtctaaacaacatgaaaaaattcccttccaactcccacacccacaccatttattaacctcaaattcatcatatccatgatccatatcaacaaaaatcccataacccctaatcaaaggaagcagttaatagcctttcctctatgaacatttaattcctccttaaaaacttccccaaacctaaggcaaccaaaagtggccgacggctgccaatcacagtttatgcataagtttgtcatagctcatctgtacgagtagtatttctgttcaaccaatttgaagacggaaagatatagtttctcacggtagaccgatattacaattgttcacagctcagtaaactgaagcaagacagtatttgaacatgcgcaggtgaagtgcaccggctaacgtaggaaaaaaaacgaaacatatttcaggaaatgtgaccagttcactacaaatgcagcacatacatttacagacagtacacaattgttccagccagaaaaatctgttggggttcgtctggtatcgttcatcttgcgtgccggaaattttgacacaattggccagtatcactacaatgaaacagagatacatctcattgattgttaaaacttacaagtacagtgaaatgtgcatatgctaatggtatcaaacacacctgcaaaattagcctctgaagtctgaaccctgatcagtggatcagtttcattgggatcgaagctattttatcccattctggtccatccttattttgtagttggctcagcaacgttggcttgcaaccaatcagatgaacaacctgcagtgaagatgggaagccacttggcaaggactccaatccagtgcagttcattatgctcagttttctcagagaggttaagctgttgaagttggcagggaaagattctacggtgaccctggagcaattttcaatcaacactgtttcaagtgtggcaaaactaggcaatgaatgcagagaagacaattgggggcactgccgaatgtttagctcatgaaacttcgtcaagttgctcgggttctcaatctgtggaagagtggttattttactgcagtggactatatccagtaaggtcagcgattgtaaaccttgtaaacaagtacccaactcctcgtcagtcatctctaaataagatatttgcagcctcttgagggaagtaagtgcatgaagctcttcaaactttacatcttggcagtgcctcaaggtcaaatcaacaatttcctgcacttgttgctggtggaacaaaccattggtaaggacagcggcagaacatgtttccaatttaactttgttggcttttgatgatgaaaaagaagatagtttcaggtgtgacaca

SEQ ID NO: 27629 - DNA, 5465 bp, Oryza sativa
cagcccaaccaacatggtgaggtattaccgtgatatctcctaatatgaatctcttcaacatctggatgtggtttaaggccttctaagacctcagcatcgacagaagggacacttttgccaggggagttccattccaattccagcacctttatgctctgtttcttgcttaatccagctttgctggcctcttctttgcttgctacaacatcaaggttcttgatatggagctttcttcggagatcattcatatcgttcaagtcttctaatgtatgacccttttcctttttaacatggaactcaattgatccctggagatggatcatttttccaattccgacaattttcgatgtgtttgtcctgtttatatccaaatggcggagatatttcaacttccacatgtcttttggaaactcctcaagctgacacctcttagggatatatagggtctcaagaaggaaaagttttgtcactgattttggaagctttgtaatcgtcttgcaaagagaaaggtacctcagatgtatcaactggccaactttatctgataattcaaccatatcacagccatccaaaccaagcacacggagacctttcaattccttgaggacatcatctggcaatggaacaacggaagatgaggaatgcttgagaataatgaatgtgcgcaacctcttgagctcggcccgacctttgagctgcatcaccgcatcactggtcacagataagtgacggacagtatcaggtatgcgtatgtcttttttctcaaactctacactttcaactcttgcgcagtcaattcgagagacattgtcggccaggtcatgcatcaggtcgtggatgtagtagtaagttcggcggccttccttgcgctcatggaagaatgattgtgccacaagttgattaaagtactccttccctacatcctcctccaattgattcttcgtatcatctggcctgaactggataaaacccagggccatccaaatcttaatcaacttgtcacgattgaacctccagttctttgggaatatgctgcatatcgcaaagcatggttggatgtgctcctgcaggttctgataacacagctccagtgtggagctaacattgtcatatatttccatcttcaagatcctcttccactcagtcaaacttggtttccgctttagcatgccaccgacaaccttggcagccaatggcaaccccttgagcttcacagcaatctgctccccaatttccttcaattccgggtgcctgtcaacatcattgttgtcgaaggcaaacttcttgaacaacaaccaaacatcagcgaactccagcccattcagccaaacaaacttgctcgcattcagcaagtctgccacaatcctcttcctggtggtaaccacgatcttactcccagctcggccaaatctgaggggagctaacacatcagcccacatatccctgtacgagttctcattctcatctttattccagacattgtcaagaatcagcaagaaccggcgcgacgagacggcctccttcagccgccgctgcagccgatcgaagctattcgtgtcgtcggggagttccgcggactgcaggatttgcttcgcgagatcgagcttgctgtaattgcctgcgggacacacccacatgatcagatcgaaggcctccttcacctcatgatcatggcacaggacgcgtgcgagcgtcgtcttcccaatgcctccgagccccaagatagcggcgacggggatggtgtcatcggcggcggcgctccgatcctcgccttcggcttcgggcgtgctgccgattagccaagacaccaattgctcacgctccttgtcgcgcccaaacacctcaccatcctccagaatcgagccggtgaccggaccatccgaggttaggagcgtgctgctcggctcgccggaacctggcttggtcagccccgccgcctgcatcagccggccggagttcgcgcggatgctgctcagtttctccacgacggccttgagcctattgaccgactcgtccttgccaacgagctgcttgccgatcttgccaatggaagaagaccctagtaggctgaccttgccgtcgttgggggcgagcctccggtaggcgaactcgtcgaggacgtcgtcggcctcgtacaccacctccttgagctggcgcagccagcgtacgagctcacagttgcctctcccgccgccgccgccgccgaggcagcgctcgacgcagcccgcctcggcgcggagctgattgagctcatcctccagctgcttgagcgcgtcggggacgccgccgttgagccacctgaacctgtcggaggcgcaggacctggccttgtcgaccactatcctgatgaccgggcacaccagccagccgaccaccgccgcctcccccatctggtcagtcggccgggccgccgtcggagagcgaagcaaaccgcgggggagattgcggacgaacagtggtggactggtggtggtggcgagtcttccttcaagtcaccggctatggcagagagagagagaggaggggtttgggtgggtggtcgggctgaggagaaaaccatttttggggcgtataccctcgccatttcggggcgccttccccttccggcgaccgggcggagaggggcgttgactctgaccggttcacgccgctgggcgctggcgccgcgcgggcgtagggtctctcccgcgactcgcctcccgttccggccacgtctgctcacccgccgctgctggtgtggcgccgcgccgcccaccgggccacggtccgccacagagctcgccatcggcggcaggggcggagtaggtgatttgggccgtgccgtgccggcccaccatgctggggcggtggcccaagcacggcgtgccgtgccgagcccggtctggcacggaaggcgcgggccatttgtccacctataggctggaggaataagttcacttttggtccctctatttgttgcccagtcccattttcgtcccttgaccataaaactgggtatgacccgtcctccaacttacgaaaaccgggtaaatgtggtcactctatggttttgaaggcagttttcgctgacgtggcgcctacgtggcttgtttgactaggtcttcgtcccacgtgacattgacgtggcacttacgtgacaattacatctcgaaaaaataataaaaagtgtggccccacatgtcagctgcacacacaaaaaaattaaaataatggggcccatgtgggccctacatgttaccctcactcctctcttcttccctctcccttctctctcttcttccctttcccctctctctctccttcccgggcagcggatggcgcgggtgggcggtggagcaagcgagctctgacggcagcggtgggcgtggtcggcgtcgcgccttgacggagcgcccccggtccgcgtgaaggtgagcagtgcggtggcgccctggaagatggcgatgaggatggcgaggagaggggaagccgaggggggaaacgagcgacgaggaggaggacttccttgtcgggtccgcccgggacgccgccgccttcttctctagcgcagtgctcactgctggggagccccccctcccagaatccgccgccatccgtgtcgccgccgccgaccacccggacgccgacctctaggcgccgctccctcctctcccgccgccacgcgccgctccctcttttcctgccggcggccatcagggagaagggcggcggacggctaggtgagcagcgaaagagagagatggccgccgccgccccacaagcctcgcgcgtcgtcgcctgccgccggccatgcgctgtccgttgccacgccgcccgctgccggcgcgctgtccgccgccgctcgccgctggacaccgcccgacgagaggagggagcagagagatggggagagccggagagaggaggaagaagaggattggatttggtcatttgagaatgacatatggggcccacgtgggccccaccatatttatttttttatgtagctgacatgtgggacccaccattttaaaaatttttcctgtggctgatatgtgggcccacaatttttattattttttcgatatataattaccacgtcagcgccacatcaatgccacgtgggacagaaaactaatcaaacaagccatgtatgcgccacgtcagccaaaaccaccttcaaaaccaccgagggacctcgtttgcttggttttcggaagttgggggacgggttgtacccggttttgcggtcaagggacgaaaatcggactaggcgacaaatagagggacccaaagtgaacttattcctaggctggaagttgggtggtgatgggtcagggtccatgggctctttcacaacccacctcaacccttaagagcccctttaaatctgatgaatgtaaaaatggagtatgaaaaacacgggattctaataagaatgtaagtgcaaaacagatgattgtaaaagggaaatttccaagaggttagagctattgctaaatttcttacaaaatctctataggattgtccattccatagggatttcaaaggatcacataggattcaatcctttgttcaaaggccttaataggaaatttttctataggattgaaattctccgaaattcctatgtttatcctccgaatcaaaggggcccaaatattttcagcacaaaaactacttataattttcagttcaaccattcttagatccaaccgtcacattgtgtaggtcaaaaagttagacccattaccaccgttgcgcaaaggtagaaaggagtgggccatgacccatgtatgtggaggaggcgtaggagtggcagaaggaaaaagtccattttggcccgtcaccgtcaactattgatcgaatctgattggtaatcactcaaccataaaaccagagatatcgtatcccaacagcttgtttggtaactcgagggaaggggattaggagtttacacgagggaatttatgatgagattaatatgggaatttgatttttaatcccaatatcttgtttggtaggggtgatagaaattgatagggagtttaattggagattaggtcattaataaaaacggatggctgagatttgtttagacaaagtaaaggaggaattccctcccaattacctgcccctacctaggtattgaaaaggtgggagttcctttctcaattccccatccccatcccaccaaaattcccatgtctcccaaccaaacaaaacatttaatagcctcattcctctaaacttccaatccctcctgaaaactccctccaaccaaacgggccacaagtgttaaaaccagggcccaaaatgactcccttgattttagggttgttttagatgacctgttgtaaagttatgatcaagatgatgagtttaggtcaagagttgttgcttgaattcatcgaaagtggtgacaacaaaatgtgacggcaataaaaaggagaatggagtaaacaattctgaaggattggaatctg

SEQ ID NO: 27630 - DNA, 1424 bp, Oryza sativa
ttattccttgtcccaggaggcaaggtacaccaaaagttgatacatttcagagtttatcaattctggtcaattctggtcaattctggtcgtgacaggccataggcacggcggagcggcggccgagagaggggaagggaagggggaaaagaagcggcggtccacggctcaccctaggtcgacggcgacgacgaaaaacgcggccggagcggaggaaggtggcggcgcggttcgggtcgacggggtcgacggcgttccggcggtcggcgagcgaaacggaggggtggacgaggtcggcgaggatgcggcgaagccgaaggaggcggcgccgaggtgggaggtggtccggggcgacgacggcggcggaccggagctcgacggcgacggcggagagagagcgacggcgcgagctctattccggcgaggaggaagggcggcgagaggcggaaacggacagaggaggtgcggggagggtttaaatagggttggaagggggagagagcggccggcggggaaggaataggcgcgggaggtctggccgccatcaatggcgccggcgatatttgcgggggcaaatccgcccgtttgaacgcgagagagagaaggaaaaatgggggaaaagggagaggggatcacggggagtgatttccccctctttattgcacgtggagacggcgggaggcggcgggattcgcggcggcggcggcgctagggcgcgggcgaggcggcgggagcggcgggaggaaggggatgacgggtgggccccacccgtcagcgagggtggcgggcgggcccgcccgtcagcggcgcgcgcgtggggagaggccggatgggccgcggggagaggagagggagggggaggtagatgggccgagccggcccaagagagagagggagggaaaagggactttttagagcttttctttttataaaaccattttaactttgtttatttcttaataattattatttgtgctctgaaaattccactaaaatttatttacgcattttaggcttttaggaaatatacaaaaatcctccaagccttatttgacttttaactttgcacattttaattgttggaggctttcacacggattttaattattctaggcataatttagaggatgtattttagagtcgttttgggacgtgacatggccgccgccggcgaccataggggcgcgggcgccgcctctcgctggctgcgccggcttggccgccctcgggcgcgccgagtggctgacgcgtgggacccacggcgccggtcggtgtgagcccgggtgcacccggtccaccgtggaccgtgaggctgccgcgtgggccccactcccgtggacccggtccgcgcgccccctcccctcggctgacgcaataagcccttttaaaattaaaatttaaatgaagaaattcgcaaatattcattt

SEQ ID NO: 27631 - DNA, 15325 bp, Oryza sativa
cggtgagccgtggaccgccgcttcggtttccccctttccctcccctctctcggccgccgctccgccgtgcctatggccgccgccggcgaccataggggcgcgggcgcgccgcctcccgccgttgcgccggcgtgcccgccttcgggcgcaccgagcggctgccgcgtggggcccggctgtcagccgcccgcaccctcgggtgcggctgacgcgtgggacccacggcgccgtccggtgtgagcccgggtgcgcccggtccaccgtggaccgtgaggctgccgcgtgggccccactcccgtggacccggtccgcgcgcccctcccctcggctgacgcaataagccctttttaaattaaaatttaaatgaagaaattcgcaaatattcatttaaagagcatataaacttcaaatggtcataacttggccatttgaactcggaattggaccgttcaagtctctaatttttccttaagaagtcaagaacccatttttgtgctttgttcctgcttgttatatggagtttagaagagtaaaagccttttcttttttttcgttggtcgtgtagacgccgcagcttcggaagatccgctcttcgtggaacttgaagccgacgtttgggaaagcgagcaaggcaagtcacatcatccttgaacatattgaatcccagtttataaaattattttgatttaaattattgcattatcgctttatttaaattcccgcgttatcactgttttatctagccatgcctatttacctttattatgaccttattattgttattgttattatttccttgttccccctagaataaacaaaaccccaactagtggacactctactcatggtactactagtatgattttaggtagatgcttcgctggttaattaggcaacattaggtggttttacaactctagactttgggaatattctcatcacctggacactttggaatggatggattattgtggaattggattcacacctccccctctattcaaaatcctcaaaatggttttaggctgggctcgaggtgcatggttttgatagtagcacctcggccatataaggaccggtcttcgggcctctgttgcaaagcactaccgtacttccacatgtctagtgggtaaggcttagtttgtggctcagtctggttataaacaaaagtacacggatggagatagacgaagtcgggggtcgatggacatctctagggcaaatgaaggctacacgagctgcggcccggtagtcgagatgtcatggcacagggccggtgtcctgctgctaggggctcagtcctgcctacctgtcccgggggttccggccgtaggtggggttgggtcggtactcttgtctatggctaggatgggttggaaactatgtcacgtcttccgtccgtataccgtggtggtatgtggcacgtggttacacgtgaggaagatgtgtcttgtgggtaaagatgtacacctctgatcagagtataatctattcgaatagccgcgccctcggttatgggcaagccgagcaatgtacccaagttagtgttttaattcttaaaacctgcttaacaactaaaatgtggaatggttggcctgggttggcttgggacgagctgggacccagggtcgggttgccagttcggtctgaatcatcgtaggccttgggattaaggcaggttcgtgtgggttcacggccttgattaataatattgtatagctctggaatcgtgtttacaaaatagctttgagcaactaagtgtcttttaatgctgtttactgcaaaccctaaccctttatattataacccccttgtactcccttgcatttatcctgcacttgtgggtgtgtcttgttgagtacggtggttgtactcagtcttgctcaattttttcccaaacccagaagaggagcccctggaagatgaaggctttggtgtctagctcgtgcctgccgtcaagcgcctgtggtcgtcgctctagtcttccgctgtttcccgtttgtctttgtgtgtgctgggccttcgccgcccatgtaataaattaactatttacgcttccgcttgataaactctgaaatatatcaacttttggtgtaccttgcctcctgggacaaggaataatacacgcacgtaaggaacgcccgttgggttaattccggtcgtgacagaacgcgttagcaaactatttgccgacggcgttgaaaggttctgcgcgttcgtggctgatgcacctcccgccctactcgatttcttcatgggcagatctgtggcagcaattcatcaccaacttccaaggaacttacaagcgccacgcgatcgaagacgatctacacgcgttaacacagaatccgggcgaatctttgagggactatgtttggcgctttaatgagtacagaaatacaatccccgaaatcaccgacgcctctgtgatgcgctttgaaaaccggtgtcagagatcgctatactacccaggagttggcaacaaggcgaatcacaactactcgaagattgttcgaggtcgtcgatcgatgcgctcacgcagacgatgcactgagacgcaagaatgacaagctgaagacagggggagagaagaaaccaaccaatgacgcacctgaaccaagcaagaagaaaagtggcaatagtgggaaaaggaaagctcaagcggaagtccttgcgtcggaatacgagcgccctcccaaacacccagacccacaaggcagcgacacgaagagaatatggtgccccatacacaagtcgaacatacattctctagaggattgcctcatcttcaaaaagtcgctggaaaagcaactggcattggagaagggcaagtgagtacgtgtagtcgagaaggccgctgaagcaaccactcaggactcggactcggcgtacccagattccgatcttcatgtctcgcacatcttcggaggttccacggcgtactcctcaaagcgagaatagaagaaagtggagcgtgtgaaagtgcattaatccccctagtgggttttggtgattaatgacaaatgtggttaagggactaatgagttcattgagtgactttcaggtgcattagtccaaggtgtggaagatggatgcttggagacccccaaaaggtacaaaatcaaagcggaccggaactcgagaagtgcataggatagtttatcttttgaaattgagtttttaggaaaaaccgtactattaagaggggttccaggtgatgctctgagatatatcaagtgctcttagtgtgaactaagtgtcaagtttccctaggagtcatttttgcaaatactccatctgtccaaaaatgcaagtccggaacttcctgtcttccgggtccggaagttccggtcttgtgaaaaagattttcctaagtgtagttcggaagttccggtcttccaggtccggaacttcctgtctagtttccagttcaaatttgtgagtaacggctagatgacgtcacctagccgttatacatatacagctagtttccagctcattccttggccattccactttcacttttcacctagagctattgctagcctctcccaagtttttcttgccttctccactcaatcaagagcctaattcttgtgagaaagagagattgagagggagagaagaagatttggagatgtgtgaagactaggatcttgggtgagcacttggaatatctcgtgggatatcatctcggtgcttattactcttggagatgatctcctagacggttaggtgtcgcccgcgagaatccgttgcatattgtggatgtcccgggtaagtttgtgaaggatttcctctcctccgaaagggaacaaggtaagttagtgaagttcttgtgctgagattttagaggctttccaagtagagaaatccacacttgtggtggatttctagaagtaggttgagttggatcttggtggtcactcaattctagaaatttgcctaggggtgtttggtgttgaaggctgtggattttctctggggtttttgcacaagtgacgcaaggggttaatcgagacccagctctttggagctcctcaacggagagtaggatcgcaagattcgaacttcgggaaaaaaatcgctcttgtctctttctgtgatgcttctgtggatgattctgtgatatatcctctgcttagaatacctgtgcaccatcttgtgaagattggcttagtctcttgtttcgaaatttgaatttcatctctgttctgttacccggaagttcctgtcttagaacaccgtaagtttcgggcctgggaggccggaagttccggagttccttaccaggaagttctgggtttgtttgaattttatcgctgcgatttgtttttaagctttcagggacagcctattcacccccctctaggcttcatcagcacgttcagcgtgaagtttgttcgacatggcagggggctgcacccaagatgaagtggtctgaacagaagatcgagttttcagatgaggaccaccccaaggctgctgttatcccaggacgatatccgatcgtggtcgaacccactattcggaatatcaaggtagcgcgagttctcgttgatagaggcagctccatcaatcttctcttcgccagcaccttggacgcaatggggattccacgaagcgagttgacacctactgatcaacccttccacggaatcactcctcagtcatcgtccaagccattgggcaagatcacgcttcctgtgactttcggcagagcgagcaacttccgaacagagcagatcacgtttgatgttgctgagtttgacacagcatacaatgccatcatcgggagaactgcactcgcgaagttcatggccgcatctcactacgcgtatcaagtgctcaagatgcccgggccgaagggaacaatcactattcaagggaatgcaaagctggcggtccaatgcgacaagcggagcctcgacatggtcgagcacactcccagcccacccgccacagccgagccacccaagaaagtgagcaaaacaaccaagacgctgaaaccagacggtgcaatcaaaatcgttctactcttcagtgccaaccccgtcaagacagtcaagatcggggcatcactgaacgagaaataggaactcgcgctcatcaccttcctccacgacaatgctgacgtattcgcttggcagccgtccgacatgccgggggtccccagggaggtgattgagcataaactcatggtgcgacccgatgccaagccagtaaaacaaaaactgtggagatttgcaccagatcggaaacaggccatacgagaagagctcgacaaacttctcaaagctggtttcatcagagaggtactccatccagagtggctagccaatccagtcatggtgcggaaggccaacgggaggtggaggatgtgcctcaacaaggcgtgccccaaggatcacttccctctccctcgaatagaccaactggtggactcaacagctggttgcgagttgttaaacttccttgacgcttactccggctaccaccaaatcagcatggcaaaagaggacgaggagaagacagcattcatcacgccgttcagtgtattctgctacgttaagatgccgtttggactgataaccgcaagaaacacttttcagcgcatggtccaaggggcacttaacgatcagcttggaaacaatgtcgaggcctacgtcgatgatattgttgtcaagaccaagacaggcaactcattgattgacgatctatgggaaaccttcgacaacctccgacgatatcgcctcatgctcaatcctgagaagtgcacgttcagagtaccatcgggcaagctgctcgggttcctcgtctctggcagaggaatagaagcaaaccccgagaagatcaaggcaatcgagaacatgaagtcgcccacaagactcaaggaagtacagaagctaaccggatgcatggcggcactaagcaggttcgtcgctaggatgggagaacgaggacagcctttcctcgctctactgaaataataagacaaatatgtatggacacaggaagcagaagaggcgtttatcgcactcaagcgcaacctgtcaaatccccctgtacttgtttctccccaacctaatgaagaattattcctctatattgccgccacgccctattctgtgagtactgtcattgttgtcgagagagaaaaggtgcaaagaccagtctactacgtcagcgaagctctccacgacgcgaagacaagatacctacagatccaaaaactgctctatgcagtaatcatgacatcaagaaagctacgccactacttccaagcccacagggtcacggttgtctcctccttccctcttggtgaagtcgtgagaaacaaagacattgtcggccgcattgcgaaatgggtagtcgagctaagccagtttgatgtccactttttaccacgaacagccatcaagtcccaggttcttgccgacttcgtagccgattggaatatgcctgaaaacaggttagatagtcaaaccgacaacaaaacatggacaatggcgttcgatggcgtactcaacagccaaggagcaggtgcggggttcatcttgacatcaccttcgggagatcagttcaagcatgcaattcaccttaacttcagggcaaccaacaacacagccgagtacgaaggactactagctgggataagagctgcagctgcacttggagtcaagcgactgatcgtaaaaggggattccgaactagtcgcaaaccaggtgcacaaagactacaagtgctcttgccccgagttgtccaagtatctcgcagaagtcaggaagctggaaaaaagatttgatgggatcgaggtccgacacgtatatcacaaggacaacatcaagccggatgatctagtacggcgtgcgtccagatgagagccactcgaacccggcacctttctggacatcctgacaaagccatcagtgaaaaaagcaaacgacgaagatagcccaatcggccccgacatcagctcgggggctacagaggtagagcgtgccattgccaacatcgagaccacggacgactggtggaccccactcattaaattcataagcagtgacaagttgcccgaggatgatacagaagctgagaaaataacccgtcaagcaaaaatctactgtatgatcggcgacgatctatacaagaaggcgccaaatggggtacttctcaattgcgtctcgtccgacgacggccgacatttccttctcgacatacatgaaaggatatgcgagtcacacgccgccggccaaacattggtcagaaaagcttttcgacaagggtttttctggccaacctccctcaaagacgtttgcgacatggttcagcggtgtaaagcctgtcaatttcacagtaaacacacaaagctaccagcgcaagcgctccagactatccctcttacttggctgttctcgtgctgggggcttgacatactcggaccattcccacgaggacagggcggctacaggttcctattcgtggcgatcgacaaattcactaagtggatcgaagtgacacccacgagggaaatcaaggccgaaaacgccatcaaattcatcaaagggatattctgcagatacggcttgcctcaccgcatcataacagacaatggctcccagttcattagtgccgacttccaggattactgcatcaggctgggagtcaggatctgcttcgcctcagtttctcaccctcagagcaatggacaggtcgagagagcaaacgacatagtactacaaggaatcaaaacccgtgtatacgacaggcttatgtcacatgacaagaaatgggtcgaataactcccatcggtactatgggccgtgcgcaccacaccgacaacgtccaacaaggagacacccttcttcctcatgtacggcttagaggccatgctccccaccgagctacgatatcagagtatacgagtacagaagtactccgacgaggatcaagatcaacagtgaaacgacgacgtgaacctactcgaggaacaccgagaacgagttgccgtcagggcagctagctaccaacaggcccttcgccggtatcacgagaagcgcatccaagcacatatactttcgatcggcgactacgtcctccagcgagttcaaagccaagcagggcgaaacaaactctcacccaaatgggaaggaccgtacacgatcacacaagtcttgcagccaggtgcattcaagattgcagatggcgatggtcgcgagttagcaaattcttggaacattgaccaattgcgcaaattctatgtataagtcaatagtatccatacttgtaagacatcttacaacttcaaaaaagcctattttcaggtacatatttcaatcaaagtgtcccttcccgatgatcccttacccagatgacacctagcgttgaaacctatcctcatgtccctttacgccgtcttgacaaggccgccgaggaacctaagggaacttcggctggggacgtccagagctgataaggccttgtcggattctgtagagacgaaagaccatgtaagacctagttgtgtaagagttctcgccgtgcgtattaatcaagccgtgtaatcggaaatggactttccaacttcacggctgggggctaggatcagtgcttgttcaactaaggcaggttaaaggtccaagagccttatcttccgagaagaattctccgatgataaggctgggggctagggagagtgtatgactcaagtgactgttcgaagtcgcgaagtgagaagacactcgtacacactccatcaagagtaagaaagcttagttagatagatttcttttctatttcacaagtatttcttataacccacaaaaaattcaaaatatattacactctaccctgagatacttgtcacaggatacggagtctaccaagaaggccaacgccagtccatcgactggaagactttctccgcaagcggcgccatcgacttcgccagctggtctatctccgcgggagttctccgagaacgtgcaaacccttcgtggaggaactcgaggtgcagctgcggacgatgatctcgtatacaggccagcacgtgccctcccgcatatcggctcgaccgacgacactcttgcttcaaggcctcatcgatatgcttgccgataccttcaagctgggcgtaggccccattcagccacgagatgtatccagccgcaaattccttgggatacccgcgaggtactcggagttccttgcaaactcccgccatggctgtacaacaactccggaggtacgagttgaaccacacctcgcgacctcgaagtgcttccacggcccgatccttcttcacttcttacatagtcccctcgagttctgccacctcaaacttcgtccttcagtattgcatgcgatgatctcggtcggcaagcacactctcgaggtctgctcagcatggaaacgactaagtcaagctgtccgcctctctcgagaacatggtaaactaagtcaatccaaataaaagagcgaagggggtggaaacaaaaaggaccaacctaaggaagtcatcgccatgcccgtttccacgggcagattctggtccacgacgtcctgtggcacatacggctcaagcgcaaagtgccggcacgagtacaggcaactcaggctgcccgcgctgctggacatcctcgacatcgacatctctacacacaatagcaaagtactcggaatcaaaatgctaaagaaaactaaggtgataactgcacacacaaaggcagttggaaccgacgaaagttttacagagcatgattgattaaagagtacatgcaaactgaagtcctactctttgaaaagtgggagaacagactctcccagatcaccgactttctccatcacgtccttacgcgcgttgttagtagccccctgatcttagatcctctggagatcgagttcagggtgtgccaaccatacgcacgcgaggacgtggcacatcccggtgtagatcctgttggacttctcctccccgatcctggccgcatgcctagagatcgcctccatcgccgtcgccagttccgcgagcgaagtcgtcagcgagaactcgtcggggttcgccgggatggtggtcgtaacaccacactcccccgcgagctggtgtaggccggtgtaggtgacccccagcgaaacacggatctccgacaggttgttctcgagttccgacatgcggttctcgagcccctaccgttgccgctcgttgccggccaccagctccctcattttctggaggtccttgcgaacctctgccaagtcacgtgccagcttgtcggcgcgttctttcgccgacgacgccgccaccgccctcgcctccgcaatctcgcgacctatgctgcgagcgccggcctcgaggatgcgccccatctcgacatggagctcctcccaggtgaggacgtcagcaggcggacctcgagcgggcacaagatcactggcaggactgctgggcgttacctcacggctcctgggcacgaccacgacatctgtcgaggccaccgcaggagacgcgctggagttccctccggacccatcttgcaccgccttcgcccgcgctgccctacgaaagattgccatgttggccatcaaaacaagctgccagaatttcgtccacttacttctcgccaagtatcaccagcctctgctgtcgcggaggcgggggagacacatccgaggcctaagtaaaccgagtacgatgtgaggacgacatcttccgactacgcaatcgataaccaaagaggcttaccgatggggtgggcgttttctggcggttgccgagcacggaggaaaacttcctccctttcctcggaacattgccgcaactggtcgtggcagcagcggcggcaatggccacgtcggacgcctcctgggcgacgccctctttcaacaaagccgcagcctggtggtccacgagcggcccaatgacgttagtcagagggagagcctgcaccacatgaagttaggatgcgatttaggaagaaaaagataaagggtcattgattacactcacgttgattgcagcttcgcgctcagccgcccctttctcacaaagaggggcggggacgttgctcgccgtcgtggggccgctgaccatcacctggccgacacggtgctccacggtctcgctgttcaaacctgtagatcgggaaccagattttgataagtcaggaggaatgtgcgcgtaagggagggaacccagaatgcaagaaaaatacctcgaggagatactcgggtctcgtcctccggcccagagtagtcaaaggcgggatgggctcgagcctggagcggctggatccgtctaccaatgaagtcggcagcgacttcataccccgacaaccctcgtactccgaggtcatcgatgatatcaataaaagactgaagggatggggtcaaggcgggtttggcggtccaagacggaatcttatctggttgttcctcagggacaacgaagactgcatccgaattctctatttgaagatagaaccacctcgcccgccatttactacgagaagaggggcactggaaggggatgtatcgcgacttcaggccatcccgaagtccgaaaccaacacacccggatacctttttaggttccatccagcgcaactcgtagtagaaacgaaagaggtcaagaaacggctctaccccaatgtaggcctcacagatgtgtgaaaaaatgctgaggaaggctatggaattggggttcagatggagcacagaaagaccgtagaaattcaagacgagaaggaaaaactcagaaggcggaggaagaaaaccacagagaatatagtcctcaaccgcaaccatgcggcccaagacgggttcaggttcagtacctcctggtttcctctccatggtcccgtaaccggggagagcgccttcctcctgcaacttcttcagggatgcgctggtggaagtggacttgtcgaggtccattgccgccggggatcggcggagaagagaccgagacgagtaagttagggttcgtgcggaagcgaaaaaaacgaagagcgtttggaggctagaaagttttcgcaacaagcggactccaaaatggattcacaaaactcccttaaataggcacactaccgacggtgcgaattccaaggaaaggagatagatggccgccggaaatttctgggtccgttacgcgcggcagttttggaacttcaatttaaattcactcataaccgttgaacttcgcatggtgttgtcgactattccttgtctctacggttcttacaccgagaacgaccagtcgagaacgacaacaactccaacatcagaagtcgcgatcggttacatgagttcatttaagcagaagtcgggggctactgtcagggttacggataaggcataccctctacccttggatatacgctatgcggcaatatggtatatctgcgcgtgtacggacgttctctgtatacgctaaggaaattcatcacgaagtccaccgatggaaagattcctacccgtataggactgggtcgtcactataccgtgcagggtccgatgtctccgagttctacttggaaaccacctggcttgcgatataaaagggacccccgggaggacctaaggcatcgaatctcatagccaagacaaccaccacagcctacgaagccggagcctacaggagccaagtcgccgggtgatctagtcgaaccaactcgactacgatctcgtcggtatcatcgagttctgttattccctttgtaacttgtggtttccactatataatcccataccaactggattagggctattacctatcaggggcctgaaccagtataatccctgtttcctgtttgcttgatgtcgtactacgtagatcctcatatcaacgtacctcaataccctctatatctggtttacgggtatccccgtcgacaatatgagagaagatataattatgatagccgcacacatcatgctagttattcttaaagtgacaaaacatttttttataaacgatgaaacaacgttcaaatttgaaacaaaaattaggcacccaatttataatcgttacccaatggactccctcctccctctcactctattggtgccaggtgccattagtttgattcaatatggctgtgttcgcgatcctacaagttcacatcttttattggcttgtttttcacgcgaataattcccaaactactatacgatgtgtttagctaatacttagaacatagtggacacatcttaataatataaatctgaacaaaccttctgtctgagatttctaataataggatatgtctcctctggtattgggttattattttgtgggacgtgaaactatgtggtaatgagtcgtttcattttacaagtataggtttttatgggccacagcccaaaggacttttgggccgtatgagtcacccgtctcggcacccgcatatatacggccagtgggtccaattgacgagccgttcaaacttccttttgtgatgcagccatttcgccgatcacgacgaacggcaaagtatatgtatatatatatatatttttttgagaaacacaatacaaacgcaggcgctcacaacgtgtgcacactcacccctatgaacgcacacacgcacaccctacccctatgagcacctccggaagactggaccggcatatccctacccctatgagcacctccggaatactgggccggcctatgagcacctccggaagactcaccccttatgagcacctccggaatactgggccgacctatgagcacctccggaagactcactcctatgaacgcacacacgcacaccctacccctatgagcacctccggaagactgggccaggcgcctcgctgtcgatgggtacgtcgcctaccactgaaagaataattagccgtaaatgcgagcacccgtatcaaatctaggatttaaacccgggtgggctgtttccaccacaagaaacctagccagttgagctatgctcacttcacgaacggcaaagtatataattcttcagttccaaaaaaatttcttcatgtttcgtttgctcccggtcctggatgcctcaagcagtcgtagattatcagactatatagaacggccggccaaggaagttaatattaagttgggatcgattggacggcatactaattaataccgaaattctatccaaaactgttagtctcatattttcgcttatacttatacttatgagaaaaaatttaaattttcaatcttaaatttgtagtcgattttgagtttttcatcgaagtttattttttagcatttgcctttagatcactaagaacatttatataaaagttttatagcaaattatttttgtttgtaaatatatatgttgaataagccaaaatacgtatgttttaatgtttaaattttgcgatgactgctagtactaactaccccatgctgctagtttatcacagctccatcgtagagtttttttttcttcagtgatcatgacaacccaactaagctagctagctaccagcagctgcatgaatactagttgagatttgataacagttatgtttaatttgtaatggttgccagctagccttactgcgggatttgctagttttatcatataatgaaatcaatgttttaaatgattagatgcaactctttgtatatacaaaatagatgataatacggcttcatatatagcttcttttattacaatacaattcatgttttattttttgaaacgccattgtgtattgttatgatatatgaaagttattttcatgcacaatctggtagtgtagcactactctacttcatcttaagcatgtttcaaaaatgagtttggattcatgatacctaattattgtatgttatccaattgtttataacaaaacaaagctcacatcttatgtaataattagagttgtatttagaaaaaaaatattagtattatctttgaggatttggatgtacagaatggataacaatgtcacgcatgattatgagctataaggaggtgaatggatgattagctagcttcttgatccaatggcttaaaattgttgatgatgtggcttcttacatgtcttgttttatatgagcaaatgcttcttagtgggtaccaactatataggaagataggagtgaacccaattaattaaacaacatgcagcgagccacattatttacaaaagagtggccattggattaccattacttctaatcacagccgtgggatcagctctatgtttaacgacagccataaatgtattaattgtagcttaacatacattgagaattttattaattgtcttgctttgatttaatgtttttttcctggtgttttagaaggatttctattgcttcgggata

SEQ ID NO: 27632 - DNA, 8472 bp, Oryza sativa
ggcccatctccattccgggtctctctctctctctccctctctctctttccctcgttatgccggcgcgtgccggaaccgcgcagagcgcctcctccctccagtcgctcccccctccccgcttttatcctggcgagcaccccgcccgcgaaatcggcccccgcgccccgttgttcgcgcgcgcgcgcccgcgtggtcgccgcccgtcccgcgcttgcgccgtttgagtcatccggccccgctgccttgccgcgcctgcagccgcgcagccgctcggccccgcgagccagcacgcgtgcccgagccgcgccgctcaaatcgccgcgccgcccgttgcttcccgcgcgcgcacgccgtggtggccgaccgcctggtcgctgccgccgtcagcgcttgccgcgcctgcccgcgcctgtcgcccgtgtcgccgcttcgctccacaccgcccccgccgtcatcgccgtcgtcatcgccctgcccccgccactccacgcgctcgctccatcgccgtcgtcacgcatgattatgagctataaggaggtgaatggatgattagctagcttcttgatccaatggcttaaaattgttgatgatgtggcttcttacatgtcttgttttatatgagcaaatgcttcttagtgggtaccaactatataggaagataggagtgaacccaattaattaaacaacatgcagcgagccacattatttacaaaagagtggccattggattaccattacttctaatcacagccgtgggatcagctctatgtttaacgacagccataaatgtattaattgtagcttaacatacattgagaattttattaattgtcttgctttgatttaatgtttttttcctggtgttttagaaggatttctattgcttcgggatattctgtagcgcccgttccgtcgtggcgcctagcgggaaaactatctcttaaaaaccctatttgcgaaagctgtttctttgcttgtggtctagtgtccgtgccatctcagatctcaaatccccgatctatcatcgaattcaatcccgaatccaaatccttccaaattaatccctccacaaaagtctatttcgcctcccccgggttcgatgggccgaatccctctcggcccatctcccttcccggctctctctctctctctccctctctctctctccctcgctctgcccgcgcgtgccggaaccgcgccgagcgcctcctccctcccgtcgctcccccctccccgcctctatcctggcgagcaccccgcccgcgaaatcggcccccgcgcgccgttgttcgcgcgcgcgcgcccgcgtggtcgccgcccgtgccgcgcttgcgccgtctgcgtcatccggccccgctgccctgccgcgcctgcagccgcgcagccgctcggccccgcgagccagcacgcgtgcccgagccgcgccgctcaaatcgccgcgccgcccgttgcttcccgcgcgcgcacgccgtggtggccgaccgcctggtcgctgccgccgtcagcgcctgccgcgcctgcccgcgcctgtcgcccgtgtcgccgcttcgctccacaccgcccccgccgtcatcgccgtcgtcatcgccctgcccccgccactccacgcgctagcctccaagggacggaggcagagctcctcctccctctgccgcgtcgcccccgctcccctcctccttttcccaaagaggcaaggggcaagccccctttctctccctccttttccccttttcctcccgccggcgtcatcctccctccgccctgtcgccgatttggccgctagccggagcgccagctcgctggcttgaccgtccaaagtcggttcccctctcccaaaccgacattgccatcctataaagcccaagcgccctccctctcttctcctctcgtttgtcccatcgcctccactccattgtcgccgcctcccgtgctctgttcgccgtcgccgtttgtcgtcgcgcgtgtcggaggagccggcacgagcgaggacgcagaaggggactccgggcgcgccctcttcttcctcttcctcggcccgaggccgaaacgatcacgtttcgcgtcgtcggctctcgtcactgcgcccgcccgcacggtagcgcatttccccgttctccctcttcgctccatctcctccccttagactcgggtagtagcatgagtagcctccccgtagctagccggcgccgccctgacggctgccgtcgttcgccgtgtgctcgccaccgtcgccgcccgagctcggaagcgccgctcgtcgccggcctcgctcgacgccgctccgcccaatccaacgctagcatcggattcccgtagccgcgtagatgctctcgccgccgggaatcggcccctcgtgacctcgtcaccgtttcccccttcttccgccgccggttgccgccgccacaatccgccgccgtcgagcatcccccggcaaatccaagccgttggctcgactcccctcgtcccgtgcaacttcccggtgtgctcgctttcgcctagatcgccgtgtttcgctccgccgctcgccaccgccgtccgccgtccgttccggccggcgtcttcttcaacctcccgccggcccgcgtggctgccacgtagccgccacgtcggcgccagctcggccaagaccgggtcgagccgaccccggtcagccactccctctggccccgctcgcgggcgcggtccaccgtgagccgtgaggctgcgcgtgggcccgccgcatccgcgtccaccgcgaaccacgcgcatgcaccgcgccccgctccacaccctagcgccgcgccgcgtgctccctccgcacggtgagccgagccgctaacaagcgggtcccaccccggaccacgcgagatggactcggtccaccggcgccctctctctcccctcctgcgccctattgggctgtgtcctcttgggccggccgacccatttagctcggccgagccgccccttttctctcgggccgcgccctagccgcccgagggaagtctacttcccctccctcttccttttcttttttccaaaagggtttaattaaatcctttttcctttagaccaaaaatccattaatcttagaaaattcaatatcttctcaaccgtaagtccgtttgactccgttcaacttccaaatttcctcaaatctcgagatctatctaatggcacgcttagggggtcattaatggggctttattttcgccgtttgttgagtcgtcccgttttgcgtgtagtttcggagcccgaagacccgcagtgcgaggatttcgaggatcaagctcaagatctcgagcaaggcaagccacctttgaacatcttgagcctatatttgaacttaattatgttgcttgaaaaatattatgcattgataggatcacacttaatctgcttgtcccgtctgcaaggcagattggcggacctacctaacttgttgcatctgatccttccattgttaattgttgtatcatgtccccttgtaaccatctagttgcgcctcgatattcgtgcactatgtactcctactctataataaagagacctctgttgctgtgatattctgtcttcctgtggtaccagcactgtattcctgggactggtatcgattaacaggttaatttggagcgtcacgggctagtctcgctcggggctagttcggggcgtgacatattcattctataatcaattcgatccccggccgggccaatccgcctgaaaaaaggttgtttgggtttacgtaaaggttgtttgaatttacgaaatgtttgcttggatttatgaaaagttttttttagatgtatacatgattttttttccaccgccctaaacaaaggacgggaagaagatagtgaacatatcctctaaattgatcatccgtaaaaattaggagtaaagtattgataccaatttttttagataatggaatgaaacatcccggcctttactccaaagagctatagccaattattacaaatagtaacacacttatataaagtcttaatccaaaataaaacgatcaaaccaaccaaaattaaaagaaagacctaacatgacaaggaaaacattattccagcctattagagaatctccatccatgattagcaaaagattgcataaccgttgactcaagagtacgacatgcaacattcaggaaaactccctcttcctcacacttttgtagttgaccccagagctgaagtcaatatgttgtcctgaaaattacctacacataggaaacagatggtgatttgtcaataaccctatcaaccaattatgaggaaagttttaataatgagtgtttgcagaacgccgccggttcattttgttttttcaacagaatcttcaggtgtatttggtttttaagagtgatgaaatctgtttcgtagtcataagaggttcacaggtcggctgtttggttttaaaaagaacaggggtatttggttttaaaagaacaggttctttatttttctttttttaaaatacagtacaaacacaggtaccctatcttaacgtgcggcaaccactgaaaatccatctggatcccatctctcaacgtgtggcaaccactgatccatctggatccattggtggtcgttcatcctgctgatcagttgagtcgccagaatgaaacaaaaatggtttgatgttttttagttagtggccggctgcggacactagttcatgcttgcataaattattatccttaatgcttccatgaccagctaatcctaactctctactttagggcacccacaatgattatctataggctctctacaagagatccatgtcagcatattttcctacttggaatgtattaaatgaagagagagagcaaaactatctactaacttagagatagtctatagagaaaaacgaggcaatgcatgagagagctatagataccaatgtagacatactattaaggtggtttactattaatcgagtctattgctgagatgtacatgttttatagatagcaccttactttaccattgcgggtactcttatataagcctcgcactgtcgcccatacagcgagttggttgtggcatgtgtaccttcacttcagagggagcttgaaggaggcacactttgaaccttgagcctagaggtatgcaatgttgttaatactcttttttttaccacagggaagtgtgttatcctatcttagtataaagttatcccccactaactccttaaacttaacatgtaaagatgtcacatcatcatccactaacaagatgccacatcatcatccactaacaagatgctacatcatcatccactaatccactaattaacaagatgtcacatcatcattcactaacaaccatcacatttaaacatcatacaaacatgctatatctctatagtttttataatttaagaacttttcaaatacaaacatgttaaattatcatccaacataattcacataacgtttcaatgtatatttttattatgttttatgatatcctatatacttatatatttcatccttacttagtgcttaaatggttaatctatggtccaaattatctttcttcttttttttctctcattaaggcatatcatatcaattgtttttagcctttagatgattaatctacggtccaaactatctccctactttttaagtcatatcacatcaagtgtttttagcctttagatgattaatctacggtccaaactatctccctacttttcttcttccataaagtcataccaccttactttttacatttggatcaccattctacatactatttaaatttaaattatcataaaccacattaatttacttaatctgatgttatctagctatcttacacgttattttgttattgttatcatactaaattcccgcagcaatgcgcggggtttcacctagttatatatatcacaaacactttgggagtaataattaaagaagaagttagcatacataattgatagagaagaaaatgatgagaaaacctgtgctcaagaggatttgagcttaggccaatgcattactgctagcagctgcctatcagttgagctaggcaccgttctcaacagagttatactaaacggatcatactaccagaaacttgttaatccgtaacggattcttggtgatggattcataaaccgtcgctgacagcggcaatccgtgacgataatcttttttccgtcatggacgtgcaccagtggttattcttggcccgctaactcatgatggttttatccagatcgtcacagtgtgtgattttaaaatcttcacagtgtgaagataatcaaaaggcatttcaaaacttgttttgcttgaaaaggatttgaatttgaggttcaaatgaattttttaaaaaatgaaaaactacactctctcttgggccatttctggctgtcctgcagccccacatggccacacccacactctctccttctcttgggctcggcccagcctccctcttacgctttcccccttcagctgggcccggcccattttccgcatgggctagccgcaggccacctgcgccttgtaaaaaaaaagagacaaaattgtgtagctctttaggggattcgaacaccctcaaccaaaagcacaatatccctaaggatccaccactgaaacacaagtgtttggccataggacaagcactttgctttatatatatcaaacgttagcaggtaatggactcctgctcgtgggattcatcataaaattcacaagaaaaccagcaggttttttcttttcaatcgctggctaaaacttgtaggtagtctttctccctcgtactaacttcaaattagattattattttttctaaaattttctaaattaatgatctatcaatttattgtgttattacaactattattttttttcatactttcatgtgactttgttttatcaattgaagatctaaatttcaaaagtgtcaacttcaaacgatattttgaagcagtaaatgatttcatttgaaaaagtcatgaacacaaaagttgtagaactgatcgagatctacaatttttattttggtcatttattcatttgacaaaatgatagtaacattgtttacacaatttacacatctatcttataatttatgaaaccatatgggagatatgtaaaatttatgaacaatgttactattactttgtcggatgaacaaatgaccaaaataaattttgtagatttagatggattatacaactttgttattgattacttttttagttgaagtcattcactaataaaaaattctatttgaattctcaaactttgaatttcaaatttcaaattattcaaatagagtcagatggagaaatgaccaaaataaaaattttgcatctcgatgagttctacaactttggttttggtgacttttccatttgaaatcatttattaacaccaatttttgttcatgtggttatgctagttcaatgaccgcatgttactagaaaatatttttatcaatggtagtaagtatcggtgcatttacatgggctattaatattgtatccatcctaaaatatacggtgtattagttttgtacaatatcttctacattatactttgaatattaatttcttcaataatatattatcaacaactacgaaattaacatcatcataagtatgaaagattatggaaaacaaatataaagatatgacatgcatatgcatatttccttttctgctacttcctatatactatcaatttcatatttgtaaatttagaattcgtaaataaaaggttgtattacgatgaggttttttcttgttctaaccatttggagattatattctaattagcaaattcaaatttgtattctcaattataggttttcatgttttagttgttctgaaatttgaaataagtatcatgttgtacgtacttaactacttatctagtcccagttagtttcttttctattttaatatttctcaaaatcaacataaataattagcaggttataaatgacatggactcataacaaagaaatataaatttatttttcttgataacataatttctaaaattgtgcaaatttataaatataatgttatgctctatgtatgtagagtatcaattttagttttcaaggtttagcaattccaaaaattcagaagtaaaaatactaagttgtacccatcttggattataatctttctcatttaattctgaaatcctaaaataataattagtaggccgtaacttacatcgacgatcctttttatttaggccgttatatttcggtccaccaaaatagatggccagatttattctagttctaacattcaaaactaacaattatcaagttgtaactgtcacattcccctcttaatttaagttattataattcagtcatacaaaggtggattgtcagatttattcactatttatcctgttaacgtgagaattttctcggagtaccctagtatatgtataatcttgagaaatatatccatttatttgtctgcagagctagcatg

SEQ ID NO: 27633 - DNA, 5071 bp, Oryza sativa
tttcccacaaattccaactcatcggggattctttatattgatgcagagctgagaattcctacctcaaactaggctgggtgtgtcatggatcttgttagcatttccatttacatgtgggccatggcagccctttgtaccatcatcactgcaatggtgaccaccaaacttgcaagagtaagaagaccaattaccctcaatccaaagagcaaaagaccacttccaccggtggtgaatgtcattgcccttctagagcacttacctaggctatgtacaaagggtgtaattccggtgtacaaagggagtgtgttcacggtaagtctgtttggactgaaggcaaccttcttggttggaccagaggtctcggctcatttctatcaagggatggattcggagattagccagggcgatctgtatgaattcaccgtacccttgttcggcaaaggggttggctttgacatagataatgctactcgaaccgagcatctccgtttctttattgatgcgataaagacgtcgaagttgcgaaaccatgtcaactccatggtgcaggaagtagaggtaagtcagcaaatatgtccggtataacttttttctataaccttactgcaaaaacatgcctgaaggaacttaagatttttctaaggtactcaaaaaaaatgtctagactgttattttttttaagaaattgaaatactattttcatataaatcacttctatttttttcccagatccgccattgtgcatgctcgtgccttttttttgcttgaatgcatatctcattatatatacattatacatgcaggactattttgcaaaatggggagaaaatggcatagttgatataaaacatgagtttgagaagttactcatgttgatctcaggccattgcctactcgggaaggaggttcgggacaacatgttcgatgaggtcttctcattgttccatgaacttgacagcggggttggcttgggcagtgtcatcttcccatatatcccaattccatcgcacattcgatgcgacaaagcacacgccaaacttgcaaaaatattctccaaaattgtgaggtcgaggagggactccaaccgaccagccgagcaggatgtactccagtacttgatcgattccaaacatagagatggaaactccactaccgaacaagaggtcactgggtggatcatttctatggtttttgccggaaaacacacaagcacaaactccactacctggactggagcatgcctactaactcatgacaagttcttgacagaggcactcgatgagcaaaagcatatgattcaaaaacatggagaccatatagattataatgtgttgttagatatggacatcttgcactgctgcatcaaggaggccctaaggatgcaccctgtggcgccaataatatatcgcaaggcacaaaaatcatttgttgtaaggacgagagaaggcgatgcatatgacattccagaagggcataatttactgagcccaatgatattcaacaacagactaccctacatttataaggatccccatatgtatgacccagataggtttgctcctaaaagagaggaggataaagttggtggcatgttctcttatacatcgtttggtggtgggaggcatatttgcattggtgaggcttatgcttatatgcaaattaaggtgatatggagtcatttactaaggaactttgagttgaaattggagtctcctttccctaagacaaactggagcaaaatcctgctggaaccttggggaaaagtaatggtaagttacaagaggaggaggctccccacagcttagtagagaaattaatatacatggttatccgtatgtcttgtatttttgtcatgtgtcttgtttgtaatacccatgtaacaagaataattccgtatgccaccacatggctaggtgtcgatgtatgtaagggtgtgtttggataatgaaaaatgtggaatgggattaggattgcgaaataaatgaagggttaggattaaatggaagagggataatgaatggttaggatttaaagatgtcttttggtgggtgggaaatcatttccctatcccattagccaaacactacctaaatgtttataattgaaatttgatgtatttcttatgcaattgcaactgctctagtaggaatacatgatattgataatccacaatattataataatggcacacccaaagtaagtgatatggtttctacatatctagtgtcaagaaagagcatccacaatgcacgtggttgtcttgttggtttgaagagaaataatgctctaatgggtgaacacaacttatcaggctccgtttggctaatgagttatgcccatcaggaaatggaaatgatatactggtagaatgaggtggtagattatgtgaagggaaattatattccatgtttgatttgatgaatgggaaatggaagtttctagattaatgaccaaaatacccctcacaataagttgtggtagatgaatcaacagattaaaagggtcaaaatggtgagggcgatttggtaatttctcctagcactctatccaccccctcaatccagcaggattgcatatcccattcccgaactacccaaataacggaaatataaaatttggaaataatgtccatttcccattccctttatccaattttccaaacgtagcctcatagatgaccttttctaggcccgctggcaagggtgagcgagcggctcgattgcacagggccggagactttgaggggcccataggccgtcggagagcagcccattaggcctagttgctgctgcaacactaccttcaggccttcagctgggtagcctgtgaatccctatcgatcgcacatccgtgcacggtgcactaaattggctaggccgagaggcgagacaagagtaagcgccaagttcatcgcctgttcgtcacctagactcccgacgtcgcatgttcgtctcttgtcaagacgtcatgtcgccgccctagtcctcccagtcccaagtaccggcagcaccgctgcagcatcactggatcagcagccgggcacatcaagatgaacaggttctacttatcccaattctgatttattttttaaaactacaatcataaggagtcactacatctcagtccaaatgcgttcatataataatctgttaaatatgaattgtgattattcttcttggccttagaacatgttcatgtcaatccctcaacttttagggccataatttgcattttttttctagggacctaattttgtagagatgaccctgaccttatctaatctaaaaacgcctattaaagatgaggttatgagagatgacccatcacaggtgtagcgtcatctgtgataggtcatacgtcatacttgtgactcgtcatagatacacatgtgacgggtcacagctatagcctgtcacacaatactattgtccaattcatatttaattttttttcttatattatcctcaaccatctttcaatcttttcattcctctcatttaataagttgtacacactagatactccctacatctctaaatataggcacaaccaccttaacctaaagaccaagaaacactcattatcacattctagtttgtatcaccctaataaatatatgcatgcacctaataaattagagatcttaagggtggaggatttaaaataataataatttaataaagaagagatgctaattaattgcatgcatgcatgtaaatcttatattatgaaacatctaaaaaaatagttgtggcttatattatggaatagatggagtatgtattggcaggagttaggcccactaccgatggctaatctatattcagcccaataagtgatccgatgggattacgctgaaattatgcctctgtaacagcggaagcgatgagccccatacttctgctccacatctacgatgaagcagacctacgatgttgtggtgcgaccgtgcaaacgggctttatcttttcgcttatgcttttgtttatcagccaaaatttgaattttcaactttaaatttgaagccgattttaaggttttttatcgaagtttatttttcagcatttgcttttagattgctaagaacacatatataaaagttttatttataaattacttttcatttatgaatatgccgcttggtttattccacaaataagtcaaacgatgaggctaaatttctacgggcctcagcctaaatggatgttagttcgaggtggctactatcgattttccatgtccatcaattattaaaggcacgaaccaacgaatccacacatgatcacctggtcaatccattgaaatttgatgcaaaatcagtccttcatgatcaggtcctctgacgaactgttgatggtagcgttgcttttctgccactgaccaaagaatttgcagccggccggacatgccagtatgtcctcttactcaacgccgcatctccaacagcctcttcacattaaactctccaaacactcgtatagctaactctccatctgatttgactagtcaacctagttactcgttccaacagcctctccatctaccatccccattataaatctatgacaaataggacctatatgtcagcctctgatacccttcttccttctcttccaccccattttccccgcccatacacgaaggcggccacgtccatgagtgcgtccacggcgcaagcaccggagccgcccggcgcaagcaacggacgcagccacctcgagcatggcatggggcggctccggtgcggcaggctcctggaggggctgcgtcgggggcgggcggcggcgacatgccctgccccgggaggtcaacgaccacggtgaggatgccgcggctaggccaagcttgtccacggcgtgggtgacggacgcagccacctcgagcagggcatggggcagctctggtgtggcgggctcctggaggcggaggaggaggatgatggagcagctccggcaggtcggcgaggccatcggcggtgtcaacgccctcctcgcccacgcctacgctctcgccttccacgccgtcgccgccgtcgaggtccgcgcccgccggcgtaggtgatggcggcggc

SEQ ID NO: 27634 - DNA, 2502 bp, Oryza sativa
acttgcctcttgacttctgctaattcattggctgccattctatacggtctcttatggatcggagttgttcctggtaccaaatctattctaaactctatatcccttttaggcggcataccaggtaaatcatctgggaacacatcaagatactcccggactataggaatctcttccaaagttatttggttcagtcttgaccttaaagattcagaagacaatgcatgaatagttacaactcgaccatcattgctggtgagagttacttttctgttggcacagtctatcacacccttatacctggctaaccagtccatccctaggatgacatcaaggtctttggattctaacaggataagattggccagaaatggtacgccttgaatttctattctgacagaggggctacgttgcaaagagagtgcttgattgcttggggtactaaccatcaaaagacgtctaagatcttctacttccataccatgatttcccgcaaaactcatagataagaatgaatgtgtagcaccagaagcaaaaagcactgttgcaggaactaagttaacaagaaacttacacaaaatcacatctggagcatcttgagcttctgcagcagcaacatgattgacacgggcctttgatgctggtgtggtagagttgctctggacagggacaaccttcacgcgtcggggcttcggacacttgtcagcgtaatgtcctgggtctccacagttgaagcataccacgggcttgctgccttgctccctcttggcaggttgttgctgtgtcgaggctgcaacaggacgtggagcttgattacggatgttgttgcccgcgttgttgttgaagaactgacgctgcggacgaacaacagacgaagaacctccctgtggcctggactggggtcctaaagtaagacgcggcctctgactattcccctgttgtgccttgaagtgagcaatccggcgtttcttctgctccatgcgattgtacttgtcctcctggcgaatagtcttatccactaacttctggaaatcaggataatccccagtcatgagtgggtaagaaagctcatcattaagtccttccaagaacttctcctggcgctcttcatcagtgcgtacatcttccggagtataacgagccagacgattgaactcgtgcagatactcggtaacagagcgagacccctgagtgagcgacctgaattccttcttcttgagagacactactcccgatggtatatgcgtcttccggaaagcagcggtgaactcaagccaagtgataggttcagcagtagtcctattcagacggaagtgatcccaccattcagaggcagggccatgcaactgatgtgatgcaaatgagaccttctcctgatcggtgcactgaagcaaatccaacttcttttctatggcatgcagccaatcaccagcttcaacaggattagtggtgctagagaaggtaggcggcctcacacgaagaaattccgctaacttgttctggggaggtgcatggttatttccctggttctgctggttctggagttgctgcatcatcatgttcataagctgtgcctgttgggccaggacctgggcaagtgtgggattctctccattgttgttgttattattgttattgttgttgttggggccattcccgttgctgcgagtgagcaccatctggcatggacaggagcacaagaagagaaaccaggggaaaactacttaggaccgagaattaatttaacttttattgatcttaagtgagtttcattattacaaactgaagactctcacaccactaaactcaccaactacctaacactcgaaagcaaacaaacgcacccacttacatcccccccactgatgtaaatcacatgcgagacacacacaaccaaacttaaaacaagcaaactaacacaacgatctaagacaacggcttgacaagacattctaggtcttccgagcatcggagttgattgaaggctcgttcggctcgtcttcatcatcttgagttgctccccactcgatcttggaatgggtgcgcttggattcttcttcttcatcatcacttataatgataaccggaggatctgctagggctggggtaacttctttctccaccacacggacctttggcgccaattggtagcgagggacaaatagagctctcttccttgcggtaagatgaatcctggccttctgcggtggtgcttctcccttcaatgcggctagttccttcttcaaacgaaccactttgtcttctagcttgcaaatcttaccacgattccgatcttcacgatcttgagctgctaacacagtctctgcacgggttttcatccatagcccacagcatctcaaccaaatgccttgtggtagcatcattctcaattccttccgtctcaaggtagctggcacggtcactttcctgtggttgacgaggatggtagcgatactcaatgtcggccaactgatcactgtagcgatcacggagctcttctatggc

SEQ ID NO: 27635 - DNA, 1807 bp, Oryza sativa
ggctttgagggttccaaaattaattaaaatatcctaatgtggccattattattacaatagcacattgaatgaacttatttgtataataatgtattttacgtggatctagtaattcggtaaatataaattgagactcggtacaatattaatctaattgtctaattaaacactcacatattcttatttatatataaagcttaatttatttatgaccattattttatatgagtgattttcatgtcatgagtaactcggtgaaatgttctaagtatcaatctatatatattccggtgaattacttatttataaacacgatcattatagtggtgatcatcatttcatgtgttcttatatttcatgtgagattcgattcaaatgaataagatttaatcttactatttctttagctaattgtgacatcaagctatcaatcatggttcgaatatttaatacctgatttgtaatttgtaatagaaattaatatttgacttaactatcttgtgcataattatttgtaggattaacgatattatattctcgtaaatttatctattacttaaattttagacccttactttactttctttgtgatcatttacggtttggcaagcaatagcaatcataacaaccagcatgatgcaaaagttttaaaaagttcaaaattttagtgatttttattgtcttgaattttcaggatgttacagcaccattcctggatcataatcaccccctcaaaaaccagaggcatggactccccagcgacccccgtgggcttatctccgccacttctcggtctggtgctccgcaatgaaccatgttattcaaaaggtaaaagccgttgcccacggtggcttgtggttggcccgattaatgtttctctatagtagctcgatcaccggttcttaattgtcataagcactactatccaaaccatgggttcaatacccaccattatccagttttagttggcaagtatattaattagccaatcacgattgaccatcgtgaactatcattaagccatcattaaatagtaatgagtcataagttatcccaatagtgtgctaatgtttttaagcatggctaagcaactataaataacatctagctgaaccaatccaatatataaggtccatgctagtcaaattataacccataggaaaataaagtcatcttcggccataattaaatgggaaaggctcaccacccaatgatattcgaaaatgtcacaccctgaaaattcaaaatatataaattgttgtttaattggaatttttagaaataattttaaaagcctagaagagaagatctaattttaattaataaattccaatataaaatggggccagataaaatttcattaaatactttgcttaattctataattcctagatttttctgggatttatttgagctaagaaagtatttttaataaatggaattgcatttaagaaataatttaaattgaaaaaggttttaaaaagtcttcttttggctttgggctgaaagtcggcccaaaatcccttctctctctcctcggcccagccggcccagtccgcagccgcagccgcccgcccgcgcgagcgcgctgtcgctgacaggtgggtcccacctgtcaggatcgtcgtcctcctccggccgtaaccctagtttcgcgccgccgccgccgctttccaatccggccgttcctttccgtttccggccaaatcaattgaggggaaacaatctccgggatctcctctaccttttctcctttggaaacttcggctaaatcggtttggaatgagtttgattcgagttcgaatcg

SEQ ID NO: 27636 - DNA, 6631 bp, Oryza sativa
cccacgagggggaggggggggaaaaaaggacttttagggtttttctttttataaaaccattttaactttgtttatttcttcttaattattatttgtgctctgaaaattccactaaaatttatttacgcattttaggcttttaggaaatatacaaaaatcctccaagccttattcgacttttaacttcgcacattttaattgttggaggctttcacaaggattttacttattctaagcataattttgaggatgtgttttagagtcgttttgggacgcgacactgcttcagaaagatgtgaagtacaagtggtcggaagaatgtgagcagagtttccaagagttgaagaatcacttaatattagctcctattttgattttgcctgatccaaagaagggtttccaagtgtattgcgatgcatccaaacttgggttaggttgtgttctgatgcaagatgggaaggtggttgcctatgcatctcgtcagttacgtccgcatgagaagaactaccctactcatgatcttgagttagctgcagtaattcatgcgttgaaaatttggcgtcattatcttttcggtactcgtacagaggtgtataccgatcacaagagtttaaagtatatctttactcagccggatctgaacatgagacaaaggagatggttggaattaattaaggattatgacatgggaattcattatcacccgggaaaggctaatgttgtagcagacgctcttagcaggaaaggttattgcaatgctacagaaggacgacagttgccattggaattatgcaaggaatttgaaagattaaatttgggaattgtcagtagaggtttcgttgccgccttagaagcgaagcccactctaattgatcaagttagagaagcccaaattaatgatcctgatattcaagagatcaagaagaatatgagaagaggaaaagctatcggtttcttgaaggatgagcaaggaactgtatggttgggcgagagaatctgtgtccccgacaacaaagatttaaaagatgcaattctgaaaaaagctcatgataccttatactctattcaccctggtagtacaaaaatgtaccaggatctcaaggaaagattttggtgtgcaagtatgaagcgtgaaatcgcagaatacgtagcagtatgtgatgtttgtcagcgagtcaaggcagaacatcagaaacccgccggtttgttgcagcctttgaagattcctgaatggaagtgggaagaaatcggtatggattttatcactggtttacccagaacgtcatcaggccatgactctatttgggtgatagtcgatagacttacaaaagtagctcatttcattccggtaaagacaacctattccggaagtcggttagcggaattgtatatggcaaggatcgtgtgtttgcatggcgtccctaagaaaatagtgtctgatcgaggcagtcagtttacttcaaatttttggaagaaactttaggaagagatgggttctaagctgaactttagcactgcttatcatccgcagacagacggacaaaccgaaagggtgaatcaaattttggaagacatgttgagagcttgtgctttagatttcggtggaagttgggataagaatctaccttatgcagaattttcgtacaacaacagttatcaagctagtctacagatggctccgtacgaagcactgtatggtcggaagtgtcgcactccgtacgaggttgcctatcagttagagttacctcaatctttggcaggagtccataatgtgttccatgtgtcgcaattgaagaagtgtttaagggtacctaccgaagaagctaatcttgaacagatagaagtccaagaggatctgacctatgttgaaaaaccaatccgtatcttggaaacaaatgagagaagaaccaggaatcgagttatccgtttttgcaaagtccagtggagtaatcactcggaagaagaatcaacttgggaacgagaagatgaattgaagtcagctcatccgcatctgttcaccagttcttccgaatctcgaggacgagattctgtttaaggggggtaggtttgtcacaccctgaaaattcaaaatatataaattgttgtttaattggaatttttagaaataattttaaaagcctagaagagaagatctaattttaattaataaattccaatataaaatggggccagataaaatttcattaaatactttgcttaattctataattcctagatttttctgggatttatttgagctaagaaagtatttttaataaatggaattgcatttaagaaaccctcctgtcaggatcgtcgtcctcctccggccgtacacctagtttcgcgccgccgccgccgctttccaatccggccgttcctttccgtttccggccgaatcaattgaggggaaacaatctccgggatctcctctaccttttctcctttggaaacttcggctaaatcggtttggaatgagtttgattcgagttcgaatcggatcggctttcctctcttcgagcccgatctttccttctcgtcgccggccgccgtgggccttcgccgctgccttcgagcccctttaaaaggacccccgagctcttctctacccgccgccacccttgccttcgcctctcgtcgtcggaaacgctctagcgccgtgtgccctagctttgccgtcgtcgccgccgctccagccgtgcgccgccgtcgtttcagccgtcgctgtcgctcgggaagaccgccgttgtgctcgccaagtcgtcgccgtcctcgtccgccgcttcgccaccgccgaagaccgccggagcatcgccgtcaccgtcgacccgaaggttgccgccgcttcctcctcgtcgccgtcgtcgtccgttgttcttccgccgccgttttggtcaccggtgagttcgccacgtcgtcctctacatgctggtgccctccgtttgtgccgaagtgccgccgttcgccggcgagcgtgcgccgcccgagccgtccgctccgccgagccgccgccgctgtcggtgacgtcattgccgacgtcatcggggtcgtccgccgtgagccggtcgtggaccgttcgatctcggccgtccgttttggattggatcgatctcggccgtccgttcgcgtgaacctgacgcccgtgcgcccggttcatatgaaaccctaagctgcgctgacgcaataaaccttcttttccttttcaaaaataattcattattgcgtcataattcaatttaaaccgatataagtgttttaatccgatttaatccttaacaattcataactaattcatcttagctccgatttagttggttcaagtctctattgggataacttatgattcattattgggataacttatgattcactattatttcatgatggcttattgatagttcacgatggtcaatcgtgattagttaattaattaatgtgccaactaaaacctgataatggtgggttgtgagcacatggttttgatggtcgtgctcatgacaattaaggaccggttcacgagtttcggttgtgaaacattaaccgtgccaaccacaagccagcatgggcaacggctttatcgtttgtatagcatagttcattgcggggcaccagactgagaagtggcggagataagcccacgggggtcgctggggagtccatgccttgtttataagggggtgattatgatccaggaaggtgcgctgcggtggattgtgttatgcaaggggtattgtcacaactcctttccgaggtaccgtggtggtattgaggcacatggtgacatgatgtggggttgtgtcttgtgggtatagtggtacatctctgatcagagtaaaactattcgaatagccgtgcccgcggttatgggcgagtctaacaatgtcttttgtgattagtcccacacttctcaccctaatagaagatgctataattggtaataatttgattagctcctggtttggaatggtacattcctggtttggagatagatctgtacagccgggatggttgttcagaatggttgggcctatacaacagggtacgttgtatagtgttggattaatattgtttaattattacttaactgttttattaaattctcaaatgtttgctaaatgctgcttttgcaaatggaaccctattatgccatcctttgttatcctgtgcacttgcatatttgatgcgtggcttgctgagtatgtcatatactcaccttgcaatcattcatcagaggaagagttctacaatgatgctgatggtgtgaaggattaggtgtagccttggtcaagctgcctgtggagtggagtcgtctgcgccgtttatcttattttccgctgcttagatctttattgattgagaggaactatctacctctgtaatgacattttatacgcttattaattagagtaataattgtactctattatcaatttgttattgtgtgcctcggctgattcctggacgagggttcacacacatgaaagcgtttggaattttggatagaaattccgggcgtgacagaaaacaatgcataagttgaaataaatcaatagctttaaacaggttcagcatgctcaaagggttgtttgggatctgtgtgacttgccttgctggccttggaactcttcaaattcttctcctgcgaaaacagactctccggaaacgtcggaatctaaacaaaaaggagcaaaatcaccaaaatagcacataaacaagcatgaacagtacatgtggatatttttaacatgtagatctcaattttagaaaaatttagagacttgaaccaactaaatccgagctaagatgaattagttatgaatttttgaagattaaatcagattaaaacacttatatggattttaattgaattatgacgcaataatgaattatttttgaaaaggaaaagggatttattgcgtcagcggctagggtttgcggtggaccgggcacacggcaacggttcacgggaacgaacggccaagatcgatccatccaaaacggacggccgagatcgatcgggtctacggcggctcacgagagacgacgacgatgacgtcagcggtgacgtcacctccggcggcggctcggcgactcggcagctcgggcgcacacgctcgccggcgaacgacggcgcggcggcgcgaacggagggcacccacgggtagcggactgcacgacgaactcaccggcgaccaaagcaacggtggaaaatcaacggacggcgacggcgtcgaggaagaagcggcggcgaccttcggcttgacgacggcgacggtgctccggcggtcaacagcgacggcggaggggcggacgagaacggcggtgacttggcgaccacgatggcgacctccccgagcgacggcgacggctggagcgacggcgaagcacggctggaccgacggcgacgacggcggctcgaggttacacggcgctagggctcttccgatggcgagaggcgaaagcaaaggtggcgacgggtagaggagacaccggggatccttttataggggttgaaagacgacggcgaaggcccacggcgaccggcgacgcgaaggaaacctcgggctcggagagagagaccgatccgaatcgacctcgaatcaaacactttccaagcgattttagccgatgattccaaaagagaaaaggtagaggagatcccgaagattgtttcccctcaattgatttcaccggagaaggaaagatgcaaccaaatttggaaggagacgacggcgcggctcggctagggtttcgggcggcggccgctggaggttgacgacgaccccgacaggcgggacccacctgtcagcgaccagacgcgcgcgcgaggcggctgcggactggactgggccgacttgggccggggagagagagagagagggttttgggccgactttcggcccaaagccaaaagagactttttaaaaacattttttaatttaaattattcctgaaatgcaattccatttattaaaaatacttccttagctcaaataaatcctagaaaaatctaggaattatagaattaagcaaagtatttaataaaattttatctggccccattttatattggaatttattaattaaaattagatcttctcttctaggcttttaaaataaattctaataattccaattaaacaacaatttatatatttttggatttttaggatgtgacagcggtcctcggctcaccctaggtcgacggcgacgacgaaaaaggctgtcggagcggaggaaggcggcggcgcggctcgggtcgtcggggtcgacggcggtccggcggtccgcgggctcagcgaggggttggacggggtcgacggcagtgcggcgaagccggaggaggcgacgccggggcgggagacggtccggcgagcggagaaggccggccggaggtcgtaggcgacggaggagagagagagcgacggcgcgagctcgattccggcagggagacggtgcggcaagggcggaaacgggcgagggaggcgcggggagggtttatatagggttggaagggggagagggcggccggaggggaaggaaaccggcgcggcgctctcgggctccatcaatggcgccggcgggattaggggagggtttccaaacgaatccaagggagagagggggggaa

SEQ ID NO: 27637 - DNA, 18890 bp, Oryza sativa
aggtttcgttgcagccttagaagagaagcccactctaattgatcaagttagacaagcccaaattaatgatcctgatattcaagaaatcaagaagaatatgagaagaggaaaagctatcggtttcttggaggatgagcaaggaactgtatggttgggtgagagaatctgcgtccccgacaacaaagatttaaaagatgcaattctgaaagaagctcatgatactttatactccattcaccctggtagtaccaaaatgtaccaggatctcaaggaaagattttggtgggcaagtatgaagcgtgaaatcgcggaatacgtagcagtatgtgatgtttgtcagcgagtcaaggcagaacatcagaaacccgccggtttgctacagcctttgaagattcccgaatggaagtgggaggaaatcggtatggatttcatcactggtctacccagaacgtcatcaggccatgactctatttgggtgatagtcgacagacttaccaaagtggctcatttcatcccagtaaagacaacttattctggaaatcggttggcggaattgtatatggcaaggattgtgtgtttgcatggcgtccctaagaaaatagtgtctgatcgaggcagtcagtttacttcaaagttttggaagaagcttcaggaagagatgggttctaagctgaactttagtactgcttatcattcgcagacagacggacaaaccgaaagggtaaatcagattttggaagacatgttgagagcttgtgctttagacttcggtggaagttgggataagaatctaccttatgcagaattttcgtacaacaacagttatcaagctagtcttcagatggctccttacgaagcactgtatggtcggaagtgccgcactccgcttttgtgggatcaaacgggagaacgtcaggttttcgggatggatatcctgatggaagcagaagaaaaggtgaaaatcattcaagaaagattgcgtgtggcccagtctcgtcataagagttatgccgacaatcgccgcagagatttgagttttgaagaaggagattatgtgtatcttcgtgtcacgcctcttcgaggagttcatcgtttccacactaaaggaaaattggcaccgcattttgtgggaccttataaggttgtcagtagaagaggagaggtcgcttatcagttggagttacctcaatctttggcaggagtccataatgtgttccatgtgtcgcaattgaaaaagtgtttaagggtacctactgaagaagctaatcttgaacagatagaagtccaagaggatctgacctatattgagaaaccaatccgtattttggaaatagatgagagaagaaccaggaatcgagttatccgtttttgcaaagtccaatggagtaatcactcggaagaagaatcaacttgggaacgagaagatgaattgaagtcagctcatccgcatccgttcgccagttcttccgaatttcgaggacgagattctgtttaagggggtaggtttgtcacaccctgaaaatcctaaatatacaaattgttgtttaaatggaattttcagaatttattttaaaagcctagaagagaagatctaattttaattaataaattacaatataaaatggggccagataaaatttcattaaatactttgcttaattctataattcctagatttttctgggatttatttgaactaaagaagtatttttaataaatggaattgcatttcatgaataatttaattgaaaaagttttttttaaaagtctcttttggctttgggccgaaagtcggcccagtccacagccgcagccgcccgcgcgagcgctcgctgtcgctgacaggtgggtcccacctgtcggactcgtcgtcttcctccggccgccgccgcccgaaccctagccgaaccgcgccgtcgtctccttccaaattcggccgcgcctttccttctccggtgaaatcaattgaggggaaatgtttcccgagatctcctctaccttttctcttttggaatcatcctctaaaacgctttggaaatccgtggattcgagttcgattcggatcggtctctttcctccgagccttaactttccttctcgtcgccggtcaccgtgggccttcgccgcagccttccaacccctataaaaggatccccaagcccgccgctacccgtcgccaccctcgccttcatctctcgtcgctggtagagtcctagcctcgtgagaccttgtgccgcagtcgtcgccgtcgctccagccgtgcttcgtcgttgttccagtcatcgccgtcgctcgggaaggtcgccatcgtggtcgccgtcgcgtcgccttcctcgtccaccccttcgccgtcgcggaagaccgccggagcatcgccgtcgtcgtcaagccaaaggactccgccgccttttcctcgacgccgccgccgtccgttcattttccgccgctgttttggtcatcggtgagttcgccgcgtcgctctctacgtgctggtgccctccgttcgcgtcctcgcgctgtcgttcgccggtgagcatgcgcgcccgagccgccgccggaggtgacgtcaccgctgacgtcatcgtggccgtctgccgtggcccggtcatggaccgttcgatctcggccgtccgttttggataggatcgatctcggtcgttcgtttccgtgagccgccgccgtgcacccggtccaccgcaaaccctagccgctgacgcaataattcccttttccttttcaaaaataattcattattgcgtcataattcaattaaaatccatataagtgttttaatccgatttaatctttaaaaattcataactaattcatcttagctcgaatttagtgggttcaagtctctaaatttttctaaaatcgagatctacatgttaaaaatacccacatgtactgttcatgcttgtttatgtgctgtttggtgattttgctcctttctgtttagattccgacgtttccggagagtccgttttcgcaggggaagattttgaagagttccaaggccagcaaggcaagtcacacagatcccaaacaaccctttgagcatgttgatcccgtttaaagctactgtttctattcaactattgcatttattttcgaatgtcattgggtggaattaacctattgtttgttatagccctttttgttcttgattactttattccttgataccttgggttattataacttgactagttgggctatatatatattggttcagctagatattagatatgattgcttagccatgcttagaaacattagcacacttttgggttaacttatgattcactattatttaatgatggcttaatgatagttcacgatggtcaatcgtgattggttaattaattacttgccaactaaaacttgataatagtgggttgtgagcacatggttttgagagtcgtgctcatgacaattaaggaccggttcacgagtttcggttgtgaaacattaaccgtgccaaccacaagccagcgtgggcaacggctttaccttttgtatagcatggttcattgcggagcaccagactgagaagtggcggagataagcccacgggggttgctggggagtccatgccttgtttataagggggtgattatgatccaggaaaggtgccctgtggtggattgtgttgtgcgaggggtattgtcacagctcctttccgaggtactgtggtggtattgaggcacatggtgacatgttgtggggctgtgtcttgtgggtacagtggtacacctctggccagagtaaaactattcgaatagccgtgcccgcggttatgggcgggtctaacaatgtctttcgtgattagtctcacacctctcatcataataaaagatgctataactggtaataatttgtttagctcctggtttggaatggtatattcctggtttggagatagatctgtacagccgggtatggttgttcagaatggttgggcctatacaacagggtatgttatatagcgttggattaatattgtttaattattacttaactgttttattaaattctgaaatgtttattaaatgctgtttatgcaaatgaaaccctactatgccatcctttgttatcctgtgcacttgcatatttgatgcgtgacttgctgagtatgtcatatactcaccttgcaatcattcatcagaggaagagttctacagtaaagccgatagtgtggaggattaggtgtagccctggtcaagctgtctgtggagtggagccgtctgcgccgtttatcttttttttccgctgcttagatcataattgattgagaggaattatctacctctgtaatgacattttattcgcttattaattagagtaataattgtactctattatcaatttgttattgtgtgtctcggctgattcctggacgagggttcacacacatgtaagcgtttggaattttggatagaaattccgggcgtgacagtggtatgtggcacgtggttacacgtgaggaagatgtgtcttgtgggtaaagatgtacacctctgatcagagtataatctattcgaatagccgcgccctcggttatgggcaagccgagcaatgtacccaagttagtgtttttaattcttaaaacctgcttaacaactaaaatgtagaatggttggcctgggttggcttgggacgagctgggacccagggtcgggttgccagttcggtctgaatcatcgtaggccttgggttaaggcaggttcgtgtgagttcacggccttgattaataatcttgtatagctctaggactgtgtttacaaaatagctttgagcaactaagtgtcttttagtgctgtttactgcaaaccctaacccccctatattatggctcccttgtactcccttgcatttattctgcacttgtgggtgtgtcttgttgagtacggtggttgtactcagtcttgctcaatttttcccaaacccagaagaggagcccctggatgatgaaggctttggtgtctagctcgtgcctgccgtcaagcgcctgtggtcgtcgccctagtcttccgctgtttcccgtttgtctttgtgtgtgctgggccttcgccgcccatgtaataaagtaaccatttacgcctccgcttgataaactctgaaatgtatcaacttttggtgtaccttgcctcctgggacaaggaataatacacacatgtaaggaacgcccgttgggttatttccggtcgtgacatatttctccgtatttagccccggttgtatggttatgacgggctgtcgtaaagaactcggcagtcaggggtggctcctcgaagtaccaggagggcatcggaaagagggtattagctagtatgttggttaactagaatgtatgtatactatgtatattagaagtatagtaatagattatctttctattttcttcctacctagcttagataatatattataagaatgagtagcttatgcttgtgtgttactctacccttggattatcttaacccatgcttagaatatgattatcacaaataatatataaattgttagtcaagttctctctatatgatcttcccacgggataaaataaatacaatacccttggaatactctcgggtgaaatgctacaatggtatatccgtgcgcttgcggatgaactctgtaaccataatataccagaagtatttgtgtgccattggtgggaattatatttctagtaatgtcgttaagaaataccaacagaggggagaattatacccgaacgagtaagctctccgcagccgcgcaccctacgccgaactcattatgctcggtgatgggactagggccaccagatggcgaaataatctgccagaccccttcaacaaagggaccgatctccggtcggggaggtgaagtcggcagagacaaactggggcgcggtgagtgtcatatcagacactgtcatttagatcgccactgcctggccctctcgctggcgactcgccgaaggcaatgtcacagccccaccagcgccagaggctttcgccgtcgccagttgcaatgcctggtccgaagcaacagcgttggccgaagtgctgcccccggttggcgcgtcggcatcactagcaggcagtggagacaggagcctcttttgtggaggtgggtgtcgtggcgccgacgaagttggcatcccatccgaagatgtttcgctgtccgagaagccaccggccacctgcaccacccctttcttcttcctttgggcggcggcaccggccttcgacgacgagccagtgatggttagcaacgcattagcactagcgatgttttgaggacgcgtgggcgaagcgctagagccggccccagccttcgcccgaacagggcttggggtatagccgtgtgacccagcatcgtcgtccgacccgtcttccctctcatcgtcgttgtcgtcgtctgcgttggtctccacggcgtccttggccactcgccgagttcaaacctggcttctcttggccacgtcgcgcttccacttttttgacgtcccaacgtcgtgatcgactctcgcagggttcgcccggctggctagcgtgccgtcgtagacgcgattcgcctgtccattggactgttactgaagcaggcgagcgtactcggcggtaattaaacccccgatcattttcgccgactcagctttggcatcctccagcaaacgaactaattaaaaaggggaaagatgacaaaaattatataagcccaaacaagccccaagatgtgagatatcgaaggaggggagggaagcttatgattgatgccaggaggaagcacgaggcgggaaagaccgagcacttcttcaccctctgcggtagtaatcccccaatctcgcgcgaggggagaaatctgtagcatgcaaaatttttcgcagaggtcgcgggtgctcaaccgatgcgcaaccttgcgaagaaggatgagccgtgcctcaagcacgccatcaacatccacgttcggcttgatgatcatggcgatagaaagacgccggaagcgaagccacttcgccttgtcatcttcggcggaatcgtctttggagaagtaggggttgtcgatgtagaaccatttttgcatcgaattgcggtcccactttgccatcgacacaaggacaggccatgcatccgagcgctttggccgaagcatgaagtttacactgccaaaaacagtcttctttggccccgccagagtgttgtcgtccttggtcgccacgcacaccatgaacagggtggcgaagagctccgcggtaggagtaaatccacacgtccggcacatccagacgaacacgaccaagttgagaaatgccgatgggctgagctaggggagcttgatttcgtacaactccagcactgatggcagaaagttgtcacatggaaggcggagcccggcggtgaaaaaggcggcgaacaccaccgttcgcccgtccccggtcgaagggacaacgtcttcgcccgcacaggacacctggcgctccgcaaggacgctggagaggacaagctcggccaggtcggcctccttgacaagaaacttgccaaggtagcacgaccaaccatcgctgaggctgccagggtcttcgccagacgatccggccttagtaggcttgcgaggagccatcgaatccgcgatgaaagaggtggcgaagacaggaggcgaaaagctagagcaggaatgatagggctgaaggcacgagagtctgacagcggtaaaaacgagaagtggggaggagtgatagcgacctgggatgagggttgtatagcccgatcgcacgacggttcgactcccacccaaccacagcctgacacatgtcaaatggtagacggaacggtaaattcccatcgagccgggccacacagtggcaggctagaaccaaggaaaaccaagaggcccacggagcccgatactgttcactttcaatttcaaaccacctaaccatttcgccataacttgggcgaaataagaaaagattactaacacaggaactaagctctttgtaggtgcaaaaggataggtttcagtaggaacatcggccgaaagggggcgcctcatgccataccacacaatttgcatttgcacggtatcggccgaagctccctacttacccttgcccgtgaggggcttgttggaggtataccacgagggccttcggccagacctgccgaaaccgttgtcacaccctgattttcgtcttaggatttataaatcatttaataaattattaatagaatttatattaaatgttcattaatttacaagtgaagttaattgtgggaaataaaatttcctaaatataaagcatggatggatttaattttttattaaattctccatggttaattatactctctggaattttctcggattttttcggagctcaattcctaaatgatacaaagaacagttcagtaattatttgatcaataatgatctaattataattgttaagtgcttttcttgcttaaaatccttaaattataaattgttgtttaaaaggaattattagaaatgattttaaaagcttaaaagagaagatctaattttaatttgctaaatctcaatataaaattgggttagataaaattttattaaatactttgcttgttcctctattttctagaattttctgggaattgtttgagcaagggaagtatttttaataaatgaaacatcatttcacgaattattttaattggaaaagtttttaaatcctcccctaagtcgttgggccgatttcggcccaactcttctcttccccgcgcggccgaatcggcccaagccggcccagccgacgccgaccgcccctcctcctcgggtcaccgacatgtggggcccacatgtcggacccatcttcctcctccagccggccggctgcaagccgagcccaagccgtcgcccgagccgccaccttgcgccctcaaatccgcatccaatccggccctttttcttccgtttgtttgaggggtttttatccccacatcctcttctatctttcccctcaagaatcggagcaaatcgttgggtattttgcccgaatcaaactcgttttcgagtttatccccaaaaaccgagtttagattttcccggagcgatttcttgcgggtggagtccgatctcttcaatccaaggctataaataggaccacctcgtcgccctctttcgtttgccccctctcccgtggtctcccgtgcatcgtagctcgccgtcgacgtcgcttagtccgccgccgccgccggccgggttgcagccgcgccgccgcgtcgctttcgccgttgccgccgcttgccgtcgccgcccgtaggtgcgccaaggggtggagaagcctggccgcccgtcccccttcgccgccggccaccggagagccgtcgccgccgttcaaccgagccgccgccgcctcttgcgtcgtcgccggccgtcgtcggttgtcgtgggacgttttggtgagtaccatcgggttcgtctcgtcgtcctcttcgcgtaggtgcccttggataggccggccgacctctctatcgccggcgaggtcgtctcccgtgtcatgccggcgatgatgacgtcagcatgacgtcatgattccttttttccagttttttctaatagattaaatcttctgaaaatcatatctaaataaccgtagctccgtttcaggtggttcaagttactaaatttttctaaaataaagatctacatattaaaattgtccataaattgaattaaatctatttaattctttttaaatgggctttaattagatttaatcttgtaaaatctataataaattcacttggagtcagaataaggccgttcaagtctcataattcatctaaaatcatgatctacatgtttgttacctttatatgtattgtttatttgggtttttattagccttttacttcgttttgcgtgttagcttgtcgtttccgtcgttgagaaggtttgtgagtgcgtcggaagtgatcaagaagattaattgaagatcgattattgcaaggcaagtcacagatcctaaacacaatcctttgagcatgttgatcctatatttaaattctctatttatttcaactgtgcatttattttcgaatgtcaccgggtggtgtgaacctattcctttgttatggccaatttgcattgaatgctctattccttgataccttgggtaataaattgattagcttgaaccttgtatattagattggttcagctaaatgctatatgtaagtttgcttagctatgcttagaaacattagctaactaaaggggttaattataaactatgttatattattattattaattatggttacattaaatggtagctcacgatggttaatcgtgtgatgttaattaattgataattaaaatctggttaaggtgggttgtgagcatatggttttgatggttgtgctcatgacaattaaggaccggttcgcgagctactgttgtgaaacatttatcgtgccaaccacaagccaccgtgggcaacagctttatcttttgtatagcgtgattcattatagtgcgccagactgagaagtggcgagaagtccacgggggtcgctggggagtccatgccttgtttataagggggtgattatgatccaggaacggtgcactgttttgagttgtgttgtgcaaagggtattgtcacgatttccccatttgcaatgccgtggtggtatttcggggcatggcaacatgtgtggaatcgtgtcttgtgggtacagtggtacacctctggccagagtaaaactattcgaatagccgtgcccgcggttatgggcgggttgagcaatgtttttcgtgattagtctcacacctctcacaataattatggatgttaatatctggtaataatttgcttagctcctggtttggagttagatctgtacagccgggtatggttgttcaggatggttgggcctgtgcagcatgggtgtgctgttcagtgttgattaaaattaatgattaattactctactgttttacttatcttaaatctttgctaaatgctgcttttgcaaatgagcctatattatgccatcctttggaatccttgtgcacttgcatacttgctgtgtggcttgttgagtatgtcatatgctcattcttgcaataatcatcaaacctcagttgaagataaaggatccagaaggagaagacgtttggcttataccccagttgagctgcctgtgggagtggagctgaagccatcgctagaccgttaattccgctgctgttttcttttctttgtaagtatgtaacgttattattatgatggatttgtatattaaattgtcagtttgtgtacctcgactgattcctggacgaggattttatgcacaaattagttcggaaattactagtgaatttccgggcgtaacaaccgtccacccaatgaaggatcaagccagaggcgtcaacttcgacaaaggcgaaggcacacggcgaaggctatgcggcgaagcatgtgggcgaagatcaagggcctggctccgagcttcgcagttcgaaagaccacatgggcaaagggtatatggcgaagggcatttagcgaagcatatggacatcacccaagacgggccctgggcggagaaggcccaatgggccactatgcgcccgggggccctttcgccatggctaggccaagcttgttggcccgttaagagcccatatatgtaaaggacacagtatgccctcaataatgtccctatcataagggcaaccatgtaaaatcccctataatcataaaccctagaagaacagagcctataatagggttataaatagccccctaaggccatgtaatggggggatccccaaaaaatttctaatcaaccaatacagtcgtctttatttccaacctgttgagagagccacgtcgttcgacgtgacgcagttatcgttcgacaacaaaaactaagcaaggaaatagaaagtggtactctatgatctgttctgtctctcaattgcctaaggtggtgacaagcgtgtattccacaaatgttagtcgtaagggtaagcctccgtgcatatttaattaacatgagagagagtactcaaactgtgcgcttgtacattttagatatacaccattgtagcaactcctgattaacaaccaagtttttgtttccctttcgtcctttactcgggacgagcaaaggttcaagcttggggggttttgttgacggtcgttacagacaaatttcgaccgtcaatataactaaaataatggagaattagctatgcttacaatgcattttgtttccaaatagtatatatatttccacttgtacatggaaataacatgttacaggaatttatcaaataaaataaagagaaagcggagaaaacctcactcctaagcaatcaaatggataaggagggcccacatgtctggtgtaaccgccagaaaccgctttaactgccataaccacctaaaggacccacctgtcagtgccctgcccgaagctagaggcctgctgggccggcctaagttcggctgaactgccgaaccctaatggcgacggctcagcttggccctccacgtgcacgctccaaatcgcatactaatgacggttacaggggcaaaatggacaattcgcatagctacaaccgtcataaatacccaataaaaggaggagctcattcactctctcaacacactcaagcaagctcaaattcttcttcatactttagtattagtagtatagtgctaagcggagtagagtagattagtattcggagtcctcgaggtctccggaagagttttggtatggctctagcagctcttgtattctcttctgtaatactttccgaattaatgaaatactcatttttatacatcttcggtattttgttcagtctgagtactggtcttacattatatctgtgttatattaattatgtgggtagcctaccagagaggtgtaatggtgcgggtttaatgtctggtttaccagttgctctatgtcgtgtgcgcgggtatagagtagtatttagtaatgtaagtgtggtacttagattattaaatatcattaattgggcatatatgctgcgggacagtagaggtgggccgctgatggtgatagctcagtactggtattcctccacgttagtatatattcctaagacaaattcctggggagggtactcctccgtatttagccccggttggacggccatgataggttgtcgtaaggaactgggcaacccggggtggtctctcgatgtaccaggaggacactgtaggggggtattggccatatgattgtatattagcagatgtaaactaggaattgagtgtatgttagaagtatagtaattgagtgctttctattttttcttccacttagttagaattattttattatgaggagttgaatagctttgcttcgtgtcactctacccctatattaaaattaacctctgcttagattttgataaatacaaataatgtatgtataaagagtattagcatagtctactcatattatcttcccttggaattaaaaatacgataccttggaatacttccgggtgaaatgctacaatagtatatccgtgtgcttgcggataacttccgtaaccataaatataccaggacaatttctgcgccattgctgaacagtgactactgtgacgacatgggtatcaagctctgcttcacctcacccgcccaccccaagagcaacgttcaagcggagcgtgccaacacggaaatcctcaatggcctcaagacgaaaacttacaacgtcctcaagaagctcggggactcatcgatcttggagctgccggcagtgctctaggccgagccgcgcaataggagaaactccatgtttcctcgtgcacggggctgaggcggtcctcccatccaagctgaccctggggtcaccctgggcatcactgtataacgaaaatgatcaagatcagcttcgacacgacgacctcaactaccataaagagcgaaggcaacgtgcagcccttcgggctacccgttaccaacaaagcctgcggcgctaccatcagtgcaacgtccgggcctggtcactgcaagtcaaagaactcgtcttgtgccacgtcccaacgcgtgcaagattgagcaaactctcacccatttgggatgatgttgagggtcgttagcgatcaatttcgaccatcaatattatcaaaataaaggagaactagttatgcttgcactgcatatccatgttagaataacaatattccacaagtgttaggttcattaaccttttgcagagaacaaccataaagtggaagagaaccgatatcaactcaaacgataaattaattggacgatgtcgagaatcagacttatgtccgaatgggccaagaactcagaattgacacgatcaattgggccaaaattcacaagtctgcgaagagaagcaacagaggaggcagccagccaaaacctgggctggttgggccggcacctggttcggccgaacccccctggcgccgttggatgcagggtttcttctagacggcgtggatcactccccaatgatggttggagggcagttccgaccattccaactgccacaaccgtcattggcagcctatttaaggagctcctcttctctctccacacacgcacctcaagcaagagttctctcatattcactcaagatagtttagtagtcttaagctagtggagtaggaatagagtagaaatcggagtccggaagccttcagaagagttcgggtatggctttagtagctcttctcttctctttagtaagctttgtacttttattagaatactcttctttatacatttatggtattgaaatactttccgagtacatggatgccaactttacattatgttcatgttatactgattatactattagcttatctcggagatgcatcggtacaggtatagtgtttggttatgcaattactctatgtcatgacaatgatattagagtagtatctgttagtttaggcgtggtatctagattgggggatatcattatttggggttatatgctgcagatgagcggtgggccgctgatggtgatagctcagtacgggtattcctccgcgcgtgaatatagtcctaagttaatttcctggggagggtactcctccgtattttgccccggttgtatggtcatgatgggctgtcgtaacgaacttggcagttaggggtggcttctcgaagtactaggagggcatcggttcgagggtattagctagtatgtcagataactagaatgtatgtatactatgtatactagaagtataggaatagatttcctttctcttttttttccacttagcttaggtaatttagtatgagaatgagtagcttcctgcttgtgtgtcattctacccttcgattatcttaacccctgcttagactatagttattacaactaacatataaattattagtcaggttctctctattatgatcttcccatgggattaaataaatacaatacccttcgaatactttggggtgaaatgctacaatggtatatccgtgcgcttgcggatgaactctgtaaccataatataccaggagtatttatgcaccattgctgggaattatatttctagtaatgtcgtttagaaataccaacaagcatttctggcaccgttgctggggaagatttgtaatagagattaccataactagtactttatattttcctctgtataatcactgtcctttgcaggctaaccttggttgttttcacttttattatggaaacagggtagtgcacgactggttttaagttgccagaaaacttcaaagaaaatccagaagctttcttctggagcgtcaggccgcgagtcgctgctcgacagaaaactctaccaacagagaaaccagccgtaccagcgtcaccgaccttcaagactatgactaacaagactctccgtgaattcgctgctccctctgctgacaatgtgaccattgggccacaaattaacctgggagacgtggattttgatttgaagtctagcctcatcacgatgcgcaggctagccctttctgtggcaaccaaatgagaatgccaatgctcatttacagtagttcctagagatttgcagcacatacaccatgaagggtgtcagtccaaacaacgttaggctacgactgtttccgttttctctccttgggaaagcgaagaagtagttttatgctaaccatgctacgatcaatacctgggatagatgcttcacgacattcctctcaaagttctttccgatgggcaaaaccagcgcccttcgcggaagaatttcaagtttctaggagacaagggacgagtccattcctgaggcacgggaacgacttcaagaatatgtggccgcctgtcctcatcatgggatggatgactggctgatcttgcaaaatttctataatggactcactcccatgtcccatgaccacctagacacggcagctggatgagatttcttctcaaagacggttcgaggagccatcgatttgatagagaagatggtctctaatatgggttggagcgaggaacgactccaaacccgtcagcgaggcatgcacaccgtcaaggagatggaaatgctcgctgccaagatggacctcctcatgaaatgattggacgaccatgacaaaaggccacaaggcatcgtcaaagccttggactcacacgttacatgtgaagtctgcggcagcacgggtcattctgggaatgattgcccggaaacccatgaattggcgatgtacatgggcaacaacaacaatgggtatcgtccacaaggaggtcaggggtggaatcagccatgcccatattatcaaggagctaacaacaacggtaacttttctaaccaaccctccttgaaagatctcgtttttgtgcaagctaagaccactgatgctttaagcaaaaagctagctgccaattacaagatcttagaaaacattaatgttaagctagatagcttcgcttctgctttccaaaaccagctgagctttaacaaaatgatagaaacttagttagctcaattagctgccttagtacctgcaaatgagtctgggaggattccggggcagcggactcctccattgaaaatgttaaggtgatcaccacgaggggaggtaagtccacttgtgatctgccatatcctaaccctgtaggaactaacaaggaagcgccatctggtacttcagctgacaaaaagattcagctagagaaggttgtgccacaagcatactatgacacgcaattgctgccatttcctcaaaggaacaggaaaccgtcagtggacgagcagtttgctcgttttgttgaagtgatctagaagattcacatcaatatgccgtagttggatgctatataagtgctaacatacgcacgttacctcaaggatatcctcaacaacaagagaccgctcccaacaatggaggtggtcaagctgatggagcagtgcaacaatgccatactccacaagttcccggaaaagaagaaagatccggggtgtcctacgatcacctgctcgatcggggcacaacagttcaaccaagccttttgtgatattggagcaagtgtcagcgtcatgcccatggacgtctttgaaaagctcaacttcacgatgttggcaccaacgccaatgcacctgcagctggccgactcattagtccgttacccaacagggatagcagaggatgtgccggtcaagatacgggattctttcatcccagatggtttcgtggtgctggacatggaaacaggaaaggaaacactgctcatcttggtgcatccattccttaaaactgcaggagccaacattgatgtgggaacgggaagtatccgtttccgtattaacgggaaggaagagaaatttgagtttcagccaaggactaaacactgctccatggtcagaatcaagtacgggccaaacctacaaaatatcctggtgaagttcatgcaaaatttcctggaaaaggaaaccacgtttcccaggaaccgttattggaacacactggtaaaacctagtgttccggccaagaagctagagcagccggcttagaagaagttgtctcccgcaccaaagccaaagaaggtgtggaagaaaaagccaaaggcgcccgctccatgacctctagagataggttgaaaatccgcgaactgaactgaaaggaggtacgatcttgcacatcggacctaaaatgacgcgaccttcgccaacaggtaaattggtatgtatctgcacatttattttcatcaacttgaatttttgcattaacacatgtttggatttcaaaaaaaaaatcgcatttaggatttttgaatttttgagcaaaccaaaataaaattttcaacgaaaatttattgtgccacgaccacattgaccgttgaaacccaacggccaaaagtgcggccggttgggcccacaggggttcggccgaaccggccaggcaacggttacatgccacttttggcagggtaacggctagtgggtcccacatgtcatttctaaccattgtaggtgtccaatataagccagccagccaagagagggaattccatcccatttcaacacattttcattccctctctaaagttttctctcaagttcattcaagctttgatagttttccttaaattcaaatacttagttgcatacatacaagttgctttggtgaaactaaccagcgggtgaaattcttgctattctaaccctcgccgagttagtccgttcttgctccattgtgtagaatgaggaggcgattgtctcgtttgttcaaggggtccgactcttcatcaagtcatcatgactagtctatagctcgttcatcagccgatgtctcgatggaggacgccgacgctccgcgacgtctcctgaacgacgccgacctcgatcttgtcgacgatcgggaaaga

SEQ ID NO: 27638 - DNA, 707 bp, Oryza sativa
ccaagttatgaaagagtggtcctgccttgacgacaacatgatggcatatcgacaagaggtacgcaaattggaagacaagttcgatggactcgagctcagtcacgttcttcgacacaataatgaagccgccgacagacttgccaactttggatccaagcgcgaggtggcgccctccgatgttttcgtcgaacacctttatacgccgacagtacctcacaaagatactactcaagttgcgggcactcatgacgtagctatggttgaagccgactggcgagagcccctcatacgattcttgacttctcaagaactcccccaagacaaagatgaagccgagcggatttcaagacgaagcaaactttatgttatgcatgaagctgagttgtacaagaaaagcccttcagggattctgcaacgctgcgtatctttagaggaagggagacaattgctgaaagacatacattctgggatatgcggaaaccatgctgccgcacgcaccattgtcggcaaagcttaccggcagggttttttttgcctactgcagtgtccgacgccgacaaaattgtgcgcacgtgcgaaggttgccagttttttgccagacaaattcatctaccagctcaagagttgcagaccatcccactgtcttggccgtttgcggtttgggggctcgacatggttggcccgtttaaaaaggcagacggcggtta

SEQ ID NO: 27639 - DNA, 15623 bp, Oryza sativa
cagtggtacacctctggccagagtaaaactattcgaatagccgtgcccgcggttatggcgagggtctaccaatgttattcgtgattagtctcacacctctcatcatgataccaaatgctataaatggtaataatttgtttagctcctggtttggaatggtatattcctggtttggtgataggactgtgcagccgggatggttgttcagaatggttgggcctatacaaattgtatagcgttggattaatattgcttaattattaactgctttattaaaatctgaaatgtttattaaatgctgtttatgcaaatgaaaccctactatgccatcctttgttatcctgtgcacttgcatatttgctgcgtgacttgctgagtatgtcatatactcaccttgcaatcaatcatcagaggaagagttctaccgtgaagccgatggggtggaggattaggtgtagccctggtcaagctgcctgtggagtggagtcgtctgcgccgtttatcttttctttccgctgcttagatctttattgattgagaggaactatctacctctgtaatgacattttattcgtttattaattagagtaagaattgtactctattatcaatttgttattgtgtgcctcggatgattcctggatgagggttcacacacatgtaagcgtttggaattttggatagaaattccgggcgtgacaagttggtatcagagcctccttgaccctaggttatgccaaatggttacccatagaagccctctaaaaatattggaaaagtagaactgttctcctccctttctcttttaattaaaccaaactaatggcacatgtatttcataatatttttttagtggttctcattcaaaatttattccagtgttattagtactgtactactggctcatttaccagcaaaagttttacaatattgttttatttaatcttgctgcaatgaaataaatttagcatgttgattttataactttcttttatttcttttgaaacctgttgttcaaaagtacaaaatttgtgaccttatttccaactatttcaacttatcctgcaagcttggtttactttatttacttaccttttactttgattttctaactttactcaaattaatccaaaaacttgtgctattaattggataaatgtcttaactccctcctttcacttgtctttagatgccgcgctacaagcctgagtacctgtttggtgttgagggttttgtccaggagttgcgtacgatgtcctttgtcattggatttgggactgcccctttttatgcccagattcctcatgatcgtcatgaagagaagtgtcgagtcaaagtcactttgaacagtaatagtgaagaggtcccctcagtaatgttcgaagctggaggaagaaactacatccatgcatgtcaggaggtggcaaggatcgccataggagagctccgcgatcgctacagtgatcagttggccgacactgagtatcgctaccatcctcgtcaaccacagggaagtgaccgtggcagttaccttgagactgaaggaattgaaaatgatgctaccacaaggcatttggttgagatgttgtgggctatggatgaaagtcgtgcggagactgtgttagcagctcaagatcgtgaagaccggaatcgtggtaagatttgcaagctcgaagacaaggtggatcgtttggagaaggaactagccgcattgaagggagaagcaccgccgcagaaggccaggattcgtctcaccgcaaggaagagagctctatttgtccctcgctaccaattggcgccaaaggttcgtgtggtggagaaagaagttgccccaaccttagcagatcctccgatcatcatcataagtgatgatgaagaagaagaatccaagcgcacccattccaagattgagtgggtagcaactcaagatgatgaagacgagcagaacgagccttcaatcgacctccgatgctcggaagaactagagtgacttgttaaatcgtggtcttagatcgttgtgttagtttgcttgctttaagtttgcttgtgtgtgggtcgcatgtgatttacatcagtggtgggatgtaattgcatgtgtttgtttgtttttgagtgttaggtgcttttgagtgttaggaagttggtgagtttagtggtgtgggagtcttcagtttgtaataataaaactcagttaagatcaataaaagttaaagtaattctctatcctaagtagtttcccccgatttctcttcttgtgccctgccagatggtgaacactcgcagcaacgggaatggccccagtaacaataacaatggagagaatcccactcttgctcaagttcttgctcaacagacacagctaatgaacatgatgatgcaacaactccagaaccagcagaaccaaggaaataatcatgtacctcctcagaataagttagcagaatttcttcgtgtgaggccgcctgttttctctagtaccactaatcctgttgaagctggtgattggctgcatgccatagagaagaagttggatttacttcagtgcactgatcaggagaaggtctcatttgcatcacatcagttgcaaggccctgcctctgaatggtgggatcacttccgcctgaataggattactgctgaacctatcacttggcttgaattcaccgctgctttccagaagacgcatataccatcgggagtggtgtctctgaagaagaaggagttcaggtcgcttacccagggatctcgctctgttacggagtatctgcacgagttcaatcgtctggctcgttatgctccggaagatgtgcgcaatggtgaagagcgtcaggagaagtttttggaaggacttaatgatgagctttcttacccactcatgactggagattatcatgatttccagaagctagtggataaggctattcgtcaggaggacaaatacaatcgcatggagcagaagaaacgtcggattgctcaattcaagacacaacaggggaataatcagaagccgcgtcttactttaagaccccagtccatgccacatggaggttcttcgtttgttgttcgtccgcagcgtcagttcttcaacaacaatgctggcaacaacatccgcaatcaagctccacgtcctgttgcagctccaacacagcaacaacctgccaagagggagcaaggcagcaagcccgtggtgtgtttcaactgtggagacccaggacattatgctgacaagtgtccgaagccccgacgcgtgaaggttgtccctacccagagcaactctacggtaccagcatcaaaggcccgtgtcaatcatgttgctgctgcagaagctcaagatgctccagatgtgattttgggtacgttccttgttaactcagttcctgcaacagtacttttcgattctggtgctacacattcattcttatctatgagttttgcgggaaatcatgggatggaagtagaagatcttagacgtcctttgatggttagtaccccaagtaatcaagcactctctttgcatcgtagcccctctgtcagaatagaaattcaaggagtaccatttctggccaatcttatcctgttagaatccaaagacctagatgtcatcctagggatggactggttagccagacataaaggtgtgatagactgtgctaacagaaaagtaactctcaccagcaatgatggtcgagttgtgactgtttatgcattgtcttctgagtctttaaggtcaagattaaaccaaataactttggaagagattcctatagtccgggagtatcccgatgtgttcccagatgatttacctggtatgccgcctaaaagggatatagagttcagaatagatctggtaccaggaacaactccgatccataagagaccttatagaatggcagccaatgagttggcagaagtcaagaggcacgtagatgatttgcttcagaagggatacatcagaccgagttcatcaccatggggagctccagttatttttgtggaaaagaaagaccatacccagagaatgtgtgtggattatcgtgcattaaacgatgtgactatcaagaataagtatccgctacccagaattgatgatttgtttgatcagcttaaaggtgccactgttttctccaagatcgatcttcgatcaggatatcaccagttgagaatcaaagaggaagatatacctaagacagcttttaccactaggtatgggttgttcgaatgtactgttatgtcttttggacttaccaatgcccctgctttcttcatgaacttgatgaataaggtgtttatggaatacctagacaagttcgtggtggtctttattgatgatattcttatctactcccgaaccaaagaagagcatgaagaacatcttcgccttgcattggagaagctacgagaacatcaactgtatgctaagtttagcaagtgtgaattttggttgtctgaagtgaagttccttggtcacgtcatctcagcaggaggagttgccgttgatcctagtaatgtggaatccgtaactaattggaagcaaccaaagacagtttcagagattccagttttctaggcctcgcaggatattatcgaaggtttatagagaatttttctaagattgctaagcccatgacacgactgcttgtcacgaccggaaataacccaacgggcgttcttacgtgcgtgcattaatccttgtcccaggaggcaaggtacaccaaaagttgatacaattcagagtttaacaagcggaagcgtaaatagttaatttattacatgggcagcgaaggcccagcacacacagagacaaacgagaaacagtggaagactagggcgacgaccacaggcacttgacggtaggcacgagctagacaccaaagccttcatcttctaggggctcctcttccggggttgggaaaaattgagcaagactgagtacaaccaccgtactcaacaagacacacccacaagtgcagaataaatgcaagggagtacaaaggagttatactataaagggttagggtttgcagtaaacagcatttaaaggtatttagttgctcaaagctattttgtaaacacgattctagaactatacaatattatttatcaaggccgtgaacccacacgaacctgccttaacccaaggcctacgatgattcagaccgaactggcaacccgaccctgggtcccagctcgtcccaagccaacccaggccaaccattccacattttagttgataagcaggttttaagaattaaaacactaacttgggtacattgctcggcttgcccataaccgagggcgcggctattcgaatagattatactctgatcagaggtgtacatctttacccacaagacacatcttcctcacgtgcaaccacgtgccacataccaccatggtatacagacggaagacgtgacatagtttccaacccatcctagccatagacaagagtaccgacccgatcccacctacggccggaacccccgggacaggcaggcaggactgagcccctagcagcaggacaccggccctgtgccatgacatctcgactaccgggccgcagctcgtgtagccttcatttgccctagagatgtcacccccgacttcgtccatctccatccgtgtacttttgtttataactagactgagccacaaactaagccttacccactagacatgtggaagtacggtagtgctttgcaacagaggcccgaagaccggtccttatatggccgaggtgctactatcaaaaccatgcaccccgagcccagcctaaaaccattttggggattttgaatagagggggcggtgtgaagccaattccacaacaaccaaaccattccaaagtgtccaggtgatatgaatattcccaaagtctagagttgtaaaccgcctaatgttacctaattaaattgcgaagcatctacctaaaattatactagtggtactatgagtagagtgtccactagttggggttttgtttattctagggtgaataaggtaataataacaataacaataataataaggtcataacaaaggtaaataggcatggctaaataaaacagtgataacgcgggaatttaaataaagcgataatgcaataatttaaatcaacctaattttgtaaactgggattcaatatgttcaaagatgatgtgacttgccttgctcgctttcccaaacgtcggcttcaacttccacgaagagcggatcttccgaagctgcagcgtctacacgaccaacggaaaagaaaaggcttttactctaataaaccccatataacaagcagaaacaaagcacaaaaatgggttcttgacttcttaaggaaaaattagagacttgaacggtccaattccgagttcaaatggccaagttatggccatttgaagtttatatgctctttaaatggatatttgcgaatttcttcatttaaattttaatttaaaatcggatttattgcgtcagccgaggggaggggcgcgcggaccgggtccacgggagtggggcccacgcagcagccccacggtccacggtggaccgggtgcacgcggcttacgccggccggcgccgtgggtcccacgcgtcagccgcacccgagggcgcgggcggctgacggccgggccccacatggcagccgcgggacgcgcccgaaggcggccacgccggcacagccgacgggaggcggagcgcccgcgcccctatggtcgccggcggcggccataggcacggcggagcggcggccgagagaggggagggaagggggaagcgaaacagcggtccacggctcaccccgggtcgacggcgacgacgggaatggcgaccggagcggaggaaggcggcggcgcggctcgggttgccggggacgccggcgttccggtggtcggcgggcgaaacggagggggtgacgaggtcggcgaggtcgcggcgaacccgaaggaggcgacgccgaagcgggagaaggtccggagcgacgacggcggcggaccggagctcggcggcgacggcggagagagagagcgacggcgcgggctcgattccgacggggagagagagcggcgagtggcggaaacggtggaggaggcacggggagtgtttatatagggttgggagtgagagagggcggccggaggagaaggaaaccggcgcggcgctctcgggctccatcaatggcgccggcgagatttgcgggagcaaatccgcccgtttgaacgagagagagagagggaaaaatggggggaaagggagagggaatcacggggagtgatttccccctctttattgcgcgcggggacggcgggaggcggcgggattcgcggcggcagcggcgctagggcacgggcgaggcggcgggagcggcgcgaggtaggggatgacgggtgggccccacccgtcagcgagggtggcgggcgggcccgcccgtcagcggcgcgcgcgcgggggaaggcccgatgggcctcgggggacaggacagagacggagggagctgggccgatccggcccaataggcggagggggggggggaaaaaaggacttttagggtttttctttttataaaaccattttaactttgtttatttcttcttaattattatttgtgctctgaaaattccactaaaatttatttacgcattttaggcttttaggaaatatacaaaaatcctccaagccttattcgacttttaacttcgcacattttaattgttggaggctttcacaaggattttacttcttctaagcataattttgaggatgtgttttagagtcgttttgggacgcgacaaacctacccccgttaaacggaatctcgaccccgagattcggaagaactggcgaagagatcgggatgggctgccttcagctcgtcttcacgctcccaggtagcttcttcctcggcgtggttgctccactggaccttgcaaaaacggattacccggttcctggtcctgcgttccatggtgtccaggattttcactggcttctccacgtaggtcaagtcttcgcgaacttcaatttgctctgagtcggcctgctcggatggcactcgaaggcatttcttgagttgcaacacatggaacacatcatgcacgttgcccaaggaggcgggcagctccaactggtaagcaacttctccgcgtcgagcaatgatacggaaaggacccacataccgaggtgcgagcttcccctttgtctgaaacctgtgtacaccgcgcaagggcgtgacccgaagatacacaaagtcatccactgcgaattccaggtcacggcgtcggttatctgcataacttttctgccgggactgtgccacctttagattatcccgaatggttctgaccttcgcttcagcttctctcaggatatcagtcccgaacacttggctttccccaacttgatcccacaatagcggtgtccggcatttgcgtccatacaacgcttcatagggtgccatttgtatgctggcttgatagctgttattgtaggagaactcggcataggggagactcttatcccaggtcttcccgaaatctaggacacatgcgcgaagcatatcttctaggatctgatttagacgctcggtctgtccatctgtcacgtcctgataaattcatcccgaaataaaaatcatcttctaaaaggaataatagaattaattaaaattcgaaaagaaattggcaaaccttaaaatacgtacaagaaaaattcaaatgtgacccggagaatttttgttaaattctccttggtctaaaaggagccctcaaattttagtggaattttcagagcacaaataataattgaaaagaaataaacaaagttgaaaaggtttataaaaagaaaatcctaaaagaagtcttttccccctcctcctcccttcttgggccggctcggcccattccctccctctctctctctctttccccccggcccatcggctcctcccccgtgcgcgcgccgctgacaggcgggcccgcccgccgctctcgctgacgggtggggcccacctgtcatcgccttcctcccgccgcgcccgccgccacgcccgtgccctagcgccgccgccgccgcggattgcgccgcatcccgccgtccccgcgcgcattaaagagaggggaattactccccgcgtttccctctcccgattccccctcttttccctctctctctccctcggattcgtccggattcatcccgcgaagttcgccggcgtcttcaatggcgcccgagatctccgcgcgcggttctcttcccgggcggcttcccctgccgtgctatatattcgatccccgtgcttcgctcttccgtttccgccgctcgccgctcgctctcgccgtcggtttcgtgcccgcgccgtgctcctctctctccgccgtcgccgccgacctttggttcgccgcagacgtcgctccggtcctccgcccgactcggcgacacctcaatcggcttcgcagagtggttgccgaccccgtccgccgctccgcttcgcccgccgaccgtcggagcgccgccgtcatcgtcatcacgagccgcgccgcagtctccctccgctccggccgccgttctcgtcgtcgtcgttgtcccggggtgagccgaggaccgccgttcgccttcccccttccctcctctctctcgggcgccgctccgccggccgatggtcgccggcggtgaccatcggggcgcgggcgcgccgctcccgtcggccgtgccggcgaggccgccctcgggcgcgccctcgcggctgccaagtgggcccggccgtcagccgcccgcgcccgcgggtgcggctgacgcgtgggacccacggcgccggccgccgccagccgcgtgctcccggtccaccgtggaccgagaggctgacgcgtgggccccacccccgtggacccggtccgcgcgtcccctccctcggctgacgcaataaataggatttttaattaaaaatttaaatgaagaaattcgcaaatatccatttaaagagcatataaacttcaaatggccatatcttggccatttgaactcggaattggaccgttcaagtctctaatttttccttaagaagtaaagaacccatttttgtgctttgttcctgcttgttgtttggagtttattagagtaaaagccttttcttttccgttggccgtgtagacgctgcagcttcggaagatccgctcttcgtggaagttgaagccggcgtttgggaaagcgagcaaggcaagtcacgtcacccttgagcatattgaatcccagtttataaaattattttgatttaaattattgcattatcgctttgtttaaattcccgcgttatcactgttttatttagccatgcctatttacctttgttatgaccttattattattgttattgttattattaccttgttcaccctagaataaacaaaactccaactagtgggtactctattcgtggttccactagtataaatttaggtagatgcttcgctgaataattaggcaaccttaggtggttttataactttagactttgggaattctcatatcatttggacactatggaattgttggattatggtggaattggacatacacctctctttctctttcaaaacccctaaaacctgttttcggtggggtttgggtgcatgccagttatgggaagtagcaccccggccactataaggattaagctcgggcctctgttgcaaagcactaccgtactaaccacatgtctaatgggtaaggcttaactcggtgctcagtctagtcctgaacaaaaggacacggatagagatggatgaagtcgttgcgacgatggatatctctgaggcaaatgaaggctacgcgagctgcggctcggtaatcgagatgtctaggcaaatgaagactacacgggtcggtgcccgttagtcgagatgccatggcactggactagtacgcgggtggtctcacccctatgtgtgtggcgcacccggtctagatcttgttgctaggggctcaaccctggcctgcctgtcccgggataccggccgtaggcagggttgggtcggtacttttgttcacggctaggatgggtgaagggttatgtcacatctttacgacgggttccaaggccatggaatgcggagtaaagatgtgtcttgtgggtaaagatgtacacctctgatcagagtaaatctattcgaatagccgagccctcggatatgggcaagccgagcaatgtacccaagtcagtgttttaattcttaaaatttgctcaacaactaaaatatggaatggttggcctgggttggcttgggacgagctggaacccaggtcgggttgccagttcggtccgaatcatcgtaggccttgggttaaggcaggttcgtgagggttcacggccttgtttaataatactgtgtagctctaggatcgtctttataaatggctttgggcaactaagtgacttttaaatgctgtttactgcaaaacttaatccctattattattcccttgtacctcccttgcattaattatgcatccgccggtgtggcttgctgagtactgtggttgtactcattcttgctcaatccctcccctcttcagtaagagaagctttggagaagatgtcttaggtggagtcctggcttataccccagttgagcgcctgtgaagatggagccgtaggcccgctagtccgctgctgtttatttttgattgtcaggcctgaagcgcctttgtaataatgtaaatattatcgatataataaagatgtgtcttttatatcatgtttgtgtggtgtaccccggcttttcctgggacggggattaatacactagcgttcgggaaaaggcaattttcccggtcgcgacaagctggtatcagagccatctcgactgtaggataagccaagtggataaaacctaaggacatattttatgaataaaactatttgcgaaagttcctttttctccttcccctaatgctatttgcaaaaggtttactccgttcttccttcttcggattttcaactagtactagatggtcagctttgcgaagaagaagatgtcgtcaattgtttgccgaagctccggaagactgcaggatccgctagtgaagtggaggaagcagtgaagccagctgtgaagcaggagtgaagatcttggagaacccgtcgcagaacctaagccaccctctagggtagagtcgttagtcgtgtgtttccttgtttgtgtgtgtagcgcgtggtttgcatcagtggggtgtgatgtaaccatgctaggttgtttgcttaatcaacttgcagaataagcctaacatacatcataacagcaaaagacttagatctgttaaggtcctatccttagtttctaatctgtctctcccctttgttttccctctctccctctccaaacctttgcaacagatggctgacaatgagaaaggcaataaggtcagaagtcaggacattggtacctcaagctcccgagtgaatgaagcaccagacaccagttgtgtggcagtggtccaacacctgattaaccagaaccaattgcttatagagatactacagcagcatcggatgccaattttgaacccgagtcagatgcaacatcaagtgcagttggaggcagtccaagcactcacaccacaagtcagcgcaccgccaacatcccagaaggcccctcatgccatgccacatgttgacccaaaagaagcaagtatcatctgttttatgtgtgatgagcaagggcactacgcaaggaactgtcctcagcagaaaagaaaagcaccaatgcgaaccgaagatgaagtccgtaagatgatcattaccagcacagaatggcctccaccaggaatgacaaaacatcagagaagaaattcctcccgaggtgcacaacagttgacagagcatcttttagctaatggaggtagagtgtctggtagtgaagattcagatcaagtctcctcagatgatgaagatgcgaagtctccccaaggctttaaccagaataaaatagaacttaaggcatgctctcgttgtggagaaatcggtcatgttgccagctcgtgtgcctctacatgcgttcattgtgaggaagaccatccacccgacaggtgtccaacgagcaggatcacttgtttcttttgtgaaggaactgatcatgtaccaaaagattgtcaattcagttttctgctgacgaagaagatggccaaccaacccgccagttccaacggagagaagcatcaaggcaacacaaatccccgccaaggtcaccgtttcagcctaactccagtgccaggacagaggaatcgaaatgagaaaagaaaatgccgagtccgggaagacatctgttgcttcaattgtcaaggaatgggtcatttcgccgacaagtgcccaaaaccgagaaacatagctgccggcacgtcagtccacgcaactccctgcaatcagaagcttgctcctcaacgaattgtcatccatgcatcccgaagcagtcctatagcccgcgttgcaacagctccaattccaatgaatgcactaccacaaggtgtcaatgctcaatttcagccccagccaccagctgacaagacaggggccagtatctgcgttgtacctttggaagttccaatacagcagctgagaaatcaagtacaagatgaagaacccgagtgtaagaaagttattgtttgttacaactgcagtgaagaagggcattactccaaaaactgtccccaaccaaggcaaaatcgacctccacattaccgccaatttacacgaagcagacattccaatcgtattgtggtcactggagcaaacgccgtacccgtaaggcctcgtgttaatcagaacccatagcagaaacaatgcaccaatgctcctcctgctgcacctgactcggcaataaatcttagcaaccattctctgcatcgacagcctcagcaaagaattgttgtagatggaagaagttgtgtctctccccgacctactccaggcctagccaagggcaatcaacctccggagggcgataccaagcagaagaccgtcatccgcttcaaccagcaatcagaaggaagcttctcctgtgaatgatagcattatgcagtcctatcacatcatcacagaaccaatcgaggatgcagtcactggaacaatgccagctatatctctccagaatcaaaatgagcagccatgtttgtggttttcagtccgctacttatcatggtgtaatcgaaagtttgcagcaatcatgtaatacataaatatattcatgtctataaacagtgagcttgctatgcttatggatgattcatattgagaatacaatgtaccgatgttaagcaccgtccctttttgtttaaggcagtgcctcgtattcatgtaatgagggagaaatgtgtaatacagacaagttccatgaggattcgtttgaaagatgcggatatgtgatcatgtgtataattgtttactgacaaaggagacctagggtctcgtgtcagaggaactatattctaacctcgagttaatagccaacctgtggatggaaaagaaaaacaattaaactgtgttgggttaaaaagctaacgagacagtagttgaggataggagttcggatacgccttttacagatcaagataaggattgttggaggaaaccccgaagggtacccgccatacctctacattgataagatcggatatacctgccaacagataaggagatccaggagacatcaatatttgagaacataatagtcgatggttggtaattagtttatctggtatcagaaaaaggtcaaaggtgatgtggcagaagaacaatttggatgctccccatctcgaggaagcactaaagatgaccatcggcaattaaaccctagtggtatagatacagatagcagacaatgtatttccctgaaggtagtcagtgcagcttttgacgaaccacatcaaggtttcaccgaaaggcagcaagccaaaggacctcatcatccccagaagcgtccgcaatccacattcaagaataccacctgttagagataagccgaaagatgattgataaaagagattggcaaagatgttctctagcataaaagaagtaggccgaaaggtgattgataaacagaaacatgctctgcatcgctcaaggaagacccctgattgtaattgccccgcaacagtcaccttgtcattaagtaagcaagatgacctaggtaaaagtgtttctatgaaggcaaggagtgaaatcttcaactcggtatcagatgctacacgaagtgaaaagtgcaagcaccggttaccaggtaatgccaagtcttgggagatgatccaatgggaaagaacacatcaaggttaaaagtgtaaaggaatacgttgaatgctaactgaggacaacctgaagataataatgggaagtaaactgaatgtaaagaaagtgaatccgagctgcttgttcgtgagagccattcccagttatagaaccagtgatatgttcgaagatagtctatagaggtcaggttaaaatcacctctcacaacgaagcctcagatttgacagggtaatgattagacaataacaaatccagcagtaaagccatttgggaagacgtcaaagtataacaagtaggataagttggctctcttgggaagcataattcaaaggtaaagtta

SEQ ID NO: 27640 - DNA, 10136 bp, Oryza sativa
tatacatggtggcggcggcatccaaggctgatatggcggtggatttggcgaccgcgcaggcagtaaacagagagagaaaaagagatggaggatgaaggaaagaggctgacacgtggggtccacttgagggcaaaattgataattcacaccatccatcatccatgcttggcaatcggattattctgcttacgtggacaaaaaaatggtataaaattaagatttcttctctctccaatggtaaattagtatgtgtaaacttaagagaagtacttggataattgccaaacgaaaaaatggcaaatagttaagttttctaccatgggcaatggttctgacctcaataaggcttgagcgacaccacttcgtctcctttctcctccacagccgcccatttgtgcacctggcctacaccaccacttgatccatccttcctctcctctcttctcttctcttccctttgtctcctctatgctaacggcgaagtttggcctcttctccgacaaaggccgagggagctcaagcttagacggctcgccagtcgcctccctcactatcaactcgtaaacggcgcgaggtggaaaagaaagagaagaaagaagtttgacactgatatgtgggcttcacatatatttctttattttttacttctcactttacacgtgggtcatgttttttattttctttttattgattaggatgccacgtcagcgaaaccaaccatccataccaccacattcattctgccatgagatctaatttaacttggtttagggatatgattttaacttcattgcatgtggacttattcccggtcgatatcccattcgaaacatgtgttgatgcgaaaacacacacactggcctgggagatctgcttagctccagtgcagatccaagggttgatgagatgcgggtatgtcagtcagtttgatcctgcaactaacaagatatgtaaacagcagatcaagtagccgatcggttgtcaagccgatgaagtgattccagccgatgccgataccagccgatagtgatagggttttgagatatcggctatatgtttgatgtagagtctgacactagatataaataaagacaatcggctgatgataatataatataacaataataatatctagtggaaaccaatcggttaacaatatgatatgatagaacaagcactgatccgatggttaaagcatatatcggctggaggtccgatgtcataaaatccacaagattagattaaacagtgaaacctctgttgcgatcggctgaaccctacttgtatgtaatccttataagccgatgcgacgtccagataacttatcggcttgcaccccgataaaacactaacatgaacctatcggcttaacaagatttatattatcaacaacagtctagtaggttgaacctaaccgatgcagcacaagattgtatatgataatctaatactcgatgagccgatagatctgtctaatgtgatggatataacaaatctatttacaacagcattgtgattgtagagatatatcggctaagacagaagatcagacctaactgagacagttccaactaaaccgatgcgtctctaaacacaatgcagttagagatagaattgagatatcaggtaggcaaatatatcaaccaaaccagagcgatccaagagatcaatgcgatgcagccttgaacaacaccaacttagccaatagattcacctggcccggtggaacgtaggacttaccccttcgctggagatcgaactgaaccgatgcagccccacgtcaggtgccaaattccgctggttgataagtaaaacctcagaaaaaagggtggcgatgcgctgagaatagttgtattgatcgaaagattgattcacaatgaccctgggtgtacatatttatacccatggggagatactagtccttgtaggacaagaaagaaactttcctaaagataaaaggaaaagataaagtccttatcggacattgaacacaccttcctaaagacaaaaggaaaagataaactattcctaattaatagataaactgccatgccatatcctccttgaatttggactcttttagataaattttctttagttgatcgaactccatcgagaacacaacttctggcgatttgacgactctcatcggctaatgccaggactctgaagccaatactgactctaagccgatgattactctgggcttaccaaatttcactgatagcaacatgttagaccttgtttggctaattccacccacaaaggtctcaatcccctccttgtgggaataaccgaacaagaccttatatatgccataaaagagtcgcaattagggatggcaacgggactgggcagggctgagttgggctggaatggccccagccccactcctccgcgggtccatccagcccctacccccagagtggagggagatttgaaatcgatccccgccccaccctctctggggacccgccacacgacgggggcttgctgcactcgcatgcaaggatgcttggaggaggcggtgcgaccgcacgtcacgttgacgagaggagatggcgaggctgaccggcggcgggtagaggcatgcctgcgtggaggtggagtgagatggaggccgcgcgatggcggttggaggcacggtgacgggcgaaggtggcgcgacgtgggccaaccgatggcggctgtgggggatgggtgacaggagtgggggtagaggatgggggatcgaggaatttgggtttagtaaatatggctcacttattgggtcaactaagcttctattgttggaatggactactttttaagacatatctcatatccagagcccccatcggtttactcgtgtatgactaatgatcttcatccccgtccctagaaatttgcggggccccatccccagtcacccatgggtgagaacccccaccactgccccgtaggggcggcccccacgggatccctggccccaatgtgaaatttgtcaccccaagtatcaatcccgttctggcccatgggccgcacgcgactgtaatcccaagcccacaagggcccatcaggccttcttaagagctccccgcgagtccaaacccgaaacgcgaaaaaacaaaacagaaaaaaaacaaaaaaaaaacatattatttatcgagcaaatgacacaagtttatattggtggcaaccgattactttatcaagtgggtagaggcgattcctttgaagaaagttgattcgggggatgctatacaatttgtccaggagcatattatttatcgatttggtattcctcagatcattacaaccgatcaaggctcgatcttagtgtccgatgagtttgttcaagttgccaatagcatgggtattaaattgttgaattcttcaccatattatgcacaagctaatgggcaagccgaggcgtctaacaagagtttgatcaaattgattcagaggaagatttctgattatcataggcagtggcatactagattggccgaagcattgtggtcctattggatggcttgtcacggttcgatccaagttcctccttataaacttgtttatggacatgaggcggttttaccatgggaagttcgaatcagctcgaggaagacagacttacaaaatgagttggcagccgatgaatattacaatctcatggccgatgagagggcgaacttggttcaatcaagattgagagcccttgcaaaagttaccaaagataacgatagaattgctcgacattacaacaaaaaagtggtggccaagtctttttcggaaggtgaacttacgtggaaattgattttgctgataggaacttgtcacgcccagaaattcacgaaccagaatttctaagctgaatgtgtattaaacccctgtccaggaccagccagggtacacaaacgacaattgttgacatacagatccacgtcttacaaaaatacaaaagattacaaatgcagcgaaaaaggtaaaagcgagctaagccaagacttgactcctgcagcgggcgattccattccacaggcaacccttgacggcagcgacgaaccaaccttttcaagacatctccaactgagaagaacttcaactctggtgtgggggaaaagagcaagactgagtactacccactatactcagcaagtcataccggaagaggaggtatgatgcaggatataaccaaaggaggctacggggttcatttgcataaagcaggcatttaaaaccagtagttgaaaacagtaaaaacagttgtagtaattaagcaatattaaccagtcactgtccaacgctacgccacgttgcaacaggcccaaccaaccacctgaactacaccagttaattaagctaaactaggggtgagactaatcatggtgaatctggtcgaccacccataaccgcgggcatggctattcgaatagttttactctgatcagaggtgtacaactgcacccacaagacacagccccacgacacgttcccgtgcgccgacatgccaccacgacataccggaaagaggccgtgacaggacccttcgcataaccctctctaaccgatcgcaccacaccttagggttcgcccccgtccccagcaggcaacgggcagcccccctttcatgccgcggtgaatccggaagccgatcaaccggacaccccggccgacccaactccatcacgcccaccctcgcctgggtacatcggctagagaaaagctacactacaagcccagccgttacccacgctggcttgtggtaagtacgataagttcttccagggcatcccgcgaaccggtccttaatcgccatgggcacgactagcaaaaccatgcacccacagcccaccatgtagtgtattttaattaaccaacaccattgcggtggcactaatccaaagctattgccaataatcaaagtctatgctttaatgtgatccccttttgtgcactagttgaactaagcttggctaagcatctcctaaaccaatatctagtcattttaatacccaagttatcaatggcgtaagggaaacaacatatagctgagtaaaaggacccatcccacatgatattgtaaaacaatgcaatatttaatagaaatgcgggacatttgtaaattgggtacaatatgatcaattgcaatgtatgacttgccttgctctcgcactgatggaaccacagtaacgtcttcgagaaaccacgaatcgacaaaacgggcgaaatctacgcaacaaacaaaacacacaagcaaaacatgctataagactactgaaacaggaaacaaaaccatttttaatggattctatacatttttatgaatttactgagacttgaatggactttatcggagctcggatgaattagttatgatttttagaagattatctgtgtttttactaataaagaaaaagccttaatgtatttattgcgcaataattcatcccaggactgacgtcagcaaggggtggggcggcgccgacatgcgggccccactggtcaacggctcaagggggagggaggggtactggcaggcggggcccaccgggcggcgactcatggggaaagaaggaaggcggcctggctcggctcggcttcaagccggctggccggttaaggcgagggcggcggcggcaagcggccaccgacggcggcggccggcgacgcgggcgacagtgcatcgcggcgacgagcatgcggggagcggcggcgcgcgcgggaggaagagagagggagttctgaccggggttcggccggcgcgggaggagacgacggcaaacggcgacggtgagtgaccggagggcgacggcgaacggcggccgagctccgggacaccctaagagaggaagtgtgagaggttatagggagagagggtgcccacgacgagcgagagccatggccgacggcggcggctatggtggtactcaccggcgcgcggggagaagcgggccccgacggcgggattggatggggatgcggcggccggggtagctttggcggcggcgaagctaatggcggcggcagattggctcggcggcggctccagcggcggcgagcggcgatcggaggagtggaaaaggcggcggcggcaggagcgatagagggcacgggagggagcggtggaaataggaaagggtggaggggattggagggatggtttatatgggctcgggaggggcggacgaggctgggaggcagccggatttctcgccaacgtggggaatagagagaaagagagagagagagagattcgaattcgaatctctctgttgcggggtgcacgcgctagtgggaggagtggggatggtgggcggcgacgtgggcgcggggcgcggagtggggcgcggaaggcgggggaggcgagcggcgtgggcggctcggtggttgccggcttggggagcggcggcgggaggtggaagaaggagccgacaggtgggccccacctgtcggtgacccggaggggttagggaggagggaggagccggcttgggccggcccagccaagggaaggccggcgcgggaggcgaatggactgggtcgacggcccaggaagagaggaaaaaggaggaaaaagaaaaagaaaaagaagaaaggatttttccagggatttaatattgccctttgctcattttaattggttaaaattattttcaaggctctgagaattccactaaaaatcgtgttagcatattttgacatgtagaatccaagaaaaattccacatgtcgattccgattattatttgcatttattaattagggattcatctctaggttaaattaaacaattacttcggacgatttattttatgaatttagagcaagggaggggaacttcagggcgtgacagaactcgagataacaagttcggcaagtggtcaccgaattgggaagggccgtttcaaattcataaggttgtgtccaaatgggcttatatgttgcaaggacttaatggagaagtctatggacgagcgctcaatggcaaatacttgaagaaatattacccaagtgtttgggtgaatgcatgatcggctggatgttgccgatgcatgttagccgatgtgtttacatcgccttcagatggccgatattgttatatcgcccttagctgttttcatactgtaatcagttgtgttttgccgatgtacaatggccgatattgttatatcgcccttagtttttttcatattgtaatcagttgtgttttgccgatgtacaatgaccgatatggttatatcacccttagtccaaattttaattttatcaatgccttcatcattataaaattaggggccacatatatacaagaagttgcaaatttttgagaattttttagcacattaagatctattaatcggcatagcagttcaattgcaaaaagggggtttcaaagtttcttagcgaactacaaaataagttatcctattacaagaccaattatccagacaagtaacgctggatagccgacacagcgcgttgtctaatttgatctacttcttcgatggcttggatgtcttgggcgttggttccagagatgactttaagggacttggtcatgtcagccacatttgtgatagccgatctcaatttagacttctgttcttcaacagcacttctgttcttcaacagcacttgggagattggctaacttttgcttttcaagatccaactcggcattgcattcttcaagttgagctataagatcaatcttgcgggcttaaagccgatctatgtttgactgaatcggcccaatagaaggatgatcaagcttggctttctcctcatgcatgagttgccgattggcttggatggtggcttcgatatctttccgctcccgccaatcggctatccgttacttagccttttccagcttgaattgatgttgttcgaggaatacagctagagtaatggtgtttgccagatcgtctgggattagggcttggatttctgcaaatcgtgcccgaattaaaccacagtcagccaccagattatccaatgatgactctagccgaagggatatatcttcaagtgttttcttgacagtttcatctagaggggctagagccttgcttgtggtttcttcctctatctcatcaaagtaatccttgatatcgaaagagaacagatcggctaagacctacaagagagaaattcgaagaaattaaatattaaatagatatagccgatctaaaatcttatgttaaggagagacttactgggatagcaggagcaattggttgttcttcttccccgacattatgacttcctgtagccgatggagtgtgatcacttgatgtttgttgtacaggaggtgaaggaggaggaggctgcaaaaaagacaagggataagtaaatatcagctatgatcagataagtgaaaggatttgtataggaaaatcttatcagtggagctggtttaagtgttgttgttgccgatttcttcttcacagcagtcttctttttctgaaaaaaggggatttataagtgatcggctatgaataaaatgattgcaaaaagaaatcatgagagatgtttacccttgaaaaatgagctggagcagcaggaatgggaggagtttgcttgggcgaagccgatggtgttttttctcctatatcactcaattcggctgctgcttgatcgatatcttcttcgatttcttcttcatccagagcttgctcgatggatggatctaaggtgggcaagtcatcggctggcttgggtttgtgcttcttcacgttcttcttaggagccagagccgatggatcaatggccgatgccttggtcttcctcttcctgccaacatcggttggttctctcatttgtccttgaagcagacttgaggtactgggggcatgatagccgatgactagaggagctaatccacctccgttaggtagaaggcctgcagcatattctatgtccctgccgctattgctcttgcgaggaggagaagattctgttgtctgcaagataaagagagaagttagtcaagattcaaatcggctaacaattattcaaacaaaattggctaagtaaagatgtacctgagggacaacatcaggaaataggtctgtcatgtacatagaagctaactgatggaatatatgttgcttccattctccccaccatcggtcaaagtttctgctcctaaaccttgccagctctatgttgtcaatgctccccaaagggggtcctgggatattgagtagccgatccatcatcagtgtggatgagatctaccctctgcattggattttatcggcaaagaataagccgattggtagctaccccattccaaattgcctagctaagctcatttggtgatagaactcataagacacctgtatgtttcttccttgatggatgccaacaggaagaatgcatggactaatggcagtcgagaagacttctctggatttttgatgcttttcagagttgatgtcctcaaacctaaagtctgccgggaggtcaaaattcactgagtcctcataagggaaccaaatccgagcatctctctggaatccctcgtagaaactacaaaaccagtctttgagtagttcggccgataactttgctctagaatcggctggtgttgatgcagcttcaccatatgacatacatcggcggtgagtgagttcttctccatcatcacctgtgatcggctccagcctcgggaattgtgcatctatcagaagtggccgattcacaaccttcatgacaacaaggttgagccatgtttgcagcagccaccatggtccacctgcacccactactgagcctatggctatcttggccgatgcattgctcaacatttcgtattgatagccaagaaggattttgcccaagagaaattgccttttggtttcaagggcttcggctaagaattgccagttggtagtcggaccacagctcgatccacaaaagagaaacttcttgagccacataatgagaaaggcagtgtgttctcgaggggtgacagatcccttgcccatgtatgctgctacatagccagacccgccccctatgctcttggtcctgaagtcaaactggttcttggtgtttaggcttatggggttagccgatgaagtcacatctaacacagtaatcatagtgatgtcgatcagagttggggtcattggcccttggttgaac

SEQ ID NO: 27641 - DNA, 4345 bp, Oryza sativa
gaacttgcttgctagccgatatatgcttataccacacagtccaactcttctcgggggaagttttctcaagagagggccaagacttgaacatgttcttccagtgacctagattcgggttggccaatctaaaaggaatcctattggtttcagcgatgatgaactcaataggatcagggttgccaatcggaccaagaaaatagtgatgctcatgcgacaggctaggaatcgcgaccagattggacagatgctacagatgcaaacaagaatagagaagaagaaaacaagatgagacaaagaagaaccaatctattgcgaaaggagaggatctagccgatggatacttacctctgtgtatttggccgatggcgcgatagacgggctggcggaagttgacatcgccacaggcggagatttggccagaagggaaaatcgccttggggtcatgtggtgcgccgaggggatcgccggagagagaaaagatgagtttggcttaagcggtgaaaacggaggtgacggtgtgaagtttcttaggggtgacggttagtatttaaagcgctgcggtaacggtcggaaaaacagcaacgagcgatattcttggagaagcagatatggcaaatccgaaacattaccaaatattccggacttggggggcatgtgttaacaaccaaatttggtaatttcagtatcagagacaaagataaaactgaggtggaatccaagatggaaatcgtttcggaaatagagaaaggatcggctaaagtccgattcggctgcgaccgtgatcggcagggtccgagttggacaaggttagtcgattaagccgaatccgacaatgtgacacggtacacgttgtcgggttgagttaatgtgcttcatgaagattgccacgcacggattgagtcctgagaaggcaattgtatctattaattaggatatttcatgtaatttctttagagatatatttgggcaaaagtctgccgcaaagacttatggtattttagagttcgttagagataagagtcgtgtctgacatggacatattttgtaatctcggggataaatagaccccgagccccatgtaatcaatctaacacacgttcaatacaatctcggcgcatcgccaccgttttactttcgtttgtttcgacgagttcttacttctgggtcgagctgcatcggttttgatcttcaactagaggtaaaacttgttatggcggcttgcgttctcgggattagtgcttccatctttatgatactctaatcctgtttatgtaattcgtcgagttatcatgtattctatataatcctgtgcaatattgttatttaaccttcaatcggctaacatctgttgttagaaggcgaccgatcaagttaaatatcaacgttgacttagattatataggatatccaccaccctatgagacaatcaacggcttgattatctagatattgtccttcttttcatacttatagctgcatcagttgagtttgatcttataagtcgtgattagaatctcaatctctagcctacttttggttgccaattagggtagcatcggggtttcagcctatcttacctgatttagcctcatattttatgtgcttaattgacatgctagatctgccctttatgttaagatcttgttgctcttaggtatattaagctccatgtttgatatattttacttgtgttaattaatatcttaatatagagtggtatcggagtattaggtgatacatgctagatctatctgatcggctatgctataaatatctataatctcgttgttgatatatatttcgatcaaagtgatttatactgtctcggcatggcgaccgatctatcccaatcactgacttaaatacatatcaacataaggattatataatgttaatatctacagccgatcgaatagatttagttctttcttacttatttatatctgccgatcgatttaaatatgacatcggctcggagataaatgatatctcatcggcaactggccgatcggctatcatttatggatttatccgcggtttctttatctttattccttgttgattgcaggatcaaatcaactggcacgctcgcgaacctaaaagcaagatttttggacctgcactgaaattaagcagaggcctcgtgttttcgcatcaacacatgcccgtcctgagcccccacctccaccgctcaggggacggacgaggtcgccacgaccctcacttcacgcgcatcggcctccaccctggccagccgccgtgcgagccaaccgtagtttgtaaaatggatttaaaaccttgtttaactgctatgacactaacatgtgggccccagatccttgatagtcaaattttgaccaagtcaagttgaccatagacccacctatcaatagtttagtgtttttccttctaaaaataaatgttctctaaataaaatactgtggtataacgctgtcactgaaaaaaaaaggttttcttccgaaaaataactcttacaaaacatagaataactgaacagggaatttttgcaattaatctgatttatttcaaatttaaatatttgaaatgccataactcactcgttttaaatcggatttcgataaaactttcactggaattcttctaaaacaagacattcccgatggcattggttggagtgccatggagtgcgagattaaaagcatacatacactgcagtgtgagcgtcgggacgtgtactagtcttgactagcctcataagttttaattctacttagaatagtattggaaacgattgtgtgacctctcctgacgtgtaggaaggtcagaatggtgagaaatgtgggaacctagatacgagggtaaaccgaaccaagtgaagcttggagaaggtggatgaaccttccttaattaacaacaacttcaacttttttatttaaaactgccaagtgataggtttgtgaaatctagctttatgttaataaaccaagctattctttgaaccccttatgtgtactaatgcattatgtagtattggcttactgagtacaggtaggattccacccgtacaaatgctacatggacgaggaggagccgaagaagatagagtagggacctaggtttctccagtcatcgcctgtggaataagatggaccatcgcagcttcttttccactatgtcatctactccttttggtgtttggtatggtaatcaaccatgtttggtcttttttatttgagttctactcgggcaactctagtattattaatgtatagtgagacctttataacgatgtcagttaaacatgatatgtaattttccatgtgtgtgcaatctactgatttataaaatagtattataaatacatgaggtctccgatgtacaaaacctagggcccacgttacgttcctatttctggcatctaattgcatcaccgtgattccctactagttaaacaatatcagatcgattaacaacacggtgcaattggcaaagcggcacatgtctggagctgtacttaactacttaatcgcgtgaacccaaattttttactactgacgaagaactaacttgatggggttgatccgtgagatgcaaccatgtacagtcacatgaacagggcacatgggtgattcatcaatattctgaacttttttgctgtttctttgacttcttgttgaaagtggatgtgaagctcgtcatattgtttgttgcttaggaagctcctcccgtatatagctctcaatcaggcgcagccttgacattgtatgacggttctttgtttctgcactatactaattcgagcatcatatagctaggctaggctccttacatgctttttccattcatgttgctaattaacagtgtcacacgcagacatctctcaatttcgtactagtgcagttctgttgcaggatctcctgaagattgatcgcaacaatggcacgagggccgatggatttgtggaaccagtgggcgacccagatcctggtgctcttgagcctcacgttgcaggttgtcctccacatcttcgccggggtacgccggcgcgaagctacgccggtggagaggttcatcctctggctggcgtaccagctggccgactcgaccgcaatatacgccgtcggtaatctttccctgagcagcaccgcacgagagcacaacctggttgcgttctgggcaccattcctcctgctgcaccttggcggcccagacaacatcaccgcctactccctcgaggacaacaagctctggaagcgtcacctcgtgactcttgtcgtacaggtcctcggagtagggtatgtcctctacaagaacatcgccggcaacgggatgatgatcgtggtggctgccatcctgatgtccg

SEQ ID NO: 27642 - DNA, 12276 bp, Oryza sativa
agcttgtacagcgtgacaagcaccagcatttctatatcaagtatgagcatcctcgccacgttggtgacaatcatggttccaatgatgagttgcttctgcatcgagctcactccttgttccacgtatgcgagcgtgggatagttgattctgtgatcatcaatgatgatgatgattcagataatcctgacagtaaagtaattggggaccttcttatgcaagataaagatcacaagagcatgtggacagtgatggagatggagctctccctcatgtatgacatcttgtacaccaaggcatatgtgattcacactagcttaggatacatcatccgcatcatggcgccgatcaccatcattgcctcactcttactgtttcatttcagtggcaaaggtggccacaaccgaatcgatgtcatgatcacatatgtcttgttgggcggcgctctcgtcctagagacgaggtcgctgttgagatcactttggtctacttgggggctagtgttcctctgtgacacacgctggagctggcttcgacatgtagctctctgcagcggaagatggcatcggcttcggtacacagttctctctttccgcagagcaatcaagattgttttttcaagaaattcaaggaggtggtcgggaaggatggggcagtacaacatgctgcactcatgctatcataagatcaccaaagcgacagcaagtcaccattggttcaagacgctcaacgatttgtccactctggtgggcttcgctgactggttggatatgcagcattgctgtcaaatctcgaaattccagacaaggtcaagacaactttgcaagatatgcatgagagatttgcaccaaatgatttgaacactatgggcttactgaggcataactgggggatgctggcaatgggtgaggacatgggcagcgggactcgccctgagcagttcaagaacctgaagaggtttcatggtgttgacttccatgagagcatccttatttggcacatcgccacagacttattcctcgctaaaatagggaaggaagggccaactgtagaggcaatcagggcgatgtccaactatatgatgttcctctttgtggatcgcccagaaatgctaccgggactcccacataaatggctgtacgagatgacaaaaaaaaacataatcgaatcatgcagagcatctaatggtttcactaatgaagtgaagcatggtgggcaaagatcccttaggctcaaacagacagagcaggtagctggcaaactactcaatattgacaaaagggaagtacaacctggccctaaagttcctcgtctcaggtatgcaagaattgttgctgacacactgtacaaatggaaggatgaagatccaattgatgtgttgtttgacctgtggatagattttctgatgtatgcagccaaccgctgcaatagggaatcacatgccaagaagctcaacgctggcggtgagtttttgaccatcgtctggctaatgattgagcactttcaacaattagcaaaagcaaaaaaggagcacggcaatgaataatgcaggttaatgtctatattggcatatgactatgagtaatattttactttttgagattttctaaggtcttagaaaaggtacggggacttatcatattgttagagtttaatcatactttattactttgtatgttagcctaaacatgatcatctctgtttaatgcgaaaattaatctaactgaccttgtttgtaaagccattgaagccaatttgctgaattcatttgcttgccgttcttgctttccttttctttcttcttctgcttttcttctgttcttcctctttttgctctactttgccctgagcttcctgctgatgcaaaaaaaaaaaaaaaagaaaattgtagagatacctcatgaaccctttacaacgtcgaatcgatagagcgacttaggtttagggttttagagtgaagagagagagagagagagagcgggtaacccctctgcctctcctccacttttaatggttttaataaatatattattagaaacaatctgaggtcaaacatgtgtttggagatgttgtctgaccatgcaagaggtaaagtaaagcacgattatatttttccaaagacaaatatacctatcatacttgtatgaaggaagtcaacgcaactcagtcggtttcgttactacatagtccctccattttttattagataacgttgttgacttttaaacacatgtttaattattcgtcttattcaaaaattttatgcaaatgcataagatataaattgcgaattgcgcttaaaatacttgaagtaataaaacaactcacaataaaataaatgataatttcataattattttgatgagatcacggtcaaacgtgtactatatgataaacgacattatctattaaaaaacagtaattaaattaagttacatcgtttttcaagacatcaaattagtactccctccgttttatattataaatcatttgactttttttagtcaaatttatttaagtttgaccaagtttatagcaaaatatactaacattttcaataaaaaacatattatctaaatatattcaatgttaaatttaataaaactaatttgatgttataaaatgttgctaatttttcctataaacttgatcaaactaaaaaaataactaaaaaaaagtaaagcaacttataatatgaaacggaggaagtacattgcaatacgtcgtctcatagtcatacacggtgtctacaaagcccaacatcataccatgtctcatataacagatttagcaaccattttcagagatggacgtgacttggcccagggataatccttacattattattataagatactttttccattgtatattataagtcgtttagttttcttgactaagtttataaaagaaattagtaataacaccaaatagttttattaaatttaaaattaaatatattttgataatatgtttatttaatcaaacttaaaaaaatttttaaaaaaattaaactacttataatatgatatgagtagaaattggagccgtttgttcaacccatctggtctgcttaattgaagaactagagccgttgacgagctttagtccacgcaagttctctgctcaccaaacctccttccatttgatatttttccaaagaagaccgccatccacttgactccctatagtctccgtcataccctgccataacactattcctttaattaatatttaatatcttcccctcctcttaatattataaatggtttaaatctttatcaaacttatttatgtttgatcaattttacagaaaaatatagctagcaaaatttttaatacaaaacaaatatactatcaaaatatatttaataaaaactaatttcaggtcatagttgttgctatatttttcgtaagttagttgaacttaaagaaaactagatttagaaaaaagaaaaacgcaacattagttaatagatttatatttggagatactttgatgtcataatattttaatggttttaataaatatatcattagaaacaaaactaaggtcagacacatgtgctttggatatgttgcttgtctgcccacgaaagatgttaagtaaaacatgaatatattttccaaaggcaaatatagcttcatacgtacttttctggtggaacttaacggaacccggccggttggcctctggccaacaacgacacgaaagacaacgacgcacacatgatagaaactgaattcattaactaatccccccttctccaatttattcattgacaatagttataaacttaggatgatgatcacatggtcacttgctgctgatcacgtgaagcagtgagaaatggtagtaataaaatctgcaaatgacaaatgaaagattattattctgtttttaatttatacatgtcgaatttgaacttggttatggagagttatattgtcaaaacttaaaacttggatatggagtatttaagaagacatacaacaatatagggatattttcttaattaagggagaaaaacatgtttacaccaaagtaggaagataactactcctagttgatacatggagttgaccgaatattttcacgtcttcctttaccatgtctatgaagtattgaaggtactgctcttgtccttttgtccaatatctaaaatccgtagtccacacttctttgttcattcaacgtacacttcaaccatctatatttcttttaaaaatttaaaccactatttgggttgctataaatattacatctcagataaattaagtaatactccatctacttctaaatataaaaacacttattagacatatgtttgacaattcatactattgaaaaaagttaagtattatttatttttttgtggtatattttattatttaagatatttttagcatgattatattttttttgtatttacacagatttttatcaataagttgaatagtggaacatacgtcgaaacatcatatatttatataaaaaatgaaataatggtcaaagctatatctccactatcaaaaaaagaagggaaaaaacaagaatagagatggagcagtacttcacgtcagaataatgtgtgactatgatgtgtgggcctataagaatggacttcatctgattaggtactcacgtagctgcttccataaagtaccaaccacatcggatgtggattaatatattcctcgaggggacatcacttgttgtttatatgttatataaaatagttattaaaccaataaaaaaaattaccaacatagatgaatatgaaatatatcactccgcaaacatgcataaccaaattcaacttgtacaagttgcaacaaaaagaacaagtttatcgcacgttcacaactatatttattatttttgttacaacttgtataagttaaatttaaacttgcatatttgtggagtgatatatttcatattaatatatgttgctaatttttttctaattttttaatacctatttagtggcatgaatgaaacgagaggatatctcatctagagatgaaatcactttctcaaccacggcaccctcaaccacatcaacttgatacagtcctttttcttactgctgtacatgtatgaaacttgcaagttttttgggattacacgatggacacttgtgagcaacttggttgttaaccatgtccatgtagacattgaattgaagctggcgcagccagcaacaatggcgggaggaggggtgatgcacctcctgaacgaatgggcgatcgagatcctgctgctggtcagcttctccctccagctcgccctcctcttattcgccgggttccgccgcgtgggcgcctccgccgggctcgggagctggtggaacaggcacgtcaacgccggcagcatcgtcatctccgacgaggtcaagagcacgtgttcggatacatccagaacatgttgaggggcgtggactccatgtcgaccaccgagctcgacgccatcaggacgacgagaggccagcgcgcgctccggcgccacggactccacggcgacctcgccgccagcctcggcgaggagttccaccaaggcatcctcacctggcacgtcgccacggacatctacctcgccgtcagcggcggcggtgaccgatcttctgcagccatagccaacgccggagacagggcggcggcggcgcggcggctcgcggaggccgtccgcgcgctgtccaactacatgatgttcctcgtcgccatccgccccgacatgctcccgggcctcgtgctccggaggctgtaccaggtgacatgcgaagacatggccagaatatggcgggaacgcaaggacacccacgaatcatcgtcttcttcctccagcggccgcttcatcgacgtcctaagcatggtcaccaagctgttccagctgcacgtcgacgacccgacctccgcctccaggacgccggagaggaagaagctggcggcgatgctacgtgacaacgcctacaatggcgatcagaatgtgaggagccatggcgtcttcgccggcgctctgctcgccgacgagctgctgctgaaggagaaggagcggcggatgtcgtcggacggcggcggcggcgggttgttgttgccggtgatcttcgaggtgtgggtggagatgctgctgtacgccggcaaccggtgcagcagggagtcgcatgcgaagcagctcaacagtggtggtgagctcatcacgctggtgtggctgttggctgaacacgctgggctgtatcgtataaacaaaactaagcagcattttaagtgtgctgaatatgctactgttatggtatagtttactgaggtagactctgtctcatttttgtttttttgggcctacaagtctgcaacaccggaacatcccaatggatggatgatttggcaggtatatatggaaaagtgatttcatctcttgagagcatatcctctaaaaaaattaaaaaaaaatacaagatagcttaatatgaaattaatatatcactccacaaaaatgcaaaggcaaattcaacttctagaagttataacaaaaataacaaatataactgcaaacgtatgataactatcagtttaatttgttctttttgttgtaactagtagaaatcgaatttggtcttgcatgtttttcttaatttttttataattatttagatgatatgcaatcaacgaggggacatactccggtatatatacatgggttaaactgggagtcaaatcaactccgttgattttttttccgtatatttatcctcatttttgcatgtcaattagataggtatcaaaaatttcaaaaaaaatattgatacgatatatcaatataaaatatatattatcaaatatgaaaaattcaaattcaaaaaataacaaatatgcatataaacagtacgtactatttacagtaaaatttgttatttttgtttctacttatatacgtagaatttgaatttacatgtttatgaaatgatatatttcatatcgatctatcacgtcaatcttttttaggcaacatgcacaaaaggaggggtgtgttggcaacttttttgacaagtcgacaagcacgatcgcaacacctaaacgctttgcggtgctatggagtcgccaaccacctcgatcttgccaatcggtcaaatcaagatgggtttttttagaaaaacagctaaaccggctagcggagccgatttagatatcaaaatcagcctctagaccaatttagatcaatatgaggataactatccgtctcatgggcaaaacggaaggtttccaggacaaacctacagagaggtgtcgcactctcgcagcggcggcagatgatttacagtgcaaatcgacaaagatggactaaaactagggtaaaatagaaaacatggtaaaagaacgatttaagtagattgtattcgggggattacaattgaaccggccttttctcttaaataggggttggtcttgccctttacaggccctcctccatgtctaactcgggatagaaaccaaaggaaacccgaaacatgccttcccaagcaaggaaactcgagacccgatgaaaacagacttgggctgggaccctgacggtctgaccggccatatatctgcggccagaccggccatatacctgcggtcagaccggccctactatctggtcagaccactcacatacctgcggtctaaccgaccctgtgaaggaaacccggcattttccaaacttttgcaattttcccctatttcgtccataggtgctaaatttgggtctaaacacatgccccccttttttatgaacatcgtgaatctaaaagcatagagcatattgtcttagggacgatctttttgctgaactgagccgccaaggtcgctagttccggttttttccagttcaaccgttggcccggtctgattttttcgtactatggcgtatataaggctcagagatttttctggtatgggtactcctctgtatctattaccagttggatggccatggcagattatcgtaaagaacttggcaataagtgatggtttctcgatatactaggagggcatagttatgggctattggctgcataattatacaatagcaagtgtagactaaaatgactatatattatatattataagtacataaatgattcttttcttattctttctccacttagcttagattattattttagtgagaatatttttgtttagttccttgtgtgtcaatctatctttatccctaaaatgattaatccctacattagactttatctatacaagagatatatattattagtatagtactctcttaccatatcttcccatggcattaaataaatatgttaccttggaatactttcaggtaaaatgctacagcggtatatccgagcgcttgcggattatatctgtaaccgtaaagaataccgagtaatatttcgagcatcattgctggaaattatatttctattaacgttgttaagaaatatcaacaaccatctcatagtgacttcgcttcaccagtactccattccttccctctgcttcttttctcttcctcaccgacactccatcctcttcttcacaggcactcaacgcattccacccgtcaatcttatgcctcttccctcaatatatacccaaggcagcttcattccattgacacgggaaggcgtctttgacctccaacaagtccttgacaacagcagctgcaatttgtcatcaacttctctcctccaaatgtctacaacatttcatggaacatgtattcgagtggacatcatttttattttttcaaatcgatccaattcccatgcacatacgtagcatggtcgtcccatctctcttctctaataccctctcaaacattcgctgcagggtctggtggtggcactaccacagggtgctggagttggagagacaaaaaagccagttggagaaccaaaactggcagttggagcaacaaaactctagactgtccagtgagaagcgtgacctggagagcagggtgaggaggttgggttatgaaaacaccaatctattagatgagaagatgagggtggctcatgagtcctcaagaaaggtctccgcactggagtaccgggtgcgggagttagagcaccaaaacaccaaactgtccagtgagctagtgaagcaacgggagaacacgaggaaggcgggccagctgttcatgaatgctgccgatacgtaccaacaagtagcagagaagcaaattagaacaaagaaagaggaattggcaaacacgagaaaggcaggcctcctgttaataaacgctgctgatacgtaccaagaagtagcaaggaagcaaattaaaacaatggtggaggacctggaggatgcgaggatggcggttttggtggtcatgaatgctgccgatacataccaactagaagcggagaagaaaattaaggataagatggaggaattgagggtccttggggtccagaaggcagaaatggatgcgagggccgcatctttggaatctgggcttaagacagctctagcaaagattcaggaattggaggctgactgtgataaggtgatgattgaaaataataagctttggttggaggttgagaggctcatgatggaactgagggtaatggcacacaagaaagaggtagctgcaaatgcatttggtgctgaaaaggcagaaactatgaaggaattggaaaaccatttgatgaatgtggaggaaattccgactagcatggatttgatgaaggatgaaaatgataagattcagttggagatcttgacagcaggcagaaacattgcttgcttgaattagatgtgttagtagaggagaataaagcatgctaaatcaagaaggaatccggggacatgaagggggaattgatggaaatcaagggtgcagatttcatgaaggctgaaaatgaaagctttggttagaggttttcactgcagaacaaaaacatagtctgccaggagcagaagttgagaggctcaaggagaatatttggatgatatactttcttgaaacatttatatctctatggatcgtccagaagctagggtggcccttttggtgcgacctgtttctatccacttgaaaacaataaaataaattggtcctttggaatgggtttacaatttttagaaataaactgtaaatgtgagattccttatcgtaatacatggagcaaatttatcttttcaattatatatgcatggctctctcacttgggtagtataaatacatgcatattatacctggtgaggattggtgtcctggtctattgatagaaggtcatgatcagcaaaagcatggacatcaaacaaaacagtacacgaggattttatacacgtttgggctctcaacatcctgttggttactatatacttcttccatctcataataagttcatttttaatttctttcatttgtcccaaaataaaagttcatttttagagtaatcgtagcatcggagtttgtgaaagtatattggagtttgtgaaagtagagaataattgtattgtgaatagataaagtgagaaatagttgtattggaatttgataaagtaaggatattctagtctttttgttttgtattggtatgttaagatagttgtattgtattgtgtgggacgcactatgaatacccttatgttcaccgctcacgaccccgtcgtcattagacctgcacgtacaccacatggttcctgtcacgcccggaaattcactagtaatttccgaacttatttgtgcataagatcctcgtccaggaatcaaccgaggtacacaaactgacaatttaatatacagattcatcaaattaactaaaacgataaatacttacttataaggcacttagtcctcatcttgaagaaaactgcagcggaaaataaaatctagcgaagctccggctccactcccacaggcagctcaactggggtttaagccaaacgtcttctccttctggatcctttttcttcaactgaggttgattgattattgcaaggtgagcatatgacatactcagcaagccacacagcaaatatgcaagtgcacaaggataccaaaggatggcataatataggctcatttgcaaaagcagcatttagcaaaacatttaagagaagtaaaacagtggagtaattaattagaaattttaatcaacactgaacaacacacccgtgctgcacaggcccaaccatcctgaacaaccatacccggctgtacagatctaactccaaaccaggagctaagcaaattattaccaggtataacatctataattattgtgagaggtgtgagactaatcacgaaaaacattgctcaactcgcccataaccgcgggcacggctattcgaatagttttactctggccagaggtgtaccactgtacccacaagacacagcctcaacatcatgtctaccatgcgtcgcgatactggaaagtacccgaatagaggctgtgacaataccctctgcataacacaactcaccatagtgcaccattcctggatcataatcaccccctcaaaaaccagaggcatggactccccagcgacccccgtgggcttatctccgccacttctcagtctggtgctccgcaatgaatcatgctatacaaaaggtaaagccgttgcccacgctggcttgtggttggcacggttaatgtttcacaatagtagctcgcgaaccggtccttaattgtcatgagcacgactctcaaaaccatgtgctcacaacccaccattatcaagttttagttggcaagtaattaattaaccaatcacgattgaccatcgtgaactatcattaagccatcattaaacaacagtgagtcatgagttatcccaatagtgtgctaatgtttctaagcatggctaagcaattatatctaatatctagttgaaccaatatatataaagctcaattagtcaaattataataacccaaggtatcaaggattaaagtaatcaatgcaaacaggccataacaaaggaatagattcacaccacccagtgacattcgaaaataaatgcacagttgaaataaatagagaatttaaatatatgatcaacatgtttaaaggattgtgtttaggatctgtgtgacttgccttgcaataatcggtcttcaattaatcttcttgaatacttccggcgcactcgcgaaccttcgcaacgatggaaacgacaagctaacacgcaaaacgaagaaaaagactaataaaaaccaaataaacaatacataaaaagtaaacaaacatgtagatcataattttagatgaattatgagacttgaacggcctcattctg

SEQ ID NO: 27643 - DNA, 4609 bp, Oryza sativa
acgacgcgaacggagggcaccaacgggtagagggcgacgaggcgaactcaccggtgaccaaagcggcggcggaagagcacggacggcgccggcgacgaggaaaaaacggcggcgaagatcgggtcgacggcggcgacggtgctccggcggtcttcggcggcggtgaagcgacagacgaggacggcgacgacttggcgatcccgacggtggccttcccgagtgacgacgacgaccgaagcgacggcggcgcacggctggacgaacggcggcgatggcggcgcaaaagctcacggggctagggcgctacacatggcgagagacgaaggcgagggaggcggcgggtagaggagacaccgggggtccttttaaaggggctaagaggcggcggcgaaggcccatggcggccggcggcgagaaggaaacttcgggttcgggagagagagaggaatccgattcgatctcgaatccatcgacttccatatcgaattaggcgacgattccaaaagagaaaaggaagaggagatcgaggagattatttcccatctatcgattcggccggagaaggaaagacgcggccgaatttggaaggagacggcggcgcttgcgctagggtttcgggcggcggcggcggcgcgaggaggaagacaggcctgacagacgggccccacctgtcagcggctgagagagagaggagagcggcggctcggcggattgggccggactgggccgagggaaagagagagagagagggttttgggccggctttcggcccaaagccaaaagaagacttttaaaaacttttttcaatttaaattattcatgaaatgcaattccatttattaaaaatacttccttagctcaaataaatcccagaaaaatctaggaattatagaattaagcaaagtatttaacaaaattttatctagcccaattttatgttgagatttaacaaattaaaattagatcttctcttttaggcttttaaaatcatttctaataattccttttaaacaacaatttataatttaaggattttaaacaagaaaagcacttaacaattataattagatcattattgatcaaataattactgaactgttctttgtatcatttaggaattgagctctgaaaaatccgagaaaatctcagagagttgacttaaacatggagaatttaataaaaattaaatccatccatgctttatatttaggaaattttatttcccacatttaacttcacttgtaaattaaagatcatttaatatgaattctaataataatttattaaataatttataaatcctgaaacgaaaatcaggatgtgacagttccacactcgttggttgtgccctgccgctgcagcctccctgtcaccacagatccgcgatcaccgcgtacgctaagcgtgccatccatggatctatcactcgatctctctagtcgttttcggccacgctcggtctcgtctttcggccacgttccatcatagcaggtctaatcatcagtgaggtcatcgcctctacaacttccttgttgtcgccatcaatctcattgccatgactgatgattttctgtcaatgcacgaccgcacttcatgtttcttccttcgcatgtcttcttgatctgatgaaaccttcggctctattactacttgttataaaagttagttgatatagcggaacgacgactaaccttctcaatagcttcgtctattcatcacccaagacatgccagatgacgatataggaacacaagatatttgttaacgaggttagccgaaacctaatcccaggggctctgattatgggcgttcctccccaataaatatagcaccttagctgccacgagtacatggcctcgtcatcatcatctccctgcatgtttatcctacgttgtagtctacatggttatattgtggtgcccccctctctatttaagaaagatttttgggttacagagtgtgactctaactatacccctaccacctattacaactataaatccatttgtaaccaaatagaactagtatattcgatacttattctaacaatacgaactaatgatcataacataattgggtggtatagtctttttagtcttcttttttgaaatagaccgttaacatgtcatatgggtaacgctagtccaaaattggtgaccaatcgacttatggattgaatagagataattgaattgagggaataaaagcaagtgttacactgaaacaatctgaaccgaccaagttaaatcgaatgggcagtggccaataacaaaggtactttggagcgctaaattttgatctaatagataaaatttattgacttgatgttgtgcaattaaaagaaaggaaaatagctttaattgcatccaatggagatgaactttatacatatacatataggatatgcaaaaagaatgatagatgcaagaatttccattttgcctttctttaaaagaaagggaggtactagctagtacaataccttgggtggaatataatcattatggctttgatttcttgcaatcgaagcaataagaataatgagatcgagctatgtcgcggaacggaaagaaaataaaagaaaacaaaaaaatatgccagcatcaaaatagcaaaacatttgatgccatgcgattgcagtcattgatgaacgatcgatatatctctgctgatttaatttccaatgagaattcatttgtttctttcttccttctgcatatattgtttttttttctggtgatttttctcctttgttgaattactagcactcctctgtccttgtttaattttctttgtacaaaacaaaacgtatattcactcatcactcttccccatcgacactccatacctttgctgaacccacacttcttctcttctctcccttgattcttccctcttcttcaagggagtcatagatacttcatcctctagttctccttctcttgtataaattttcacgatgcaacttcggcagaggcaggaaaacattcatcatccttcagcgggtgcacagcaagacagcgaggcatcttccacctgcacctttgtgacaacaacgaccgacaatgtcgtcgtcgagcgcatcatggtttgcgggtgggcaaagacaacatcttttttttccttctgcgttgtgtggtggtcatatctctcttctctcctcgaattacttttacggtgatctcaaaaggttgccaacaaatacgttgcacgggctttttagtactattatacaaaccgtatgattttaattatgtgtcgggtgtattggttaaaaattttattttctgtggaaagattaataaattttattagtcatttaacataaataaaacttggtgataaaaaattatatagaacatgttgcaatattccatctgttgctatctgttttcttaatttaattgtttaaattttttgaatgagtaagtactgatttttattcatatggtactctcagtatagtttttgtcttgacttcattcagtaatttaaaactaataattaagtactgagtattgtttggcgccttgtttatagcttttgaatcatttaataattttgaattctgtatgtaacatatatggagttgtatttggcttggaatctcaagtatagttcttccatgatgtcataattctgtgactggtattaataagtacttgtaccctgtcaaaaaaaaagtactgagttgtactccgtttggagtttcaattatgctttttcttatgatttaataatacagaaatttataattagtcattgcctatttgttattgtattgaagtcgttgacattattccgaaattaggaaattaattattacaaaattaataataaggaattttagaattaacaagtatcaagctatactaagtatatccttgatttaatgatccttaaattcaaattgacaggtacggagtagtatttgtggtattatattttgaatcttgtatttcttcaaaattgactaacatgtatttttgttttattttaatctgatttagctgatatttgcgtgtttattttcttcggaatttcagttacatgtattatattttactatatcattctaattctacctcacagccagtggaaggccatattatttttcctttgtcctaactaatgttagaatttgtcctaattaatgttagaatttcttataggcctaacttttttaaagataatatacttcctctgtcctagaatatttcatttctaccattaagttttatcaaaaaaaatattatatttctaatgaggtgggacccaataaattaattggatgaagattgcattgcctcaaccttcactttaatcaagtcctctaataagattattgtggtcatttgtgtatgctgctaatctgagattcaattattctctaactccatactttttagcaaatgatactaggaaaaacaactccgccaaaatgtgctcgagtaattaactaataacctactctgtcctgttccataattcttgacattttgaataataacacggtctccaaaatatatattttactatgtttttctattataatatatacaataaattaggcaaaatttgccctgggacacctataaattgtgtaatt

SEQ ID NO: 27644 - DNA, 4913 bp, Oryza sativa
ttagctccgtggcataccagtgctccgcccgtgctgtgcctgcgcctcgccgccgcgcgtgtgccacaccgccatgcctgcactgcaccctcgtgcgagcaccacgccaccgcgctgcacagcgcctgcgctgcccttcaccacgccgactgcgcagctagggttgggatgggaaatttttcacgagagagagagatggggaggaagggaaggggctcctccacaatctccggtcaagcagagcacaagcgtgctagctctcccggtggcttgcctcgccggcggcggagacggcgacggtgcggcgcaggatggagccgcgggtggtgttggtgcttgcgctggtggcggtggcggcggcgggcgtgccgtcaatggaagcgccaagcggaaggggaagaagagaaggggcaaaactgtcattttacgcggtttctctctcatcaattcagtggatattatattttaatgtgcccagtgtcctgtggcaaattaccacacttttagagtgtcctcaggcaaattcacgtttttcgggtgtcccccagctaattacataacttttgagtgtcctgtagcaaattttgccaataaattaataaagttagtttatttttattgtagtacattgtaagacaaatttatatatgttgttttaatacctttaaactaaatagctttaaagttactgatagtcaaagttataaaagtttgattttaaccttgttctaaacgtcaagaaatatggaaccggagggaataccattttcgcatgtgcccgctctcgactaatctcggtatattacgtactcgtacagtgatattagtatattaaaagaaactccttgctctttgtcttacattgcaactaattatgctactaaatttttcaagtaaaaacgtagtgcaagataatgtgatgaataaccaacaatcttgtattcaatcaagctgtataaaagggaaatttgtaaatggagatgtttacctgagaaaaacataattgctgcttcgtccatcatgggtgaacgtctgagattatatgcaaatgcgaacatgacaccacggcatggctgcttagttgctttcaatagcaattccgaatattcatatgggtacagccgtacatgagcgttcaatccaaatattacgtatggttatatacctttgaattctgttccacgcatgctaatttaatttctgtggaaaagattcttacaatatctatagacaccggtatgattagacttaccatcatgatgatacgatccacataaccaataactagatgtttctgattaatatatatggagctcgtagaaagtgtcaaattagtataggtatagttatactgatagattctactagcagtattagccagtacaaatggcctcaatggttgatttattagttttattaccagtagttatttatgatgatagtataaatacatatgatctattcgcgattctaatgcccctctaaaacatatgcgcagagatcttcacagatgacagggtgaggaccctatcacaccaagtctccacacttggggacagggtgtgggagttggagcacaaaaaccccaggctgcttggcgagaaaggtaaactggagaagcaattggaggagaccaaggccggggttcatgcccatctaagcgagaaggaaaggtggagaggagcttgaagggtgaaaatgataagcttcggttggaggttttgaccccggaggaaaaatatagccagtctgcagcagaggttgagaagcttcagaaggaattagttgcattggcagaggtgaaagaggtagctgcaaaggcatttgatgatgagaaagcaaaaatgatgatggaatctgtggatcttaagagtaggctagaggaaatccagggtaacatggatatgattaagagtgaaaatgataagcttcggtcagaagctttggttgcagagcagaaactaaacatatgtgaagcagagattgagaggcttaagatggaattgggtgcattgacagaagcgaacgaagcagctgcgaaagcatttgacactcaaaatgaagaaatcacgaaggagctagaggatcttaagacaaagttggaggaaatcaaaacaaataaggatctagcggaaagtgaaaatggtaagcttcggtcggagcttttgtcagcagaggagaaatacagccagtctgaagcagaggttaagtatcttaagcaggtaatgggagcagtggtggaggcgaaggaggcagctgcaaaggcatttgctgccgagaaggaagacattatgaaagaatcagacaatcttaagaggaaagttaaggaaattcaggatagcaagcttttggtggagagtgaaaatgatgagcttcggtcagagattttaagtatgaagcagaaacatggtcaatttgaagtagaggttactagcctcaagaaggagctgggagcactagaggaggcaaaggagatcaccacaaaggcatttgaggttgagaagacagaaatcctaaaggaattggaggatcttaagaggaaggtggtggaaatccaaaccaacaaggatttagtggaggtagggaatgataaacttcggttggatgttttatctgcacaacagaaacaaagcatattagaagtagaggctaacaatctcaagatggaattgggtgcattggtggaggcaaaggaggtggctacgaaggcattcgacgctgagaaagcaaaaataacgaaggaattggaggatgttaagaggaagatggaggaaatccaggtcaagaaggatttggtggagggtgaaaaggataagcttcggttggagatattaatagcggagcagaaacatagcatgtctgaattggaggttaaaaggctcaagatggaacttggtgcattggcagaggcaaatgagacagctgtgaagtcatttgatgctgagaaggaaaaattcatcagggaaatgggggacctcaagaggaagatagaggaaatccaggtcagcaaggaagctgctgaggaagtagggcgcaacaagaatgcagaggctgataggctgagggctgagttggtgaagatccaagtttctttatcgcaactacaagcatcctataatgaacttgatgctaagcattctctcctaaatgatgagaagaattcagcccagaaagcattagatgttgagaaggttgaagcatataagctgaagtcaaaatttgaggaacttgaaaattataaggctgaaaaggatgaagaggctgggaaactgaaggcggcattggaggaaaagaaaagtgagattgatgtcctcatcaaggacaatgagttgctgcgtctcgcaattgctgaggcacaggaaaagaataagggaagcattttatcatgcttatcaccatgcggctccaaataattaggtcgggaatgtgttgcattaataatgtaatggtgatcaattaatactatgcaatgaaataaaactttcacttcctttgttatatgtgatatgcaagaatgctaatgttcttgattagtcaggtacattttgtgatgtctctaaactgagtattttggtaaacctgtcaccttaactattactccctttgtcccaatttagagggcatgtaaattttttgacggtgtaccaatttaaagggtgtggttccttttccactgcttttcttcccggagtaccctctgcattcatgcacatgacgcttgcacatgcccgcgcaataagggtgtgtttggttcctcgcatcttcctagcatggcccatcttcctcatccaggttgagtttatcctgttaagtggatacacacgcagtcgtttggttgtttgcatcagtctagcctggctcgtaccagatattgtttggttgtttgtgcgatagatacggtttggaagagaatttgtttggttgattttatgagccatatgtatgaggactttttttttcctgtgggtgagattaccgattgcaactattttctatattaatatttttcttctggtaaaactcataaattgaactaattgtctaaactagatttcggcaataataaaagggggtggctatcaagctcgagaagtgaatgggtttggagacaaaggatttatacaggttcaggccttctcattcaagaagtaataccctactcctgtccggggatgaatccgccgagtatcttattgattgtatgatttggagaaaatcaacacatgcccctagaggcacccggaccccccttatatatgggaaggagtccgtattacaaaagataatctatatccctaacggaatatgcagatacagataaaatacagtcgtaaccgactaagtctcaaggtatttccttgatgtacaagttgagaaacaaacccgagatacaaataagatattctatctatattcggtatcctatattcagtccaaatatcatcgccgtgtagatatgggacatccataatctccacagtagcccccgagacctttgcagtcaaccatcatagccttctcaaagataataatccgagtgcttcaaacttttcatgccaaggcctgccgagtagcgaagacgaagactgtaaagggcgaaaagataaagaatatggtgcatcgaatagatgcacctaattaggtgtagcccccaactatgtgattagttaacaaactaaacatatagttgagaacaaaataatagcacaatcgtgcatcatatgacaaaagcatacacggcgcctaaagaggcattcttagccgactgctttttagccataattaaaaggaatccgagtggttaacactctaaaaggttcacgaatgaacacacttgacaggcatccgaatagaaaactctaaagattacccaccaaatattataaaaattatggtaatgaataagtctaata

SEQ ID NO: 27645 - DNA, 13936 bp, Oryza sativa
aagttaacccatacagcttttgtagcctaaaaaagcttacaaaaacagcataacacctttctgtcgggcaccttttaatttgcattgcaataattccaaagaattatatgaccgcgtaaaaaggattttatcagcattgggcaacactattgtgcgcataaattgccaaagcaaaaaatgcctaagtccctaaggagcacaatgggccacgctgttaaaagtactgggctgaggtactgttcaggcctaagcccattcgcacctccgatacccttaacaagaaatcccgtgatccaagcgacacttcatcttccccgccggaactctcgccattttccccactccctgctacagtacagagctgcgccggcaaactagggttcaccattccactcgaatccaccttcgaaaagttcatcaaaatccttcccgtgatccaccgcctcaatccctcacctctccctagccatccctcgaatcaaatcagcgcattcggaaaaaatcaatggcggaagagaaggaaagctttgaaggccaatgggcgccatccgacgtgacggaggagaacctgaaggagatggtggcgcacggcgttctccctgccaaggaaatcatcgggtggcggccagcgtgcggtgaggcttttccgacccccgatacacacgaggctgtagtcttctcccatttcttctatggcggcttcgctcttccgacctcaaaatttttccgcgggatattaagcttctatggaatcagcttgcatcacctaaacccaaattccatagttcacatcgccaatttcgtccatgtttgtgaagccttcttgggaattaagccccacttcgctctgtttcgccgaatcttctttctcaagccccaaccaaacaagagtaagccatgtgtagtcggaggggccggatttcagctgagggggactctgagccagaagtacttctctatgcccttcaagacctcaaacaaagggtggcatgcaaactggttttatattcagaatcctgagcctgctcttcccgagtactcttgtcttcctccggtgtaccaagatacctggaactctcttccgattggggatgaagcagcccaagccttggagctgatggatcgcatgctaaaactcaaagaacaaggcttacaaggagagcagattactcggcacttcatcaaatgccgattggcaccaattaaagaaagatcccgtacggtattcgagtttgacggcaagcatgatcctaatcgtgaagaaccagattctctggattttaaaatcatgaaggagagaatgtgtaaaatcttctcaaatgctattgtcgtcagctactcacatcagctgccagttgtgccatataacgcattcaatccgcctccgcaggtacgtatccgaaatcttcaacctatgaccaaaacataatcttgtcttcatgttgagttaactaaccgtggaggcatctcattcaggaatatgtattgatgaagtctgaccccccaatcactcagcgccggtctcctcgccagcacaccgttcagggaggtggagggccgacaatcagatcagatccgcaacctcaaatctccaatccgactgggcagacaggttctcgcaagagaaagctggtgcttaatgatgacgaaggcgacgacggcaacaaatctggggacaaaggctcgcccaataaactcccaaagcataccactcccaggaaaaaactggctagtcgtccaaggccaaagattagaacatcttccaggtataaacctcttggcaccatttcacttcaacatgcttctctcatggaaataatactgaatattgaaagaacactttgcaggaaaccatccgacatagatccaactggaaaagatcctgatccgactgtgacagaaccaagttcatccaaggattctgagccgactgccgaaagccagccgactggcgcccatacttcaggtgataaggccaatccgagtgaccagcctccgactggaaaccagtcggcagcaactgaaactacaacaacccaagagcccccgattggaaaccagtcggatgtaggtccagatcaagaaactcccgaagttgaagcgcagacgacaacttctcaaggaccagaggctggtaacgactcgatgattgggtctccagataaagaacaaggatcaccccacgctcagctaggaacatcctcaagtaactcatcttctcaagtgatgccgatttaaataacttcagcttattcgtctaatatcttggaaatacatcaggaccaccaggcgatgacgaagaagaaattcctcgcataaaggcggctgatgactctcgtcctcctatcttgctcaaatggtgggacgagaactcacaagctgccggcatcgtcataaatcgtcaaaaagaagatgaggaagtgtgccagctgaagaaggcacttggagaagccactcgcattgtgaatgtaaatcttccgggtgactgcctttgatgactttgttttctcttcagcaaaactaaaccatgaaccatcatgcaaagaatccatcttcgcaatgaggccaagaccgcaactttagaaaagctggttcctcatttgggaactcttgaagcagttagggaccagctacacgaggccaaggagctcgccaaaaagacagagaaggaattaagggaccgaattgctcagctccaggattcaaacttcgagctgagtggttcatcaaaaggtaatctctagatctgtcccattaatttacgctgtcgtaactgtatcctcaaccatttggatttcaaacagcgcaagccgccaggatggctcaaatggagaaacaaattgaagccctggaaagagacaaggtagaactggctgcgcaaaggaactcggccttgaaggaggttgaaggtactgccagctgacaatctgaacttctctctttttaatgcagtagatttttatcataaatgtgttttgtagaccgcaaaatcaaatctcaagctcaatttgacgtcctggttggtaagatcaagaggcttgaaggagcaagagatgaagtcgctaatgtcgctacaccactcgtccaagctatgttcctcaataacagtggtccgagtgcactcgacgcaaccgaaatcttcgacaagctgagagttgctccggatgtatatttcaagaatatcaagaaagctggaagtatgggagctagcacggcattggcgatgaccaaatccttgtacccgaggattgaaattgacgccattgatggctttacagacgggacaagcgtagaggctgctcttgatcttatcagcaatgctcaaaatgcggctgacaagattgcaagtgacgtcgtagatcaattccgcaacaccgaccttcagccgagtagtaataactctgatgatgaaaggattgattctgactgagcataaatgtagcaaatggaggcataacttgtacaatactggtgtatttatgctgtgcttgataattctagccaagtctttgatttcttaaaagcttttatcaagctttgttgagcctaaaacccaaagaagctattaaaaactttcagtcctcgcagactaagtagaaaaatcaaacaaggcaatgatagaccaaggaagcaaattgaattgataaaaaatcacactccgttattatgatgatagaccccgactgacaacttcaagaagaaaacttgatgttgacagtcaagatagggaagtacagtgataagcttaagcgtagaaacgacgaagatgttcgatgttccaagagttgtcgacgagtgtaccgtcttcgcgcttgagtcgataggaacctggccgggtgactgcagagatgataaatggcccttcccatagaggagataacttgtgccgatctcgtgtagtttgaattttcctcaaaacgaggtcgccgactagaaaggcacgggatcgaacattgcgattatgataacgtcgcaacccttgtaagtatcgagccgactgaatcaaagctgcttcgcggacttcttccagtcggtgcaagtcatccactcggtcctcctcgtagcgttcttcgcggaaattacgaaagcgcaaagactcgaattcgacttcactcggcaacattgcttctgccccatagacaaggaaaaaaggtgactggcctgtggcccgactgggtgtagtacgcaaagaccaaagtactgatggtagctgttccacccatttaccggcatagggttttagccggtcaaaaactcgcgctttaatcccttgaagtatcatgccattggctcgctccacctgtccattgctcatgggatgtgccactgaggcatagcaaatcttaattccaaagtcttcacaaaagtcttgaaaaactccgccagtgaattgtctgccattatcagtgatgatccgattgggcactccaaatctatgcacactgttgatgaagaagtctcgagcgttatctgctgtgattgtgacaaccggtttagcttcaatccacttggagaatttgtcaatggccacaaagaggtgcgtgtaaccgccgactgcctttttaaacgggccaaccatgtcgagcccccaaaccgcaaacggccaagacagtgggatggtctgcaactcttgagctggtagatgaatttgtctggcaaaaaactggcaaccttcgcacgtgcgcacaattttgtcggcgtcggacactgcagtaggcaaaaaaaaccctgccggtaagctttgccgacaatggtgcgtgcggcagcatggtttccgcatatcccagaatgtatgtctttcagcaattgtctcccttcctctaaagatacgcagcgttgcagaatccctgaagggcttttcttgtacaactcagcttcatgcataacataaagtttgcttcgtcttgaaatccgctcggcttcatctttgtcttgggggagttcttgagaagtcaagaatcgtatgaggggctctcgccagtcggcttcaaccatagctacgtcatgagtgcccgcaacttgagtagtatctttgtgaggtactgtcggcgtataaaggtgttcgacgaaaacatcggagggcgccacctcgcgcttggatccaaagttggcaagtctgtcggcggcttcattattgtgtcgaagaacgtgactgagctcgagtccatcgaacttgtcttccaatttgcgtacctcttgtcgatatgccatcatgttgtcgtcaaggcaggaccactctttcataacttggttgacgaccagctgtgaatcgcctcgaactattagacgctttatccctagggagatcgcaattcgcagtccatgaaggagcgcctcatactcggcgacgttgtgggacgccgaaaaatgtatccaaagcacatagcttaatctttctccagctggggaaattagaaccactcctgctccagtgcccgaaagtctttttgatccgtcgaaatgcatggtccagtgctccatcttctccgcgggggtatcctcctggcactcggtccattcggcgataaaatcagctaacgcttgggacttgattgaaattcggggcttgaatgatatgtccaaagacatcaactccaaagcccacttagcaatccgtccgtttgcttcgcggttgtgcagtatatcaccgagtggaaatgatgtgaccaccgttaccgagtgaccttgaaagtagtgagatagcttcctggtagtaattagaataccatatagcagcttctgaacctgagggtacctcgttttggagtcggctaggacctcgctgacaaagtaaatcggtcgctggactttctggacatggccttcttcctcacgctcaacgactaagactgtgctcacaacctgggaggtggctgatacatacagcaacaacggctcctgcgggtgtggtgaggctaagaccggtggctcggtgaggagtttcttaaaatcttcgaaggccttctgtgcttcgggtccccattggaaatcatctgttttcttcagtagcttaaagaagggcatcccccgctcgccaagtcttgaaacaaatcggctgagcgccgccatgcatccagtcagcttctgaacatctttctgggtacttggcggtttcatgttgaggatagcagtaactttctccgggttggcttggatacccctatgagacaccataaaaccaagcagcttccctgacggtactccgaaggtgtatttttcagggtttaatttcatcctgaaagcgcggatgctcgcgaaggtttcttctagatccgagattaaatcatccttttgtttggtcttgacgactacatcatccacataggcttcaacgttgcggccgatctgcgttgagaagcatctctggatcatacgttgataagttgctcctgcgttttttagtccaaacggcatggtgacatagcagtatgctccaaagggcgtgatgaatgaagtcttcaagcagtcggattccttcagtcggatctgatgataccccgagtagcaatccaaaaaactgagaagctcacagccggcggtcgagtcgactacctggtcaatgcgaggcaacccaaaaggatctttagggcaagacttgttgaggtcagtataatcaacacacatgcgccattgccccgttttcttccgaactagaaccgggtttgccagccagtcgggatgatggacttctttgatgaagcctgccgctaacagcttggttaattcctccttgatcgcgtccttcctgtcttgtgcgaatcggcggagtcgttgtttgataggcttggcatcttctttgacatgtaaggagtgctcaatcacctctctaggaataccgggcatatcagatggtttccacgcaaagatatctttattgttctgaagaaaggtgatgagcgcgctttcctatttacaatctaactcggcgcctattacagcagttttagtaggattagaaggatctaggggaatcttcttagtcttggcttcgctttctccactttttgaagtcttggtagcgggcacttctccttcgctcgccgtggctgcagccagtcggatatcctctcgggcagacgccatctcgcgggtttgggccatgtcgcaactctccttgtcgcatgtgacggcttgcttgatgtcgctccgtagggataggactcctcggggaccaggcatcttcatcatcatgtaagtgtagtgcgggacggccatgaacttggctaacgccgggcgtccgagtatggcatggtatgctgtctcgaaatcggcgacttcaaagctgatattctctgtgcggaagttttcccgagtgccaaaagtgaccgggagggtgatctggccgagtggagttgcggataatcctggaattactccgtgaaaaggcgcattgcttggttttagctcggagcgaggaatctgcatatcatccaaggtcttggcgaagaggatattgagtgcactgcctccgtcgatgagggttctgcgaagcttgacgttacggaccactgggtctagtaccagggggtaccgccccgggtggaccactcggtcaggatgatccgagcggtcaaacttgattgcaatctctgaccatcgaagatattggggcgtgtcgggctgaacagcattgatctcccgttcggtcaacttttgcttccttttagactcataagccagggggccgccgaagatatggttgagctccttgcggtggtcttgaaattctaccggggtgtcgccgtcgtccttcttcctcgacgtgctttgttcttcgtcggagttcttccgtgtagtcttggcgtattgctccgcgaattgcttgtagacgaaacaatctttggccacgtggttggagttaggatagtgcgggcattgggagttcatgatcttgtcgaacgtgttgacgcgcgaacgctgtcgagaagagtgaatggcggttgcaacaagttcctcaggcttacgcttgcggtccttatgattgttacttccacctcctcccgtagccggcgtatccttttttggcttccaactgggacccgactgctttgatgcggtgacggcgtcttcggctttggcgtactcgttggctttttcaaacataagtttgactgtcctgggaggtttacgcccgaacttgccgaccaattcttcgtggcgaatccctttggtgaatgcggcgatgataacgtcgtcggtgatgtcggagatcttgttacgttgttcagaaaatcgccggatgtaatctcgaagggattctccggacttctgaacaacgttgtagaggtcgaattgtgtgccgggacgctcgaaggtaccttggaagttggcgatgaagtggtcgcgtaattcggcccaagatccaatcgtaccacggggcaatccatggagccaagatcgggcggaatccgctaaagccactggtaaatagttcaccatggccttgctatctcctcctgctgcgcggatcgcgagaccgtagacggtaagccacgattctgggttggtggtaccgtcgtacttctctattccagtcggcttgaagccggctggccaatccactcgacgcaggtcgtcggtgaaggctgctactccatcaaggtcgtcgtcgtggcggtccggcgaatgatgatggcctcgagctgctcggcgctgtatgattgtgtcgcgaagatcgacggggcggcgacgaggtggtgagcgaggccgttccactcggcgctccctatgatggtcgggaggcgagtgaacggaccgctcgtcgtgacccctgctcctgcgattggatcctgcgccagtgatgctgaggcttggatgacggtagtcatgagatcggaagtgggggagtcggctgccagtcggcgtgcggacgctttcggagttaactgggaccgaagccgcaatcatggtctttgtctggttcaagatgttgacgacgtgatcagattgattgagctcgttttccttgaggagggtgtcgaggagggtgatcgcggcaaccgcattctgttgaggggtgcggaaaaccggtgtcccttcaacatcttgttggccgatgaaatcacgcgctcggcgccctgcttccaaggctcgctgctgtcggtcctcagcctccttcgcggttcgctcacgctcctgctgctcacgccgtagccgttcttgttcttgtgcttgacgctcctcctccagtcggcgacgctcagtctcgcgacgtgcttcggtttcccgggcttggcgttgctcctccgtctcgttatcggccatgaagacgccgaagtagagaggggtgtagttgtcatctaggcttccgtcgaagtcgtcgagatccgggtcgttgtagcgagagctaaactcgtcgtactctacgatgtcggtgggacgcgagtcgacagtgggagagctgtagtagccatccagctgatccgtcgaaaccgtgccgagtggttggaggatgacgccgacttccctgaagctaggcgaaatcggtgttgaagccgacttccgcctaggcctacgggatggagacgctgtcgtgatggagacggccgctaaatcgtcggggagcttcatcaggatcggtgggtaagcctcatcatcttgatctggtgacattggagaagatgcgatctcgcccgagtggtttgaagccaactcgattgagatggtcttgaagtaactttcagccgcgtttgggagtccaaacgggactgaaatccggttctctcccgactggtctgactctgagtcaaggagagagatcttgccgaagttgttggtgacgaagtcgaggctgccgaaccgaaacgtctgcccgggtgggaagacgaggtcgtcgatgccggagacggaacccattgcactgatcggcgaaaagcttgacgcacccctacctggcgcgccaactgtcgaaactagatttcggcaataataaaagggggtggctatcaagctggagaagtgaatgggtttggagacaaaggatttatacaggttcagaccttctcattcaagaagtaataccctacttctgtccggggatgaatccgccgagtatcttattgattgtatgatttggagaaaatcaacacatgcccctagaggcacccggaccccccttatatatgggaaggagtccgtgttacaaaagataatctatatccctaacggaatatgcagatacagataaaatacagtcgtaaccgactaagtctcaaggtatttccttgatgtacaagttgagaaacaaacccgagatacaaataagatattctatctatattcggtatcctatattcagtccaaatatcatcgccgtgtagatatgggatatccataatctccacactaatgcagtcctacacagtaaactaacagggtatttattactataatagtggctacttattaccggttggagaaagctaaaaaatgaaaaaggagaaaagggaaaaatcgtgctagtcccttcgcattcctcgccactaagcacgacaattcgctgcttgctatctgctccgctgagcctggctgctcgccatcgttgccgcatccctagaccactccaattggttgcgccatggatctggcaaggatgacggcgacgacgacaagggtgcgaagttaatgaccttgacctcgacctcgaccattccaattggttgcgccatagatctggtggtgccgagctcaaccgctcgaacaagtcgccgccccggatctggctgcgacaagcttgtccacgaaaaatctgacggtggcgaactttcagtcccagttacttactgctagaagagatggtcgccgatctttgtcaagcttctctctcccttcatcgcgtcaccggtgagcacagtgaaacctagtttggatcttgtggaggaaaaatgaggaggctgggtgcacccttgcacacgcgggtgcagccgggtgcacgcgcgcgtgggtgcagcacgttgcatctgtcgggcctggctgaggtgcgaagctcaaatagagcgtttccccgcagccagcctgaggaaccctttttgaacgagtggagccaggctgggaaggtcacccaggcaaccaaacaaagagagaatgcatccatagatgcgggccaagctgaatgcaagaaacgaaacacaccctaactgatcaggcgacgcaactgcctgcacgtggagctgcacacgcgtgggaccacaggattacatgcatgcagttgttacagctggtaaaataacatactataagtcagctataaacacatatcgagaagataaaagaggagagagaagagcagcgtgctacatatttatagccagctgcagcacagactcttacacacaatgtgagtatgacaaatggaaccatgtaataatagtgtagtatatgtttataagtaattattgtatgaattggctattaagttgactatagttgatttggagctagtagttggctatactattaaacttgcacttagtaatctgcatgtgtttggatcaaacctgttttattaggggcagtttaggaaaaaattaactctgcatgtgagctcgttggtctcggtgaatttatttgtgcgccctctaaattggtacacaggggtgttgacggtcgttagcgattagtttcgaccatcaatattactaaaatagagaagaactagttatgcttgcaatacatatccatgttagaataataatatttcactagtatttggttcactaaccttttatagacaataaccataaagtggaggagaatcgacaacaaatcagatgataaatcaatcggacaatgtcgagaatcagacttatgcatgaatgggccaagaactcagaattgacacgaccaattgggccaaaattcacaagtctgcataggagagcaacggaggaggccatctgccgattttgggccaggcccgctgtcacgcccagaaatatagccctaaatttccagactattttgtgtattaaatccctgtccaggaccagccagggtacacaaaaagacaagtaatatacagttccaaacataaataaagcgtaaaatacttacagaaggggcacttagtccccacaccgaaacgaaagcagcagcagcggaaaaaggcgatcctaacggggcttcaggtccactccacaggcaaactcaactggggtctgagccttggtcttctaacttcgtcttcaactcagaagcactacacttctgaaaagggggaataatagcaaggctgagtacaaccaccgtactcagcaagccgcaccaatgatgcaaacgtgcaaggggatacaaggatggtttgtggctatttgcataaaggcggttgtaaaacattttattgagcaaaacagtaaaatagttgagtaattaaagtaaccttaaatctccactgatcaacgctacaccacgttgaacaggcccaaccaacccacctgaactacagtgcattaggtcgatttattaagtgtgagactaatcacggtgaatctggtcgaccacccataaccgcggacacggctattcgaatagttttactctgatcagaggtgtacaactgtacccacaagacacagccccacgacacgtttccgtgcgccgacatgccaacacgacataccggaaagaggccgtgacaggacccttcgcataaccccctctaaccgatcgcaccacaccttaaggttcgcccccgtccccagcaggcaacgggcagcccccctttcgtgccgcggtgaatctagaagccgatcaaccggacaccccggccgacccaactccatcacgcccaccctcgcctgggtacgtcggctagagaaaagctacactacaagcccagccgttgcccacgctggcttgtggtaagtacgataagttcttccagggcatcccgcgaaccggtccttaattgccatgggtgcgactagcgaaaccatgcacccacagcccagcatgtagtcgcattttagttggataattacgaccatgaagcatggccaggtgtctcgagcacgcagctcattctgatactaaaaaggtctaatattgtaattatcccatcaactgagctagtgttatttaagcagggctaagcatatagttctagctaggtcacataagtaacatgagctagtcgatttattacccacggttgacaaagggcagatatcaagtaaacatggcacaagcgagcagataggtaatacccgaatcccatgtaattaacaaaacatgcatatttatttgtaaacggtaaaatatttataaattgggatcaacatgctcaaggggaatgtgtgacttgccttgcttcttcaaacaatcttccgaactcttatccttgcgaccgcgaacatccgaaacgacggattctacacgctggcacgcaaaacgaggaaaaactctaataaagaccaagcaaacagtacataaaaagtaaacaatcatgtagagctcaattttagatgaattttgcaagttgaacggctcaattcggagttcgaatgaattagatatgaattttataagttttaagccatttaaatgaatttctataattattcacgaattattgcgcaattattatttattttctcaaaggaaaaggctgtggtaacgtcagcaaagggccggcaccgacaggcgggccccactcgtcagcggcacaaggggcaagcacacggtggactcaatccatcgcggccgaggcggcaccgtggacccggaccacggaagtggtccacgggaccgacgccctggattggcccaaagcctatccaacggccatgggtggcgcggctggggcaaggcacggctcaaagccggctggacgaacgacggcgcgcggcggcgcggccacccgcggcgacggccggtgacagctcacgcgggcgaaagcggcgcacgcgagaagagcaccggcgcggcgcggcaaggggga

SEQ ID NO: 27646 - DNA, 1104 bp, Oryza sativa
ccggcaaaagaatcatgccagtaaccagatagtccacgctgcccgttattcaaaccacttaacacatgcaagctgccattgtgttatttgttctatgcttctataatagtcacaccctgagaccctctatatttgttgttcttcatcccagatgccgaaacaccaccacaacagcttgtatatatcaatcctttatattacaccaattgttatctctatctctctcacagacacaaacatcagctgctatgcttcctgttttgatcttgtttgggcttctcttctccctacagtgcaatttccctgcatgctctgccacaaataatggcagtactctcatggcaggccaagtgctcaccggtggaaacaagctcatctcaagcaacggcaagtttgcgctcagcttcttccaaacaggcagcagtaagtcatcagacaacaccaccttgcccaactggtacctaggaatatggttcaacaatatcccaaagttcacaactgtgtgggttgctaatagagataagccaataactgaccccatctttaaacagtcagaactcagagtctcaagagatggcattcttgtcatcttaaacaaggtggccaagtcaatgatttggtctagccaaattgagaatagaccaaaaaccagcaggaacaatagtgtagtgctgttagacaatggaaaccttgtcatacgagatgcctcgaacccatccaatgtgtggtggcagagctttgatcacccaacagatgtcttcctccctgaagcgaagattggtcggaacaagattactggtcagaaatatagttttacttcaaagaagaattccgaggacccagctctaggcttatattgcatggagttagacccctctggttctaggcaatactatgataagctttgcaactcgtccactgtgtacttttccactggggagtggaacggaagatacttcaactcagtgccggagatgtcaagcaatgttttatttgactcccaattcattgacaacgatgaagaggagtactttacttacactccatttgataaaacagtaattacaatctgcttaattgatgtatctggccttacaaagcagc

SEQ ID NO: 27647 - DNA, 1977 bp, Oryza sativa
atccctttgcacgtctgcatcattggtgtggcttgctgagtacggtggttgtactcagccttgctattattcccccttttcagaagtgtagtgcttctgagctgaagacgaagttagaagaccaaggctcagaccccagttgagtttttcctgtggagtggagctgaagtctcgctaggatcgcctttttccgctgctgtcgttctgtttcggtgtgaggactaagtgcctcttctgtaagtattttacgctttatttacgtttggaactgtatattacttgtcgttttgtgtaccctggctggtcctggacagggatttaatacacaaaatagtctggaaatttgggctaaatttctgggcgtgacaaagaagcaggatgcagattgttgtgtaacatggccaagctaagctaaatgtggaggagcaaagcatatgctctagtctctctattgcttgatgagaagtataaagctgaaaagatcgaagatgtccccttgtgataatgagaaacttgaaaaagggatagtgcgtggcctcgtgctcgctgcatgtgcaccgtggagcggagcctcgcggcgcctgttgttggtgcgcaaggacggggacgaggcgaccacggcggtggaggagaagaacgtggcagtcttgtgcgccctaaccgggctgcgaggtggagtggtgtgtgtgatgttattatgcctactatggatataactattgttcacatcatggatcaacaagaagatatcaagataagtcgttcaagtgttgaaatctgatccggcaacctgctacattgtttgtcttcaaactgctgccaaatatgcatacgagctttgttttgggttcatcaatactcgatgaaaagctcttggactcctctttccaacagttctagtctcatctccaaactccatcttagtcggccgcaataaaaaaacaaggagttgtgttaatataatgggcatatgggcttgtaattttatctgggacctagggtaaagtagggtgcgccccaatctagtggagcatgatcctagggacccttagctcatcctcgcacctccataaatagctaggcaccccttcagagtttcttgggttttgtgtagattaaagtttagacattgttactttaccttacagttacgtgtgccggctagaccatcaaagtactcgtctctgaaaccccaacttatcctggactttaattcctatttgcaattcaggttgcttttatcttgttcttatttgtttcttcgattttgcttgcaaaaataaggttgttctgtatcagccagatcaacaacccacgaagaagtgtatcgaagctaaggcacaacacaacatcatctcgtacgattgtagtcgggttgacaacttctctcacaaatcatagttatctcaattcaccaaaaatcgggtcaatcaaagccgtgagcatagcgagtggagcttaaggaaggtcgaggctcttcagaggacaagcaacgtgagcgcgggggtgccctctaaacacaaccacatggaggagcaggagcgtgttgccccttacggtggcgacggcttccaggtccacgaggagtgccttcacaagccaactctcggcatcaccggtggccgtgaggttgggaagaaggtggtgattagtttggtggcaaggtctccgcctctggcgatgccatcgtgtgcgtcggtggtgggtttggcgatgacactggccatctagtttgtcttgtcacatagacaaaagcggcatacaattaagaatcctttttctcccattactagtaagtagaaacctaaaaatagtactccctccgtttcacaatgtaaatcattctagcatttctcacattcatattgatgttaatgaatctagacatatatatctatctagattcattaacatcaatataaatgtaggaaatgctagaatgacttacattgtgaaacgggggaagtatttggataa

SEQ ID NO: 27648 - DNA, 5651 bp, Oryza sativa
cggcccaagaagggaggaggagggggaaaagacttcttttaggattttctttttataaaccttttcaactttgtttatttcttttcaattattatttgtgctctgaaaattccactaaaatttgagggctccttttagaccaaggagaatttaacaaaaattctccgggtcacatttgaatttttcttgtacgtattttaaggtttgccaatttcttttcgaattttaattaattctattattccttttagaagatgatttttatttcgggatgaatttatcaggacgtgacaccatctgtctgcgggtgatacgcggtgctgaaatttaatcgggtacccagctcttcttggagcttcttccaaaagtgagaggtgaattggcttcccctatcagatacgattttcttgggaacgccatggagactcacgatcctagcgaagtagagctcggctagtttgttccctccataggtggtcttcacaggaataaatcgagctaccttggttaatcgatccacaactacccatatagaatcatatccaccttgggtttttggaagtccggtgatgaaatccatcccaatttcatcccatttccattctggtacttggagaggttggagaagtccggccggtcgttggtgctctgccttgacacgctggcacacatcacaaagggccacgaactctacaatttccccgcttcatactgacccaccagtatttctccttcaagtctaagtacatcttcgtactgccagggtggatggaataaggactttcgtgagcttcctgaagtatcaactgtttaagttctttgttatctggaacccctactcgatttccgttccatagggtcccgggtcatctttgggaaacccccaactttaccctggttcatatttttgaagaatccacgcatgtccgggtcgttcctctgagcctcgcggatttgatcgagcaaggtaggcttggcttccaacgcagccaagaatccgcgaccaactatgcttaggttcagggcttccatctgttgattaagtttgggtggaatgccacggacgttaagagtgttgcaatagctctttcgacttagagcgtcagcgaccacgttggccttaccaggatgatagtgaattcccacatcataatccttgatgagttctaaccatctcctctgccgaagattcagatccgactgggtgaagatgtatttcaaactcttatgatcggtatatatttcacagcgattcccaatgagatagtgccgccagatttttagagcatgaaccaccgcggctaactccaagtcatgggtagggtagttgcattcatggggccgtagctggcgtgaggcataggccaccacatgaccgtcctgcatgagcacgcaccccaatccttggcgcgaagcgtcacaatacaccatgaaatccttgcgagtatctggcaagactaacactggcgaggaaaccagcctttctttgagagtttgaaacgccttctcgcattgcgggctccacacaaatttctcttctttcttcaacaactgtgtcatgggtcgagcgattttggagaagttctcgataaacctccggtagtatcctgccaaacctaagaaactgcgaatttgagtgacggtcttgggttgcttccaatcagtgacggcggtcactgtttcggggtccacagcaacttctttagcagatatcacgtgccctaagaatttgacttcggacaaccagaactcacacttgctaagtttggcatacaattgatgttcccgcaactttcccaacaccagacggagatggtgctgatggtcttcctctgattgtgagtataccagaatgtcatcaatgaaaaccacaacaaacttatccaagtattccatgaacactttgttcattaggttcatgaagaaggcaggagcattggttaaaccgaacgacatcaccgtgaattcatacagcccgtatcgcgtggtgaatgcggtcttcggaatatcttcttcacgaatgcgtaattggtgatatccggaacgaagatcgatcttggagaataccgtggcacctttaagctgatcgaacagatcatcgatccggggaagagggtacttgtttttgatggtgacctcattgagagctctgtagtcgacgcacatcctcttcgtcttgtctttcttctccacaaaaatcacaggagcaccctagggggaagtactcggacgtatataccccttttctttcaactcttccaactgtttcttgacttcggccagttcatttgctgccatacggtagggtcgcttgtacagcggagtggttcctggagcaagatctatccggaactcaatctcccggttgggcggcataccgggtagttcttccggaaacacgtctccgaactctctgacgatggggatttctgacagtactatctgatgaagttctgaacttctgacagaggttgggggtgcaaagaaaacaaccggttgttccggccctcggtacagagtaaccgtgcgtctcgcacaatccactactccttggaattgagccaaccaattcatcccaaggatcacatccaagttcttggtgtctagcagaatcagatccgagggaaaaggaatcccctgaatttctatagggacggcagggctataatactttgctgtcataacccctccaggggtggtgatgagcaaagggttcctaagcctttctacccccaactgatttctccccacgaatggcacagatataaacgagtgggaagctccagagtcgaacaaaatggtagcagggatggaatggatgaggaacgtaccaacgatgacgtctggagttgtcagcacgtcctcggccgtcacatggttcacacgaccccgaataacatccttaccaccattgttggagcggggaggcgcttggccttgctggcgcctcggcttcgggcatttatccgcaaagtgcccgggctcgaagcagttgaagcacagacgctgcggaccttgagcgtccctgcggccttgaccaggctgcacagttggcgtaggaggacggggcgcacgagtcccttgttgattctgctgctgctgcggctgtgggacgcgcaccacgaattgaggtcgaggcgcggagcgaggttgctgctgctgttgttgctgctgcgaggaggatccccctggatagggattggtgtagcggaccctttggttagcatcctgttgattgcggaaattcgccaagcggcgcttgtgcgactccagttccttgtgcttggcttccaagcggatgctcttgtccaccagacgttggaaatccggatagtccccggagactagacggacggacagctcagggtccattcctgccaagaacttctcttgcttctcctcatcttcccgcacatcctccggggcgtaacgggccaggttgttgaactcatgcaaatactccatcacagagcggttgccttgcttcaactcccggaattcccttttcttaagggccatgactccggcaggcacatgggtcctccggaaagcggcggtgaaacgggcccaagtaataggctgcccctctggctgcgtagcctggaaatggtcccaccatagagatgcgggcccctgcagctggtgggcggcgaagatgactttctcctcatcgctgcactgcacagtgtctagctttttccccacggcatgcaaccaatccaacgcatccacggggttgttggagctagagaaggtaggtgggcggatgcggaggaactcggcgagtttagagtgttgtgggggtggtggtggagcattctgttgtggcggattttggaggtggtggaggaaagcagtcatcatgttggcctgctgggcgaggatttgggtgagaatggcgttggtatctggtggtggtggtggaggcggaggaggaggtggaggtgggctgccctggtggttgtggttgctgccttcaggttggttgccatcaccggtattagcacttctcctggtcatcaccatctgaaaaccccacacagaaccagcaaacagagagagagctgacaattaaagctaaccacccacgactaccataattcttgaatttattactgctattaaattggttcattaaagttcaagttgcttagacgaataaaataaagacaggctccgacacagttataccacacaccggcataaccatgccccacacgactccaacaagaagacaaacgagaaagaacacacgcgcaagcctactaactgctcgtctaccgctgcgacgggccaggacggaaggtgagcaacagcgcatcctccgtgctaccaacgccggaggcttccccctcctggggaaccacgggcgcgggctcggcacgaggggtctccacgaagcaggtccacgccagggactgacgaacaagctcgggcctggaggtgcttttgcgggcggtgatcttctggctgcggtagacgcggtggcgcttggggcggcagacctctccctgggcgatcttgagctgatgcagctgcgcctccactgcgtctaggtccttcttgagctgcaggttctcctgatgcagctccaggatcttcaagttgttctcgaccatcccacggcgcaccatctgatggaagtcgatacgagccgcgtcgtacgcctccaccatgcgcgccaggtgcacgatggtagcgtcatcctccgagctagcatcccggaaggtggcgtagtcgcgggctcctccacggcgagggtggtagcggtagggcgagtgctacaactcgtccgggtagcgctggtgaagagtgccgatggcgaggagagcggcgttctggtaagcggcggggaaagaatctccacccgcggtgactgccagcgaagtccgctcgggagagccagtgaggatcactgcagtaacctcccacgcagcgtggggctctgcatcgtcaccctcctgatccggaagcggcctggcctggtagtccactccatgcggataccccaggacaacgcacatgccccgcagctccaagacgaaaccagtcatgtccaagccacgacggctgacgctgccggccatctacaaacaaaaacaaaaagaaaagcaacatttaaaaaggtcagattttggcgataaatgaagcagcaagacagagagagactagagggttttcacaaatacaaaggatttttatttcgaaaatactgctatggcttgggatctacggctcgtcctagggtcaagggtggctctgataccaacttgtcacgaccggaaataacccaacgggcgttccttacgtgcgtgcattaatccttgtcccaggaggcaaggtacaccaaaagttgatacaattcaaagtttaacaagcggaagcgtaaatagttaatttattacatgggcagcgaaggcccagcacacacagagacaaacgagaaacagcggaagactagggcgacgaccacaggcacttgacggcaggcacgagctagacaccaaagccttcatcttctaggggctcctcttctggggttgggaaaaattgagcaagactgagtacaaccaccgtactcaacaagacacacccacaagtgcagaataaatgcaagggagtacaaaggagttatactataaaggtttagg

SEQ ID NO: 27649 - DNA, 779 bp, Oryza sativa
tgtttgttaaccaaatattgctcaatgtttcagttccttgcgttcctttgttggaacgaatagtggttgcactaaagggattttagacttagtttggtataagatgagaattttgtaggattacgattcacattatttgcgccttggtactgaaattgtaaaatcgagggttagggcaaaatttggtcactgctaaacattctaatgttaccaaatcccaactagacaaagacatcacatgttatctgtagtagtgcaagatgtgtctgacaggtggttcctgttattatgttgtctgaaatactgttgatctggttggagacttataacagatagcatctggtggtcatcctgaaaaaatataataaaatgtatgaagaaaatagaaatggatctttgtctgaccagggaacatcttcgagggaatctttggatatttttttttttggttggcaagatctcagtgttactgtttgcttgctcatgtagatatatatatgtcagttaactcatggattgtatagccagtttaaaacggttacatataccattagctaagcttcctaagaagcagaaatttggcctatatgctgatgaaagacagctgcctccttagcttccattgcgtcaggtgcaccttccctttgtctactccactaattatctcatcaataagatccttaaagatggatttttcaatggccaaaacaattccttgccgttcactgtcggagctcttccactctttcatgccttgcattgcatcctctgctagcctg

SEQ ID NO: 27650 - DNA, 779 bp, Oryza sativa
cgaattatttgaaacaaagtttgtggttaaggatagagcatgtcgtactataatcgatagtgagaggtgcaataactttgtgagttcagatttggttgagaaacttgagttgcctacacaaccgcatcatcatccatattagatcaaatggttcaacttttgtggtaagttcaaggtaaatagaattgtgagaataaacttttcgattggaaattaccatgatactggcaattttgatcttgtccctatgcaagcatgttctttgttgtttggtcaaccataggtatatgataataatggatcgcataattttgttgctaacacatgcacatttagacataatggttggaaaatgaaattggtacccatgagttttactgaaattttcgaaaataatattcaaaggatgaagaatggaatcgatgagattttcagagataccaagaaagatgctattgtgatgtcttcaactaagtctgaattacaaaacgaacgtatttttgtgcctattgttttggacactaatattttgcaggcatctgagaataaccaaggtaatgagaaagagaagaaatacgaagtggaaaaagatctatctatagctccatgcatgctggaagaatgttccattgaccaagcacctataatttctaaagaggagaaaagagatactgataatggtgttataactactcagggtatgcatagttatgatgtgccaactatgtccactacttatgctatgttagagcaacccatagtggaaacaattgttgaaa

SEQ ID NO: 27651 - DNA, 1041 bp, Oryza sativa
cacacacacacacacacacacatatatatatatatatatagctaatataagtctattttatgtccctacttgttggcccatgccatataatatgtgtatttttcatccctattctttgtgccgtatcttacatatggttgaaaataagtctgtttcacatccctgaacttcgtgtcgggtcctgccggcccagcgtgccaaggtaacagcccagacatggcactgccgtgcctgggccaggccgtcgggcctcgggccatatggcctcgattccacgcggcgcgtggaaccgcacacgcttttggctcggctcctttggcagaactaactatgtggcgctcgcctattaccaggccgcgtaccggttccgcggcaacacggcgtggctcaacttgcccgacaacgccgcatcccgtgggttgcttcacgcctccgtggacgccaagctctaggctgtgccagaacatcatggccgccaagaacgccaagtcctccatggcaccgcctccacttcagtctctgccactgccacctcctccgcgctcatcaacaactgctccttctcgtcctctggcaatgcaccgtgcgctgactcatccctttccctgtcatagtcgttgttgatgaaaaacacgaggcctgagagatctgcttaactccagtgcaggtccaaaactcgccttcgggtatgctagcatgccagttgatttgatcctgcaatcaacatgaaataaagacaaagaaagaactaaatcgataaacgatagccgatcggctaagtgccgatgacatatcatttatctttgagccgatgtcatatatatacatcgatcgacagttataaatgaataataaagaactaaatctacttgatcggctgtagatattaacaatatataatccttatgtggatatatacttaaatcaagtgattgggatagatcggtcgccatgccgagacagtataaatcacttagattgaaatatatacaaacaacaaaactatatatgttcatagcatagccgatcagatagatctag

SEQ ID NO: 27652 - DNA, 3911 bp, Oryza sativa
  unsure (1)..(3911): unsure at all n locations
cagttttggacagaatcatcacctaactttatttagattttgatcttgccattttgaactttgagtaccatattattgttgaagcagcacagtagcatcatttctgtctgtcatgtgggcttttgttggaatgtcaggaaattgatcagcctgccttgatacctcacatagctgaagccaagtctcaaaaatatccatatgaagttcttttcagaagcttgcaaaaacttttgattgatacagctacttcagagtaagcctgatttcccttgtatttttattcgtaatggcttttgaatgagtggcaacctgatagatatccactaactgcaggtaccttttctctgatgatttctttggtgaagaatcactgtttaatgacatatttgcaggtttgttttgtcctatttttgaatgtctatcttatgtggatgtagtaatctaaatggagaagcatctagtgtaaatccatcgctcagttctagcatgtgaatgaacattcatatttaccatttgatgaggtttggatggatcagatttaaagggatgtgacgggacactcataaatgatggctcaaaccgcaaggcagttattatttgtaaatagtggtccatgtggctattacatcctgtttggatctgatccacctaaaattatgaatcaacccagatggagttggcattttagaacctgaagttcaaagatgcgtagatactcccccaaaccgcttttacatcgtcctttacccgtaggaagcacaatgcgtgcaaagactaccatacatttatatgcctgtttttgctggtcatactattgagacatactttgatcaatattgttctgccacagtggcttgaataactaccatacatttagtttgtcaaggccaatcttaattcagatgttttgtggttaccctgatttaaattttgctgaaaattaaaagtccagtctttgttatgaacatttctggctgagcaagtgagcataactcttctcagtcatttagaaaatgtgcaggatgagatttcaggagttgatagaaaatgagaatatgctttgcattacactagtaaccaaagtaatatactatctgttcattttatttaactttaggaaataatccatttattttatcatgtctgacatataaatgctccatgtcatagataatccaaactgattaattgaatatatcaagtcaagccattttatactattaccactgtcatctacctgaaaatagacaatgaatatgtgttttaaatgtttaacataaacatcaaacaagtgatgtctgttacttttcccttaggacctatccaagttgttgatgaacatttcaatgctgtgctcctgaactgttatgacgcaatcggcataatgcttatgatccgaataattcatcagcatcaggtacgctttgagttacctattgaagcagcttagaaatatcaccattcatgcccttgttgactgtccttgctttgaaggaggccacatctctctctctctctctccattttaggtagaaccctctatattgttatatgtgagaaatctaagtggaattgatgttttatgcagctaatcatgtttaagcggcgaatcccatgtgtggactcttacttagacaaggtgtgtgctttgtcgcatttttgttgaaattttatacttgtatcgacttttttaagggtcactatgttggatagccaatgcttcgccatgaatctttcttttgtttcaaattcatcaagtccatttgtgcacattgcacacttgcacaggttaacttatcactctggcctcgcttcaagatggtgtttgatttgcatttgaacagcttacgaaatgcaaatgttaagactctttgggaggatgatgttcatcctcactatgtcatgagggagatantcgctgaattntnnacagcantcccttcgtgccattctccaaatgtgaatatggaatggcaggttagtttatcaaattcaactcaacccgatttctgaaaagaattattgattcccattccatgcgataagcaacccctttatatggcttatgggaattgtataatgttatttatatctgcagcttgatcttaatctcgagcggttgcggatggctgttgaggaattgcttgttaagttggctaagatgttccctaaacaaaagttgcaaactgttttcctgataaacaactatgatttaacgatttccatactgaaggtaggcggtgaaagttcaagcttcattaagttgtactgtggtgcaaatctaacttagtatcnnatctttattaannnatttgttcctggaaggcttggtcatacaggaagctggcactgagggtggaaaaacacaagttcactttgaggaggttctttaagagcaatatttcagtatatgtggtatgcaatgtgccctctgagatagaaataatggaatataatttctgcgtgggcacatttcattggttttactgtgttagggggtacctgtttgcatctgtttaggggctatttggttgcatcctaacttgccagggcaccaaaccgtgatgtgttgtgtgaccacttgccgtttgtcctagtctatttattttagtacgacctctgtattttccatttgattctagaatttttacatgtccagagaaaatagtgggaggcctactgtcagtttagtatttcttttcttaggattacgaagccaatcagaggctagtcccattgatttttaatactggcaacagatgtccattttttctcctttcgtttgaactttattgacaatatttgtaaagagggagctgtgtggatagttaaaattttctaggggtaagctgatataatgaacaaatatttatgcaggaggaacttctactggagcatttcagtgatttgatcaaatttgtgaaatctcgcccgtgtaagttgatccctgttacaacatcaagctggttcctttttttgcaacggcatctcatctttatgtgtgtgttttaccagctgaagacacagcatcaagctcggacaaggccagtgttagtgatgtcgagccattagtcaaggattttgccggtcggtggaaagctgcaattgagcttatgcacaaggatgtcattacatcttttagcaacttcctctgcggaatggagatcctgaaagcggcactcacgcagctgctgctgtactatacaaggatcaccgagtgtgtcaagaagatcaatggtggctctgctctcaacaaggacctggtttccatatcctctatcttatatgagatcaagaaatactccaggaccttttagtcagtactggtcctgccatgtacactggtgtattattctcatgtaacgaaaatcctgatatatgctatgcaggttggttgggtttgacacggaactctgtttctcttgctatttggcagatgttaagaaattacacgggggtgtatctaaaatagtttttcgattgagagtaatggctgtttgtggtagatcgttgagctgattagcgattagctgcctatcagtcagccattcagatgttctttaattgtagtcatagccattcagatgttctttaattgtctggcggtgtttgggaccgtagaaacttatccccgcctgtggataagtgaatagaaacacataaattttgccatctatcaacaaatcgaaagaattaacatttctgtgactgtatccactcgcctcttgccaaagcgcccacatgtattatactccctccgttttacaatgtaagtcattctatcattttccatattcatattgatgttaatgaatgtaacattaaaaaaaacctgcacagcacatgaaggcgtccacagcgccacttgactgtcaaatataggcctaatctaattcttatcccttaaccgc

SEQ ID NO: 27653 - DNA, 1305 bp, Oryza sativa
acgatcttgccagatcctcgttgaattgccatcaccaattcggcgcacaagccccttgaacagaatatctcttctcgctaatatagctctccaagtatggcttgaatgtttcttccgagtggcttgtaagaactctgactcatgatagtatctgcctttcaacactcgggcacatagtgaattaggatttttgatcagtctccatccttgtttacctaacatagctaggttgaacaatctcaaatctcgaaattccatgcctccatcagctttcggtttagtcagtagttcccatcgctgctagtgaatgcgtctgctatctgccgagctcccccaccagtagttcgctatcattgatttcattttccgacaagtatcctttgggattaggaagcagctcatgggataggtcggtacaacttgagcaactgatttgaacagcacatccctacctgcacaacttgcttcacggccactccatgttccaactagatttctgattttggttggcataaattcaaaggtgtcctttgttgcccgccccaaggcagtagggaggcttaggtacttctccgctaatgcttccatatcaatatgtaaaacttctcttacctcccgtttgcatgcattatcgcagttagcactgaaaaagatcgctgatttatctctgttcaccaactgtcctgatcctcggttgtataagtcaagaatatcttgcaaccgtcaagcccctctctacgaagcttctaagaaaacaatgcagtcgtctgcaaacaggtgtgaaatccatggagcgtgtatcccaacctgcacacctctggcaagatgcaccggtccaaccacccttaagaggcaggagagaccttcagcgcacagtaggaagagatatggggagattgggtccccctgacgaatccctctcgacggcttgaacgggttcgaaagttgtccattgacccgtacagagaaagatactgaggtaacgcatctcatgataattcgcacaaaactttctgcaaatcctagttttaacatcgtaccttggagatagtcccattccactcgatcttaggctttcgccatgtcaagtttgactgcgcatgcccccgtttttcctttcttcctctttagatagtgagtgcattcataggccactagcacgttgtctgtgattagtcttccaggcacaaatgcactctgttctgcagagataatctcatccaagaacactcgcagtctattggcgagtacttttgagcacaacttatagaccacattgcaaagagagatcggtctgaagttctt

SEQ ID NO: 27654 - DNA, 768 bp, Oryza sativa
caatatgcaagtttagtgtcacaaatgtggtaccattagatatttttctggaagtaacttcttgttggcaatatatttgaaaaaaatattatacatcaactttcaaattggttttgttattatcaatatatactttcagtaagctcagttctttaattgctgggcatcttttttataatactattgaatgaattggctagtttccacatccagaatggacaattgagtaattcttgatcattttagcctttagtcctgaatattgctaatttcacatgctgatctttatgctgcaaatcgaagttatgcatgaggtatgatttggacacttgattgtccttgtaaaccatctctcttccttttgggcatatgttacgtatgtctgctggtaaattgtgaatgcttggttggtgtctggtaagaaaggatcagtctacactgagatagaaacatagttacttatccactatttgcagtatgagattgaataatttctgattcatggggcttacttatagttctctctggcaatttcattgtcatttcgcaggatcgcccttcgaccaaggtccatgctgcccctggtggtggatcttccctgggctacctctttggtggaaactgaaggagtgatcctggtgcactgtagcaccggatgaagaaggaagtctaccgctatccttgtttatcagaactgggaacccccattgttttatcattctctatgcatgtcccgtacctatgactccgtggcaaacaccctgcctg

SEQ ID NO: 27655 - DNA, 25939 bp, Oryza sativa
gggtatctgcggccgcggcgccgggatcgttgatcgtgcgtgccgggacatcgcggctttggtgggccggcctggccatgttggctttaacttccgaagctgtggatcgttcggacgtatcaggcccattacgccatcacctgtatgtattcctgtactcatgtagttcgttgggagaggatcatagaaaggaaaagtccctcagattttcgtgtgcacccttcctattctgctaaataatatgtttttaatatattttctatagataaattattgttttgagaaaaatcatattaattcaattcttaagtttaaaacatttacaattcaattaattatatcctaatggttaatcctgtttttgcatatcttttttccactctttttttaatccattgctttccatctacactacaacaacccagctttccacacatcgccggcagcatcaacaacagcccttctcttctactccctcggtaaaaaaaaaaagacaaaccctgagtttccgtgtctaatgtttgactatccatcttatataaattatttttataattactccctctattcctaaatataaggcacaaccacccttaacccaaagaccaagaaatagttattatcatcttgtaattgaatcatcctaataaatgtaatgcatgcatccaatagagttagagaatgtgaggatgaaggatttaaaagaataggagtgaatttcagaaaaccccatgttttgaggctaatataacacataaccacaggttttgtttattttctcacataaccccgtgcattcaatccaattaacataataccacaggtttaagtaaaagaaagtgccacaagggcaagtgatatggcaaacctgctccacatcagctggccccacctaccaggtcaatacatggcctattagggtgggatcacgcgggagaacagaagcgcgtgttccctgtttctacgcacacgacacggcgcctcccgtctttcttgcgcacgctggcggtggcgacgttccccaaccatctcttgcatgatggcctccggtgatgatggtgatgttgacctagctggaggaagagaactcgttgggtaccattcctagcaggtaacattcatcccttttcttgtgatgatcatatgaattgactccaaagcatgctggttggtgatttgcaaggacactctgcttcatggttctttgacgaggaattaaatccagccattttgatcatgtttggcttgtcaagaaattaggcctagtaaaatgtaatttaggggaaccattattgttagggcattacaactatgcaatcgttcttctgtttgtcattgcaaaattgcttttcatcatttgaccataattttttaaataaaaaaagcatgtagattggaccgtgtataagactattgtattacaactattatattgcagtcagatataaaactaaccacaattaacatttaaaggcctgcaacatttttttctgcttcacaaaagagcagacatggcttcctctttttttttctcggtaaataggttgtatttttctctgcttcacaatgtatatatttcagatatggattcgttttgcaaatttcctatgccctggacctgcaatgggtcacatattaactgttgctatggtgcttttattcagacatgggatgtttttataacgtttgctccattgttctgcttaatgcatagaaattgtcagttttttcctttcatttttttttcataggaacacagtgtcaggcaccttggtgatcgacctacttacaaaaaattcgagcagaaacattgtcaggtcctgccgtcctggccacgtttaatcaaatacacacacaagctttgtattagaagataggaagtatatgtacagtttgatcagttgatgcaaaacagaacaggcgatgcttgcctttgcatgtgcacgacgagctgcccctctgaacttgtaggaggaggaaaactgccgcagcgagcacgaggaagacgaggggtgcgtcatcgcgtgcgcgggaacagaggatgggtgcttccccgcgctaaatagcccacgcattgatctggcaggtggggccagctgatgtggagcaggtctgccatgtcacttgccattgtgacactttcccacacttaaacctgtggtattgtgttaattggatagagtgcattgggttatgtgagaaaataaatagaacctgtggttatgtgttacattggctccaaaacaatggggttttctaaaattcactcaaagaatagtaatttaatgaagaatacatgcatgtcttatattatgtaccataaaaaagtggttgtgttttatattatgaaatagaggtagtagtatttttattattgttagatgataaaacatgattaatactttatgcgtgacttatctttttaattttttttcatattttttttaaataagacggacggtcaaaacgttagtcacggaaacccaatgtttgtttttttggacggagggagtacttgccctgcccgtacggtgtatacgtgctgtcgtcgatcttgccttacgagactgacaccggcccactcaaaagggataccataccaaccctgtaagactcttaacatttttttttggcaacattgctcatagggttagtacacagtacttgctgatccattgattgacagccgtttcattgggttgatattcaagggcgagaggacagtacattagaagtactagtaatcaacaaaaaaaaaagcattaatttcttcatgtacgtgggcgtgcttacttttacatatgtaccacgcatgcaccttaaattctcttaatttagagctcatcaacagtttgtatgtacacaactacggctgtctgccagctagcttttctacgtatacccttggcaaaataccctaatttacggttatgttaattaattgtgatgaaatatatatcctcctaagtcctaataacagtctattgccacatactaagttctggaggggtaaaacatttcacacacaattcagagaataattttggtacagctccacctttaatggttcttgtctagctctaacttcaattgttgcgatgatcggatggacgttgtttgcgtcgtggatgtaaatttcttctttgtctagaagacattgtcatatgtttcttggtcattggttgtacatacagttgtttattcataggaagtcagagctgctcttttgagctcgacaacaataatttatgtgttggaattaatacgtggctaaaacttatatggagattaattctttgaaaaatcataaaagcccatctcataataaggtatacatataaatctttagtaccacctcacttattataggagagggatgcctcctaaaaaaaggagattgctcttctagttacttgagccatgtgagatgaagaggactagagaaacgcacgtgctcccagacgaggcggcgtgagcatgaatggtcacaaaaacggtatttatttttggaaaccagttttaggaaacacaccgaactgcgtggaacgacatcgagtttggataagttacacacaacttatccagttcggttatacggtgaaatttggtgtttgttatcggaaacataattgtaggaaacacgctgaataatccgttgcgtggagcggcgtcgagtccggataagttacgcgcaacttacccggttgggtttatagtgtaaagatcgtgtaggtgtcctgatcacacgtcttgatatctctctctatataaaccgagccaccacctcctcacaacatacgccaaaacaacctagggtttgtctcctcctctatactacattattgctcgtaatctactacatcccgctcgccggcattcactgatgatcgggagagcaggtctccgaaaccttcgccttcggtttcatgcaccgggagaaggcgacgataagagttttgggaaacgattcgtgcgactggtcgctgttctttcacaataatttgtcttcctctacgcttgacgtaagattaagtgagaaagctattatgttcacattttagacaaggtagtgtcttaaatcactttattttagtctacaaatgtcatatttggcacagctcaggatctgacattttctggagctgggtgttcctagcttcacaaatccatggattggatttaggattacattgataatatatggatgaaccattttgttcgtattttataaaatttcaaactgtactataacttaatatacaaactttaaatttagtgtatctaggatttagagctgtaccataccaaaccagaccaaatttagtacacactccatatcatgtaagaatattaaaaaaatatatagctctaacaaaaatctgaaaattagctagagctctaccaaaacccggagttttcagctgctggcagcccacagacgacaaaagcacaaaatgccatgatacagcgcacctttccctttgggcaccatcatatcagtccagcgcaagtttaacatccgtgacataatttatgtgtacctaatgtggcccccatgccatcaccctacccacaaaaagagacaacaaataactctagtttgctttgctagccactcccttgttttatgaccaaacttaaactttttattagtggccatcaaattgaatataacggcttcccttttagactagaagaggacgacgcagagagaaaactgaaagtttttttttcactaatgtcttgattaatctcaccctcagtgacgatgcgacactagtttcatatctagattgaaattcactaagggcccctttgaatcacagaaatgaaaaaacggaggaaaaaaacataggattttgatagaaatacaagtgtaaaacaggtgattggaaaaaacaggaaaaacataggaatgactgttcgattgggccgcaggaaaaacacggaaatttaaggagagataaaagactcaaagtattctttccatgaggttctacctcatgttaaatttactctaaaacttacatggggaaggacaatccataggaatttcataggattccataggatctatttctttgattcaaaaggctatatagaaaaaaatcctatagaaatgaaatactctaaaatttctatgaatttcctttgaatcaaaggaaccctaaagttttatatcaagtacaaattgggaaattaccggttggtaggctagctaactttaacttaactagtggcgccaattaaggatgtgttcggacccaagggttcccaacacctctccatggttttccgcgtgcacgcttttcaaactgctaaacagtgtgttttttgtaaaaagtttctatacaaaaattgcttaaaaaaatcatattgattcatttttaaaaaaaaaattagctaatttctaattaatcacgtgttaatggactgctccgttttccgtgcgaagaagatttgttcccaacctcccccagcaaacacagcctgaagaagctttcgtgcagcgcggcgcgcgcgcgcttgcttctcctttttctttaagattgcagctaaagcaaagagctaaaaggtggcgaaacgggaggcctttctcgccgcgctgcgccccctcttcttcgtgccatcgccattgccgcgcaacatctgagctcgggtagccattgctagcccatgcagggcctcgcgtccccgcggtgcgctcccttctgcggccgctccggcgccggcgcgggcggggcgccacgcgcgcggcggcagcagggaggtggctgcgggcggccgctggaccgcgtggccgggtgggtcggcggcggcatcgccgcggcgttcttcgcctccctcgagcggtgctcctgcgtgaacgtccgcacgcacgacgagctcgacgacgagacgagggactccgaggcgctgctcatcatgttcgacgtcgtcgacggcagcgaagacgctgcctccgccgccgccggcgccggcgggaggaggggcaggaggagcgagaagagcaagcgaggtggcggcggctgtggcgggcagctatggtgaataattaattagcagctatatataatttttgctatgtatgatcgagatcttgatgatgatcgatggatgcttgttaagtttgtgcaagattatttacgtttatatatatatgtctagctttcatcttgtgaaagatacatattttcttggatgtatggatcgatgataaattgtattcaaggtggttttttgaagttcaatggcaatggaacactgattctcccttccttttcattgtgttctcaagatgtattttccatcctcaaatgatacactgttctattctcaagaaaagttttaagttatatgtaaagatcaattatatggcataatatgtttttatatggttagattgttaaaaaattttagggcaatcatcctatattttgttagttcattcctctctttttttaatgtgcacactaaagcagtggtggttctcactgcaacaaaaagcatctctacggattttttttttcaattgaacatgattgaaaaaccattttcttatggggtaacccattttcttataatccacctaggcgttcaacccaaatgcttcctggctctacgttctaacataatgtcgtgtgtgctccgattttctttttgtaatcatcaggagtttcgttctcattgatcgcatataagagaaggaagaaagtgttccattttctttaagaaaaacatgtgctatttcatgtttttaataataggctcagagcctcagattacaatcggtggaaaaatatattacaatgtcgaacaaaatatgctcaattgccggaagcacattgctcaaccaaacagccaagcttaacacttcctctagcaaacttatttaagtcatgaaagacatgagttattcaggctaaattggagcaaaattaacatcccaacaaagcccataactttatcgcaacgtaccaagttgttctgttcgccagcattcggtttggcccatcaatgtaaacccactgccttattttgaagcccagctttgctttctcagctatactacccatttaacaaccatcattgatcattcccatcatcatctccattttagttgtgcaactcaactgacagagatttcaacaaagcatgaatgcatcacacatgcacatacacgcgagtgcgtccctttagcacacatctctgtatataacattcacattgtttgcttatcatttgagtcttactaataaacaaattaaggaagaacaagaaaccaaataactaataacagacaaagtaagcaaaagtatgaaaggcaatctaaccaaagctgctgtgcccaaaaggccccaagacactatatcggcatgctcttttacttggacacctgtcccaataatctcccaagatcaaagctgcatatgcatcccccatgtctgcctgacaaacacaaccaaaaacctctcacatgcaggcctctggaaagctcaaaatactatcaaattcccaaagcacaatcagggagcagctagccaacagcctttatcccacaatctcgatgcatcccatgtgtttggctacattgcgtgcaacttttgcttcaaaataaactaagtacttcatccgtcccaaaataagtgtagccatggttttccacacccaactttgatcgttcgtcttatttgaaatttttttaaaaaaaattaaaaatataagtcacgagtaaattactattcatgtttatcatctcataacaacaaaaatactaattatataaaaaaataaataagacaaacaattaaagttgggcacggaaactcatggccgcacttattttgggaggaagatagtaaaggttatggagaccagtaccctcccatcaatcatcatgcatgcaactaactctctgcatatagacaggcagctctggcatataggcttggaatgatgccatctgtccttttgcaagtttgcagtctttcttttgcatatatggcctgtccgttgcagcttaaacatctccttttgtagttttgctagctaagaacaagcttttttagttagttaaataggtggctagtgacacttatatcaacattcatctcacagatgaatagatgtcgttatgtaatacgtgcagttaaacctcgaaaccttaaataattaatttataaaatatattaggagttgatacgagaaaagtgtcaataggtgcagtcaaacctcgaaaccttgtatgattagttaataaaaaaatattaggatttgatatgagaaaatgtcatttgtagatttgtcatgaaaaacacatttatattgtttacttttaatggtttttaataaatactacataagagtaaactatgctcacattacatgaactttcgtggtaggtgtaaataggtaaaaaaattacaaaatgattagtctatgagaatagggacgaaatgatccacgcaaacaaaattgttgcaacgttgcaaactgatggcacgacagcttacatgtatgaccatgttttagagatcttatttgaaatctaaagaaaaatagaaatatgtgaaagttcatttttcatgtacataacagaatttatttcatgtcttggaaaaaatttattcactatataactcatataaggttaacctatatgttaaggaccagggtaatttctgccatgcctttgtacaagtaactgctgaaaattacattttaattttcatgctcagaaactcatttcaccaaaaaaatgtttttttaaaagcttactttcatggttgggcatttttaattgtttcgctttttgtcgatctaattcttaaaaatatcaagcgaataatagttacacattttgtccatataaaatttgatgtgcaataataattactcatcaatatgcaccacattagatcatattttgcttgcagagattgtattgacccaggttcacacaggctaggcatgttgtaaattgttgtatctatttatacccaccatacaagctgatgtaccgtgaatgtaatttactaaatatgtaatttagtgataagatatacgtattgggaacaacgtgtcaatataaaaaacgacaaataaaatagaacagaggcagtccgtgtgtagtgtggtgatcatgggcaacggcaacggaagggaggtttttaatttaaggttcctttaattcaaaacagcaatttctttcggttcctaccgaaaatgaactgttttatgcgcaaaaatcatgcattctaaggtagcgtactcctgcatgcatcttgggcatcttttttggctcaattgatctctcatgcagcccacttggtgcaaatgttggagagaagtgggcgtccatttaggagaatgctttgggcgaaaggaggtggatagctttagagagagtgagacacttgccatttggattggttataaaaatttccctagtgcagttaatgttacaaaatatatatagccctgtttggttgtacatcggatgtttggacgttaatttagaatattaaacatagattaattacaaaacccattccataacctttgactaattcgcgagacaaatctattgagcctaattaattcatgattagcctatgtgatgctatagtaaatatttactaattatagattaattaagcttaaaaaattcgtctcgcggattagccctcatgattatcatagtagcagcctatttcttccttgcgccctgaccctaatgattggtgacattgcagcaactagagctagattctgtgtgcattaagttgttatatttatggggtttcctgcaagggatcgactaatggaacatgttgtccactgtccagtggtttagcatatcaccttcacaaaagtattatttttcgcaaagttcaatctttaatttgtatctaacatatcttttgatagataaagacatagaagaatatcgtatggttctatcaattatagtactcgaaaataaaagtagaaaattgacctccaaattcgttttcaaggcgtacaggttattcctaccatgttaatcaaagaacaaaggagaagggaaaaaaatctaacccgttgagtgtggtgtccggatgacaataatgtatatttatctgagatggcatattaggtgcatgtcaaaagaaaattgccaattgaattagaaatcttaggtgcaaatgattttcaaaatagagtatcaaatttggtgcatgctacagttattgagaagtacccctccatttgttgataattgacaattttaacttttccaattaaactttaaccattaattattcttaaaattggcatatcaaagtgaacaaatgttctatggacatacagcactctaataacattgtatcatttctagtatttatattttttgaaaaagaaaaagacgagcaattaaagttcaaaaatgaatatatgttgtttaaagttgaaagagaagaaagtcaagaaaccttttctctcttttcttaataaactggccagtccaggagagattggccggagaaaagaagtgcaaacagagtgagcatggtagtgtgcgtgagctatgcacaagtttggggtgattttgatggaagacgacccgaagggcaaaatcttcaaccttaatcacgaaggaaacgtacggcccagatatttaattatctcacagcagtccaccccatgatgatttgaagttactctgtctgatggccctgtatcttgtcagtaattcggtatgccggaaactgggggcaatgtcaaagtcttttgggcctattggttaattaactggcagcttaaactggacaactgttttattggctcaaattttgcctaccacttttgttcctatattatggacttgccaacatttttgggtttgttaaatttggtctaaaagcaaacaaaaccatactttggcttgtcaaatgaagacatggaacagaacaaaccagacacgcgcattggcatactgtttaataaggaatactcataatacttgcgaatcattttattaagattttgcgcattgaaatattacatccgattcataacaattgacacgtggcaatattccctatattccaaattacaaaacgtaaacaattcaactctaataatatttagctaacaattaatttggtataaattaaattttatttgatgaaaattatattattgtattcatatttggatgtgcttccttatggttatcttttgctactaataaacattgtagtaatacgagaaattaaaaatcaaatattagttttagagaactccgtcaagtatggaccgtgcagtatattctaggacgaggaatcaatagcaaatgcaaagctaacttaaccacaaattcactcacaagaattttgggatattttattttaacatgaggattatggaatatggaccccaaaaagtaagaaataccaataatacccctcctaaaccatctataaataccccagcccttcacttcttccctcccttttccctcactcccgtctctcccactctaatacgttcctaattaccattatgcccgtcatgcacctcctggccccaccagcgcaagccttcgtcgtcgggcccccgcgcgtcgcgcccgcgttcgacggggcccccgcgccaccgcgtgaggacgacccagccgccgaccagccgccggagagggaggccgacgccgacgagcggcgcctccgccggaagatctccaaccgggagtccgcgcgccggtcccgcgcgcgcaagcagcggcacctcgacgagctccgcgcgcgcgccgagcggctccggcgctgcaaccgcgagctcgcggcgcgcggccacgccgcccgcggccgcgcgggcctcgtccgcctcgccaacgcgtggctccgcgccgaggccgccgccctcacccgccggctcgcggcggcgcgccgcgcgatcgcgctcggccagctgtaccgccctgccgcggcggcggcggcggcgtcgggacgttcgagcagacgatcgcctcgctaatcgcgtagcgcgccgccatgcacgcacgcatgcacgttcttgatttgattggctgcaggttaattaatggaaaggcaaatggatttaaatatatcctgaaatccaagcatagcctctggatataaatcgtcaagtaaaagaatgagaaagaattaatggcatgactaatttgtgagcctaaatcggtcagaatgtttaattactggccacctgtatttcctgagatcgttggatatttctatgcttaggttctcagattattagcactgatgtcaactggcgagacacatcagaactgatttcatttttgaccttcttcggaattgatgattttgtcgggaattgaactgattttcatggaagtctcttttaagttttttgcattccaatttccaaacgatatctgatagtcttaagagagcctacgtgtgaagagagtactccacctgcagaaagacgttttggacaaagatctttcataatctcataaagattactatttggcctcgtttagttcccaaaaagtttttcccaaaaacatcacatcgaatctttgaacacatacatggaatattaaatgtagattaaaagaaaaactaattggacaattagggaggaaatcacgatacgaatcttttgagcctaattagtccatgattagctataattgctacagcaacccacatatgctaatggcggattaattaggctcaaaagattcatctcgtggtttccaggcgagttatgaaattagttttttcattcgtgtccgaaaaccccttccgacatccggtcaaacgtcctatgtgacacctaaaaatttttatttcttaaactaaacatgccctttgtttgtaaatttattttgtacaaaattatgaccaaatttgcactgacaaaaaaacagttcaaatgtcaccttttttaatcgtagggagtaacgtacaaaatcaatatagaagctctcgacacagtccattccaacaatatgattccaatataatcatcctctaaaagttacatcgtcggctacaaacatagccaacacatacacctacaataaatggtgaccttgtttttttaaaaaaaaacaaaaaaaatcaatgtcaccccaacaaaaccaaattgacaaaatttaaattaagtcccgtgcacaattagaataagatcattaagccagttgctcgacaagttaattaggcgcatttgtcaaagaaggtagattaagctggcccacctatatagatctcctcattagattattcttttcgatgaaatggttaatacattatacatacaactgaataatatttcctcttccttgttagatgaggagcactagaacatatctttctcattacatcgtttttgttaccgaatctataccactacatatcaatccagcttccaattggcttctatcactatcttcctgcccttcttctatatatccctcccaaccacggctttggaggcatcacttctgctttaccacttatctgtcaaccttccatcgccccaagttcggtatatatggaagtttccactctaaatccttaatctggcaggacaccccatcactatcagttgttagtttttaccacttaggttctctttggaggtaggaatgctaaaagcatataaataggaaaaaaataggatttttatatacatgcttatctagaatagaggaacgtaaaattcaagataaatgtatactctctccgttctttaatatatatatatatatgatatgttgacttttaaagatatatttgaccattcatcttataaaaaaaatacataattattattcattttattgagacttgatttatcattaaatgttctttaagcatgacttattttttttatatttgcaaaagaaattgaataaaacgaatggtcaaatgtttataaaaaaatcaacgacgtgatatattaaaaaacggaggtagagtagtacataaacaatcatttagatagaccacatggaaaaacataggggttagatggcaaagatggacccaaatgaaattttttgagagtttgaaccttatgctaactatcctggaaagatctccattcgttgagcatttcatagctagaattttaatggtatccaattctttgtctcaaagtgtcatttagacacaaatattagggaatgacctaataacaaataattagaatgtgtgaggctttaaacccaggtcgtctagcccaccaccttgtggagctagccggaaaatccctaggcgtttctcaaagtgccattcaggacaacaatgtcctatacagggacccaaatcctaaaaaaaaacctccatttgtcatttggatcatttgttcccaagggcgcaagtaaatagttaaaaatgtagcaatgctatagtcacaaacgtttcaaatcttaccatgagcaaatgaattgatggtacaactgatacagtgatactaaaaccccaagaccgtaagaaaacttattacgccataattaatgtgcaaacactttggatggacaacggccggtggatggatcttgatcagacaactgaacgttctctcgtacgcgtgtggtggccaactggccattagttcatgctagatttgattggtcaaccgatcgatctggtgcatgcatatatgatgatctgatcgaagtggacgtcgttgtttaattcctgtgattaaaagcgaggacaggatgctttccagattaattttgccagcagagcttaatgcgtcttaaagctgtgcctgctttgggcgttaatatcgttttcgggtgcgattaggaacttattctgtgggtgggctgttgctatcgccacgtcgaaagctttgctgcctcaaatcgtgttttaggactcggtactattgacgcctttcagataatccgaaagaaagaaatatgtcctctggccgagaaaatatatacaggtctgtttagattaatttgctgtggcaaattattttggcaaaaattttggtggaaaaagatttggcattgaagttttgctagttggtgtgtaaatacatggtagagttttgccgacttttgctactagtgtttagatccattttgacaaaaggtgctctaaaacagcaaaacttttactattttagaataactaaacaggggggcatagtgaaaatcacgtatgtagtaaaaattatcgtaagatataatagacgtatgtgatttatctacattactataagttctactgtggtaaaatttttacccatattaacgtgagccaattcttatcattcattttttttcatcttacaataatttccactacatattttctccctagaccttattggtttgcgatgctaacatgcatggcccacctagtcacccgctgtctcgatgggtttggcccaattaaaacaagcccatttggtatccatttcacctccttttctcccgaagatttttctttccattttgttctagcgaagaaaaaaatactaaaaatagattaatccatatccaaatgtataataatatatttggattcatagtattagattgcgtaaaatataatactagattgctactccggttgtcccggaaaaaaactcctagctagcatcccaagacaacaacaagagtagaaaagatcgaaacgttccttattagtagaaatttagaattggtggatgagggatatggacagtggtggtgccaagatttatggaagactagagctggatagagcggtaccatgtgatcgtgggttcattccccacggacggtgccagctgttgtcgattagacaatatatagcgtctgccgaaagacaatattcactcaaatatttggaaaatatgaatggtaaatgtattgatttcttaataattggatcccctattacacatccattggggtctatttatagttttatagtccaggtttataatcctaaggttgttggttactcgggaattgacttggcttctcttatgatagggacgtttataggggtaataattgtcttttgtcccagtttacaggcccatgggccctaaaggcccctcactaggccgtttattaggttcgcagggcgaaagcctctacgaagagctcatcctccttcgtcgtatggtgttcctttgtcccatgcttggcgaaggtcttttgctctgttattccatgggcgctaagccactagtcgcttgccttcattacttatgcgggcttcgcccttcaacgtctggcttcgtgacttgacaggtgtttcggtagtctgatcaaaggtactcacaacatgcctccaacagttggttgaagacattcatgacatgtccctgacagttagttttctataagatttatatggtgatttaataaaatatagtcgagattttagaggcatgaagctatcctaggtctacctctgaccctgggtatatggaagggatatattttctcgatttataaaggtatgtactctctccatttaaaaaacagttatggatttgaatctgaaaaatgtgtaaaaggatagaaatcggtctattttaagatgaaatttaaactgtacgagttttttttttttaggaagcgtaagcagttaagctgatgtggatgcagagttgcagacagtcacaagcaggcggaggttggtttcttggtttcagtggagagattgacaggtggtaggagtagaaaggataggtgtggtgtaggagtacgggcggaaggcggcgaggacagcaggaacgaggccggccaaattcccccaggggggggggaccgtggtttggactttttaaagtacctatcataactatctatcatatcggatgtttagatgctactctcttcatccataaaagttaaacatattttacatttgagtttttctaaataagttgatttatagttcttatgcattcaaaacttaaatagagagataaattaaatatttgattagaacgtaaggagtcatctaaatacttattgattgcatgcttgcattcacttcttgagtttgtaatatccaagatgatttaatttctccttggtcgtaatgataaaagtaatatgtgtaaattttgtggatggagtaatttggagtattaaacatagactaattataaaactcattctataactttggactaattcgtgagacgaatctattgagcctaattaatccatgattagcctatgtgatgctacagtaaacatttgctaattatgaattaattgggtttaaaaaattcgtctcgcgaattagctctcatctatgcaattagttttatcaataatctatatttaatactttaaattagtgttaaatatccgatgtgagacagactaaaatttaatccttgtgtccaaacaccacctcagtgcccgttgctgtacgccgtgagccatcagatcaccgccccaaaactatgagcgcctttgcgcctttcgcccgggccggcgtacgcacgccgacgcagcttttgcacaaccacaacactgctgctgacatgttctatgctactgttctaccttgtgctaagcatgggccattagtttagctctactacttcagttactattactactgctgttagtttgttactgtactagtactactccccccatgctgtgcctgtatggtcaaagaaaggcttgctggttaccacaggtgccagcatcattcgcttcagaaatcagtgtgtgttttttcatagaaatggaatgtcagggaatcagggatacaccgttcaaagggaccaaaacacacacacacacacacgcacgcacaaacacacaacaccgctcctctgagttctatcctgctcccattgagctgtgtgtccatggctctcattggaactttcagctagcaataaatttacacaacaagaaatggaaaggccccgtcctccccaacgagaggcaaggagaggactgtcgtcttggttttggttggaggctggcacaactctcacactcacagtcacaggcttcacgaatcacgaccatgagctatacagtactggtacttgcactagggcccagtttagtttctaaaaagtttttctcaaaaacatctcatcgaatctttagacacatgcatgaaacattaaatataaataaaaacaaaaactaattgcacagttaggtcgtggccccctgtatctgtctctcaaaacacacagaaaccactaggtgtgctatggtttattggtttagagcctctttgaatcgtatgattgaaaaaacagaggaatagaaaaaatatagaattctgataggaatacaagtgtaaaacagagaacacaaagaaaatacaggaatgatcgtttgattggaccgcaggaaaaacacaagaatcagataaaaagagatagattgaagggaagttttccaagaggttagagtggatgctaaattttctacgtttttcctctagaatcgtgggaataggaaagtttcctacgttttttcttttctcttcctacaaatcaaagacatgaatagtgtagggtttcaattcctttgcttttcctctatttatcctccaattcaaaggggttatgtttagtttctgaaattgggaagaagtttgggaaaagttggtagtttggaaaaaaaagttgggagtttatgtaagtaggaaagttttaaatgtgatgtaatgtgatgaaagttgggagtttgggagaagtttggtgcgaaggccttaacagggttagtaaaaatgtaaaatgcaggagcagaagccatggaggaccttgtcctgtgctgtgcaagaagctggctgtgcatagaaaattggagtagcagtagcatagcacctgtgctcccttgtgctgttcctctgaagaggggcagtgatgagagattttggggggcctccactactctatagtcaagctttgaactcaaaatattgcaaggtgcatcgtgcatggatacatatatactacagtagtatttgccagtactctctactaggcgtactacggagtactatactgtagtatccgtgaagataacatttttatgctgttccttgtaatctactcaagtagttcagtaaacaggggaaccagcgcttctaccaaatcacccttgctctgaactgtcgcgaaagcttgaaattatctgatgcatcgagtagaccattgcagcgtgtgctgtactccgatgtaatgttatccattcggagtactactatcagtgttccgtactgtgtcttaagcctaaccatgagagtgtgttttgctgcagctttatatggtcgctgccactgccactatagctgattcccctgatccgtcttcaggtgccatccaatcaaacaaagcctatatgtttagatacaaagtttgaatccaaacttcagtccttttccatcacatcaaccagattacacacacaactttccagtcacatcatcttcaatttcaaccaaaattcaaactttatactgaactaaacacagccaaagttgaaggtatgtttgaagagtttcacagctacggtttctcctagaattagagggtgttttggtgaaacacccccttaaaatcttgctaaacagtttaattttttttcaaattgagaagctatggttgtacaatctaaaacataaatcaaaatttagaagttaaagaaacccagattttatatattttcaaaagttgactaacaaccagttacttccaaaatctcccgagccccattggttgccctaataaaccaaaactgaaactaaaatttgaattttcaattctcaacatggtttcttttctagctttgatttttaagttgttaagaacacacatataaatattttacctatacattattttttattttttaataagccgtttttgttctactagagaatatatatgggcgacagatgagatcccccttctctcaaatgccagctgacctgcttcaagatttgtacagaaaccctgatcccccgaatgtgtaacatctgatgatactaagttggtttttttatagaacggaagggaaggagtaacttgttctgtttacagcgccgtcagtagccaataaaacgccagcgaccgcgacgcatcgtgccttctccgttggttttactccttcgcctcgcaccgcaccgcatgcggcgagcgcgacacaggacacactcggacgctcgctactcctctccgctccgggcggatggatggctgcgctacccaacaagtaacagccatcgtccgtccctggggaccccgaccgcagagcagacgccctcctcctccctctcctctccccacccatggtgttatgaggagaagaatactatgatcctcttcttggcttcttcttgcatcccctcctcctcacatgccaacaacaacaacccttcctcctcctccattcgccacccctcctgcttccatccatggacgccactcccgtcttcttgattgctgattagtcagctgcctgcgctgcgttctccttgtgcttgtgtgcgtgtgagagagtgttcgagcgaaggagaggaggaggggaggcaatggcggcggcgaggaggctgtcggagctgctgcaggagcagcaggagccgttcctcatcgaggccgccaagatcaggcggctgcggcgcggcggcggccgcggtggaggtggaggtggagcgtgctgccccgtggccgcgtgcaggaggctgctcaggctctgcaaccacgggttcaagaagaggcgaggctgcggcggcgtcggcggcggcggcggtgtcggcgggggcggcgtcagggggctgaggtcggcgctgagcaaggcgctgtgcggcaaggccgtgaggagggtgctccgctgggacagccttggctgcttccccggcggcgtcgaccgcgagttccgccggctgcggcggtccaccggcgacagcggcgagtgcgacccccgcgccatggacttcagcggccacagcaacgacgagcggccgccggggaggtggaaggcgcccggcattggcatggacatggacgtcgacgagtcgtcgcggcagctcagcccggtctccgtcctcgacctgcactccgacgacggcgactctcctgtgcactgccgctgtaagttctctgacctctacagtgccctctgcactctgcactactacgctttaccattttaccaacccgtcagtacttttgattaggcattcaatgtgtcttaacatttcgatttaccccccatgtttattactcttaccaccttaatcaacattttcccctctctctctccagcaacaatggttaaaattaacctttactacaaatgctacttattaacatgttaactgcacatttaatgtgtcaccattgccattaacccgatgtttatcagtactccatcttaagattcatctttcccatcttaacactccatttctattatcacaggggaggatgcaaagccctcgacctcagggagctcgccaccatccgagggcttcatcggcgccacctcaccatgcttcacctacaacatccatggcaagatcatcccaatggaggtagaagaagacgaagaagaaggcgacgaggaggaggaggagatggccagagccggcaagtccatcgagcagcagatctcctcgtgggagaggatcgcagaggacatctccaacatcccgagaatggtggagatggacttctcccagtcgatacaacaatggggcgagctcaagctcgaggcagccatggagatcggcacgaggatagagaccctaatctttgatgagatcaggagagaaaccgtctgtgacatgcttgcttcacactgtacattggcagctgcaacatcttgttgaccacagaaaagagagagagagagagagatagtagtatgtggactgaggaggaggagaggggggtgtggttaaaaaaaatggaggatctgtataatttgagagggttcatgtggaattcatttttttccctaactccaaagtcttggtcccattgttgtcccgagctccatgtttttcattctgcaaatattatatatatatctttagatgatggcaaatattagtatatggattgaaaaaggacggatttttattctttcttaaaagagcagcagttaagaggcctaacaaacactaaaaatatatcaagagatgtgtagacttttacatgcctgaaaactctctgaacaagaacactacagatgagtgcttgtcttgacaaagaaagtggggcttgtctgtccatttactctcattgtaaattcaccaggaaacacgccattattccaggtaaacagaaggagacaaatctgtggtctcaaaagtcacaggaccaaagctttgcattgcatggacatatagacatatggtcatatagtataaaagcaaagcttagcctttttcattaagtgatcagtttttgtccatttcacaaaactaacaacctaaactgcacatttggaatctgaacactgcattgaaaacaggtgtggcttccaatggagactctgtctgtagggaaagccaagtcctctgctaaaggacagggcatcatgtataggataccctttgctgctactagttgatgtcttaattagtgggggtcaaagaagcagccaatgctgctggcactgacagtaccttctttgcatctccccatggcataatatactgctaattagctcttagattaaggagactggtactaggtgcacccttgtactgctgcttaactaaaggtttaagatgcaactgaaatgattccgcatttccactagggaggagctagagaattctctcacaagattagaccaaagaaagtagtagtaggccacaacgtgtggactagtgctcacaattacgccacactggaagaaaaaaacgtgacttaaaatatgatgaagagatcgtgcgtggttgctccaggtaaggagtacaatatgaagaatacaaacttaggagagttgagtggtatcagggttttgctttcactgaagtaatctgaaatcggccgatcgagcttgtctcttgttgatcaggaggaggttggtaggacagaaacctgagagagatcgatcatagccaaaacaaatcggcagttagaggggaagggggcaatgcaagagccgctccgatcgccgtcgccgtcgccatcgccgtgcacatgcacactgcactgctcggccctgcgaaaaattcagagaaccaaacagaaaaaaaaaaagaaaaatacgtttgcatctaccaccagtctctgtcttgtgccatgaatctctcagcagctatacgggcaagcgcaatgttagttgccgacttcggcaatgctgtgggccaagggattaaacggtattaaaccatcgcacccttcacattgtttatacgcgttggagaggaataaggtgggcccagctaaataaaaaaatcaccgatagtaaaattcccgtgactgctgcgtgactccttctcgcgagttatgtcagaaacattgtttatctcttgttcatcagtagtagctgtatgaccaggttttaactctttgctactctcacaatgctttctactaggtaggaagagagcatgtattgcttattaccggctaaaaagcgacaatgtggatgccgtacgagagtaaaatgcgtgtgcgtcgcggaggtagctgagcagagtgaggagaagcggagtggagtgtgaagtggggcccaggtggcagccagcgtggcgggggccatgtgggcacaataaatggcccggcggtgaggcagattgcgcggttgcgtcgcacaaggctgctactgaagtgatgccccacccaaccgccgctagtgtccgtcctcgtcctctctctctctctctctcctgtggctgtggggcccgtccgcccatgcactatgccttgtacgtccacggtacaattatgtggtctctacactcgtccggttctccggccccttcccttcccttgtggccgctttgtcactctttctccaaactccaagtggaatccatccagtggaacaatggaagggatcgagtttaactgctttgagtggtgatagggaaatcatacttaatactatactatgttgataaacagggaggatcgatagaaagagatcattttgattagacaaattttactacagcacatctaaagtttatagtcttcgctaaaagacaccgtaaaacgtgaaacaattggtagacacccctaaaaaattactctctccgtttcaggttataagacgttttgactttggtcaaagctaaactactttaaatttgactaagtttataaacaaatatattaatatttataataccaaataagtttcattacataaataattaaatatattttcataataaatttatcttgggttgaaaatgttttttttctacagacttagtcaaacttaaagcagtttgactttgaccaaagtcaaaacgtcttataacctgaaatggaaggagtagtaatagctatgggacaccgaggctattattattttttggtccaaataaaaagagaaacatttagaaaaaaaacaattttgcctctagggccatatgcttctaacctaactgggtctgattaaaaaatagggtttggagaggggatcagggatgaagattggcctaattcttgttgaaaccaaacccagtcgtcttacaagcatttggccccatcggtacatttgtcttttccacattgtttctctcttcatttgaaccaaatataataaaataatggtttcgttgtcccaccgctattaccattttttgggtgcccgccagtcgtgtcatgtttctgtgcgatgttattttagcaaataccacaaactaaagctgcgtttggaagtaagggttgggaaccctcactccccagcacgaaaaacggagcagcgattagcaagtgattaattaagtatttgctatttttttaaaaaaatggattaatatgattttttaagcaactttcgtatagaaactttttttaaaaaaatacaccgtttaacagtttaaaaagtgtgcgcgcggaaaacaagaggaggagttgggaacatgtccttgcgaactcagccgaagtgtcagtagtaaattttgcattatcctgcattaccacgaagtgtgactatacaggcctataaaaatggtgcattcttagtagagctaaaaaaaaaagaaaattgatttcacccacgtgagttgaattgttatcaagtttctaaaggtcactctataaataatggaggagactatacttaacaacagtaaattgattccgaacaaagcgggcatccattagctgaacaccggccaaaaagagaagcagtgcacccataattgaagagtatcccgcacgccccggataataatgtcttaggaccaaaatcataattgaataacaatgtccagagaggagaaaatctcgtatgtcttcttccctgggcatttaaacataagccaacaaaaatgtgtgtgtatatgcatagatcaaaatggtccaaatctatttgtgaaggatatgtaacggccaacggggccgttgcatgcaacagcagcatgtgctccaatagtttgcaacatgtaccagcagttattaggtttaggcaccgcctgttgccttgttgtcgtcgaacggtacagcgctagtacgtccacacattttgtagtttgtcaaggcaggattaaattaaaccactaaaattgcaaaggttaatatttttaatgtgaaatgctaagttaagagccctttgattggtagggaaaatacatgacatttataatcctttcaaataagtaaggatggggacctgaacactgctggagaaaccatctttgatcggtcgaccaaatttcataatagtcctggttgtattaaaaatcgggactaaaaatatctttagtcccggttttaaagctccaggggtact

SEQ ID NO: 27656 - DNA, 25806 bp, Oryza sativa
tctattcctcgccttctcctctctacacaacaacggtggggcgaggagatgccaggccggcgcgagggcggcggggcacggagggcggcgcgtggccgccggcggcggcctgcggcggtggcctggcggccggcacaagggcagcgcggcagctcagcgaagcattagtacgccggcagcagcctactggatggggccctgacggtctggcgcgagggcagcgcggcgcgcggcgaggcggtggccgccggcggccgcctttttgaggcgggcagcctgtggcggcaaggcacggatggccggccggccggcacgtcgaggcggcgcctagcagttttttctttctttttttttgagaatctgagctgagattgttgtgagatgtattttatttgtgtgtgatatgaatatgtattttgtagaagttgtgatgtaattttttttaagattttgtgatgtatttgagatgatcaatttgtggatttgaaggaaatttgaggatgattgttttgggattttggggacgggatagggttagggtgaaatcaatatattaaaaataatgaagagaagaaaataataaaaaagcaaccggatctgcctctttagtactaaccgggactaaagataaaagtatctttagtcccggttggtaacaccaatcgggactaaaaatcgatttttactcccggttatctcacccgggactaaatatagcgatctttagtcccggattcgtagtcccggttggaaaaccgggactatataggggttacgaaccaggagtaaaaaccacttctccaccagtggaacaatcctaccaaattcctatgaaatgacttaaacaaatgagaaaagttaggcctggtttagttcccaaaatttttttcacaaaaacatcacatcgaatctttggatatatgcatggagcattaaatatagataaaaacaaaaactaattgcacagtttgcatgaaaatcgcgaggcgaatcttttgagcttaattagtccatgattagccataagtgatacagtaatccacatgtgctaatgacggcttaattatactcgaaagattcgtctcgcggttttcaggtgagttatgaaattagttttttcattcgtgtccgaaaccatttctgacatctggtcaaacatccgatgtgacacctaaaaattttcttttcacgaactaaacaagccatgtgaggtacaaccgcgcgctcacagaaaaaactttttgagtctttaattatctctctaatttctatgtttttcttatgatctatccgaatgtccatttctttgttttatctatgttttatgatccacttgcattcctgtttaaaccttataaatcttatttctatctgtgcgctttctcaatctctcgtttcaaacttcaaagtaccctaacttgccgtggatagccgctgtatgcatgttggaattttgagtacttttattcaggtaaacaacagtgaccaagtcaggagcttagctgttgcatgtacaacgtatgcatgcagcttttcggccattaattcgaccgagatgtttgctggtttgacactgtggtgatatagctagattgctggaagagagactgtttatgatgtggcctttgtccttggtatatgtttttttggtgaaagatttggtggtacaaattaagactccatttggaaggcataaattaatttcataaagaaatagtacgtgcaaggcctagttcttaatagatgacggatggaaatgaaaccgagtttagataaccgtttcgatggcgcaaatgaataaaataaatactatatattttttaaaaatgattatatatattttttaaagatactttggtgaagaaagtttttgtaaaaatcgcacggtttagaagattgggaagcatatatacccccaataatccataagccaaaaagaacgggactaaattgttgtagcaaacaacctgacaaattttattcttcaatttttatttttatctaattttctagggagtgggtatatagggttgtaggaggaacaattaaagaaaagaatgagtatttagagagacaaggatcaaaattacacatttttttagcggactaaattacagatacctaatataggacagaaacatattgttatgatgaaaatgcctttcaccctacccgatactaggtaacttagatttctcaactaatcaactagtcatggggcacacactactgtttgagatagtactggatgttgcctaattgccagttatatgatactcgaagacaaagagaaggattgaatgtgtgtgaattatgcatcgagcagcttgtgtgattggtgaaggacatccacttgaccactcctaatttcatttctttattcgaacacggatcctatatctgaatatctaaaaatctaatagcaatcaaacatatcactcatctgcagtgaagcagccagcaagctgcaagcctgcctgcctccatccaatctgcttggctgcattgcattgcatggttccaggcttccagccagagccttggatgctctcaggctaaaacacaatagacaccatcttgtcctgttgcgccatccggctgtgcacgtgcagacacgagagcgacaaagcaaaccaagtgccacgccataaacaaaaaagcaaagctgtcgtgtagtttatagctggctctctctctgtgtgtgttcagcggccaacgacactgcgtcgtcgttctgaatttctgatactatcgctgcttgtacgtacttcgtatttctgatggcaaccgtgtcgccgtctggttctatctctctctgttttctttttttttcttttgaagagtttgattcttaacttagcactacgtaccagtgcctttttaattaatttcgtcgtctgcacatgagtagatcctccatctgtttgtgtgttgaccgaatttagttttatatttgcaccgtgccttttaaaaacaaagcaagacaaggagaaatggaaccgagtggctgtgtactagagtatatatctatctgcacttgcttttgtttgtatacgctagctcttagaaactccttaatgaaacctataactcgacttaggtgtggggtagcgagcttttcagtttgcaaggcttgccgatctggttgacccgtgctcaagcaaggttggtgatcgtgaagtcggagctgcggtatcggcggggcgcgacgtgcggcaacgataacatgatcccttttctgttgtgcttcggcgtgggtcgggtcattgacatgacttggcgtttcttagtgaagtcggagtcgcccgatcacgtgagtgatggtgtgatgacgataacgtcatgtctttgccaatgtgggagtcttgttttcttcaagtttgctgcaagtttgctgcttggtcttatcgttcttctgttgagcaacgtttgttgtgtgttttgcttggttgtccttttctgttgccgtgattgtttaggctagttggagagtctgtgtagttgtggttttcgtttagttttttctaattaaaatgggatattcttctttgtataaaacgtcggcaatgcactggtagaggaaccatctttgatcggtctggcaaaatccacaatagtcccggttccaaaaagaaccagaactaaatattgtttttagtcccggttataaaaattttgaaccgggactaaagatgatatttagtcccggttcatcccctgtcagatgcaagtcaggggaccgaggatctttagtctcggttggtgttaataaccaggactaaagatcaccactttagtcacggttggtattaccaaccgtgactaaaattgaacacgtagtatataatccctatctgttatcctctcctccacagttacaacttagcggatcgaatctctccctctctcctcatatctcacctctctaactctcttcctcatcccctctcctccacctcctccccttctcatccggcgggccggtgggcatcggggccacgcgcggcggcgggcggcggggtgcaggccgacggggccgcgcccggcggcgggtggtgggttccgtggcggcagccacggccggcggggccacgcccggcggtcgtggcgagcggcgacagcgacatcgtattttctttttttttaaatttgtgattcactgagatgtaaaaatttgtgattcattatttggatctgtgatgtatttgagtaattttttaggattttgtgatgtatttgatttgtgtgtataagtaactttatgatttgtgatgtggatttggtgatgtgaatttgggatgttactttgatttggggatttggggatttgcctacttgattcgggagaaaataaaaaggaaaaaaaaagaaaaggggaccatctggtactgtcgttattgtctctttagtcccggttggtaacatcaaccggctggatccttactcctggttggaaaatcgggaataaaggggttcccaactgagagtaaagatggtttctacaccagtgatggtatgactgttcggaaaaaaaaaaaaagaaacctgtaactcgaacagaagccgtcgagttgtctctacatctaagtggttatcaaacctaaaaaatctaccaaattttgaaaaggttctaaactaaacacatttaagcccgaaatgtgccaatatttgatagcgttcaaagtgtcaacaaataaaccagcccgaaaaaaatattttcactacgtaagagtccagagtgaggctctccgtcagtgagttcaattttggtccctaatctgttctatactgtatttccaatcaccagaaaataaatatcttatggaagtattagtatcaggacaggcaaactcgaacaattttgttatatatttgtcaacaaattttctcccaaaaatttgacagatataattacagtacaatcatagtgtagctacactgtaacttgcatgtaattatactgtaactataatgtaacttgtatgtaactttaaaaaatctctccgtaacatcttatttcagtaaaatggaggtcgtgggacaaattctttcacatgtgtgtgctacgatttttttcctcaccagaacaaatcttgtaatagatctaacgattcaaaattacgtgaaatttacgtacaagttacactgtagttatatgcaagttacagtgtaattacactacgattgtattataattacatctgttaaattattaggagaaaatttatcgacaaatgtataggtggtcccaatacgaatatggatcctctctctttctctctacgtcgtgaaccagtagatgggctggcgcgaataggcctttcagcacgaaagaacatacggcccagaacactgtgagcccatgatgagtcctgcgcggaagtgagggagctggctgaatccgggagaagcccaccgtgcaccagtcgacacggccctggtctaaatgggctaaatcacgggcagatgcatctctacatatttaaaaggaggaataaattcacttaggaccctcgtctttgacgttaagtttgactcacgtcctgaaaccacaatataaaatattacatacgaggtcccttaacttgtcaatgaatccgattttcgtccctcaaccgaaaaaccagacgcaacaggtccctcaactatcaaaaccggtgcagattacatccctcggcagttttgagagtggttttggctgacgtggtgcctacgtggctaatttgactcagtcttcatctgacgtggcattgacgtggcgcttacgtggcaattcgatccggaaaaataataaaaccggtaggacccacatgtcagtttcacacacaaattaataaaaagagagaatccactcagtaccattgagttttcttcacttctacaatctaccactgactttgttaagttgaataatatgccattgtgttttcatgaacctctactgcgtgccatcgccgtccatgagccgttagttggcacccgtttgatgaagtgaaaaattttttaatgactaaaataccctttgactaacatacactaacacttcttgactgaaaaccctagacgtgcacccaaaacgatttgctcagtataaggcggcgccgactcccatcgatggaacgccagccgcccaagtccccgacgcgcggccaaacgcccggctccccatcgacgacacgcagtcgagcgcagggctcctcatcgacgcgcggcggcggtcggtcgccgggctccccatcgacgcgcggccgggcgcagggcttcccattgacgcatagcgcatactccagcgccgccatggccgcgtgcggctgttccgatgtacctgcggatggattagctcgccgagttttctggataacgggaatcatccattttaatagctcgatcgtttttacctccggactccggtgtatgcgaccgcgtcgccatacggtcctgcgtcatccttccgtcaccagtttcttgccgatgaggaagtgacatcacgcgtgtatatatatatatatatacgctcccgatatacgtggccgtatatatatacgccgggatatagtaggtgaccaacgtacgcaactgctggccatcggcccatatgcatgcagcccacacgagctgcttgtatgtttcttctcccttacaaaaaaaaaaacatgtataatgagttaggggcaaatatgtctttttacagctgacggcgatgacacacagtagagatttaagaaaacacgatggtatattatttaacttgataaagttagtggtagattgtagaagtggggaaaactcagtggtactgagtggattctccctaataaaaatggtggggccccacgtatcatgctcacccctcctcttcttcttcctcctctctctccccaatccccatctctcctctcttcgtctctctcctctgctctctccaggcgacggagaggtagcggcacgtggcggccagcggccggcgggagaggaggaagcggtgcgcagcggcggaggcagggctctggcggttgtgggcggaagaggaatcggcgacgggaggtggctctggctgcggcggtcgcggtcgctgcacgtgctcgaccccttcgcggccgctgccgcggccgccgctgccgaggctctgtccggggaggccgccatcgccgcggtcggagcggcggcggaggaggcaaccccgacgctgatcgacgactcccctcagcaagctcaacaaccaccttgataagatgctgaagtaagatttcttatgttatggcaaaaactgaaaattgattccacaacgcttgatgcattcctaaaaaaatgtattttctgttgttgaaatcgatcatatttttaataaatttttggttctggtatgttatgttccttttgaacagagacatggaggaatcatggctggggccatggtaatgccttctcttggggtacgaatgtacgatttaactgaccaacacattgaggcagctctgacaaacctgattgctggtctggaatcagaatacaaatttgaagtaaatccagtgctcatcaaggtcatccttggtgttgctatgtcagtggatgaagtgcaggactgtgtttctcaacttatatcgtgtaaaggctattttggccgaggagggtgttgtgggaaagacagacttagagccttctcttcttgctgtattgagtctgaagctctggagacagtcgaatgcttaataaaaagtacaatgaatgagctgagtgaaccagttgatagagatccagtcatttttgttctcgaggaacctgctgcggccacggccacgaccacgatgacacttccgctcccgagataccgccacgtagcgagccctccgcctccagtccacgccggggtcgcgggcttgggcgacgagcagcaattggagcagctggcgagggtgctctcctcgctgggtacaaacgagatggccttcgcggcgccgctcctcgccaactcagcgttgctcgcggtgtggacagggtcgatcaccgtcttcgcggctcccgacgtcttcctccgctcctcttgcaccatgtgctcgcgctgccatgtcctactggagcacatcgccctgggagagaggaggaagaataggaagggtgagttctactgacatgtggggctcacgtgggtcccccatttttattatttatgtgtgagactgacacatgggtcccatgggttttattattttttcggatcgaattgccacgtaagcgccacgtcaatgccacatcagatgaagaccgagttaaattagccacgtaggcaccacgtcagccaaaaccactctcaaaaccgccgagggatctaatctgcaccggttttgatagttgagggacccgttgtgtctggttttccggatgagggacgaaaatcggattcgttgaaaagttaagggacctcatatgaacttattcctatttcaaaggaggaataaattcacttaggaccctcgtctttgacgttaagtttgactcacgtccagaaaccacaatataaaatattacacattcctcaaatttcaaaacatgtgtaagttaggttccaaaatggtttggatgtcagttttagctaatgtggcacttacgtacgtcgctagtttgacttggttcttgtcttatgtggcgttgatacgatagtagaagcaaaataagaatatttaaaaaattaaataaaatatgtgggaccatatgttagtcaaataaaaagataaagaaatactaggatgcacatgtaagtaggtcccatcctccacctcaccctcctctctatctttttcggccgatgacgcatctttccacttctccttctcactcctaacatttcctcctccctccttgagatcgctcggtggttggacactgctgctgcctccgtcgatcatggaggtcgagcaccaacgatggttgttcccctgctagggacgaactcaatgacgacgcaactgctagggacgagggtctcgaagacgatgttgtcctacttgccagtggtgtctgtgaccttgtcaaggcctacgatgtccatctgcttgtttctcctagcggcggtcggaccgtccttagccgtctaccccagcacgaggtttacgcccaactatatcgtggttctggatttctcggtaggaaccgatggtttagggcaggtttcaaaaattccatatcggttctatcaaaaaccaactacaatattatttcgccaatttttttttgatgtttttcaactttttgtgaatttggcaatattcgtacacatttgactaatttttattaagaacgaataattaaggatcaaaatttcggaaattttgaccatgtcgataccctcgatagaaatggtggaaacagaagattgaacccatgtttagggttgtttctttaggcgatttggcgagcaaggcaacatcctgttgctcgccggtgttggatctgaccgtgaggaggcaaaatattggttgttgagaagggccagctcggcctcacagtcgatttgtttgccttgggttgaggctgcggtggcgattgctgagacgcttcttgatttgagctcattcttgagtttttgcgtggtgatgctttaataatttaatccgtcgccattcaattcttccgtatctttttttttccctaaatccgcgttcttactgtcgtggttctcttgtgctgtttgagatgatcagcaccgccttgaacgaccgttgcaggcttgttgcatcaagatttgctcatctcgttgtacgcaaagtgcttaaaatgtgggcaccctcaccctatataaacacacacatacacataagtattaaaaaaacatatatatgaaactaaagtgggaaaaattaaacttgcaaccacttctcaagcctttcgtgcaacatcgactactactactattaggctatgttcttttctccaacaaaagttggataagcttctagatactcgtggcacgcttttcaaactgctaaacggtatgtttcgtacgaaaactttctatatgaaagttgttctaaaatactccgtatcagattaatccattttttaagtttctaataattaaaactcaattaatcacacgttattaccatctcgttttgcgtgaaacatttaatctttatctttatttttatatttatcttcagaagatttaaacaccaccttagtatttggtgattcaccaaaaggataagaaaacaagagagattttatagcaggtgaagtctttggtgatcgattcacgagcatacgaacataacgagctttaatttgttccggtcaaaaaaaataaaaataaaacggtaatactttaatctatttacagtaaaccataaggccagaaaaatggcgtgatcaacttgattcaatcgtcgttcagggcttgaggaggcatcgtcttagccagcctcaccacgctctgcaccacaccgccgggccccttgcacgacagcccgagcccgagcccggacccaagcccaagcccgagcccgagcagcttgctcccacccttgggcgtccccctgttcccgcgctcggtgcacgccaggaacgccgcgaggaacgggtcctcctccggccgcacggcggcagcggcgccgccgcctcgccggccgccccgacccgccgcccccggcggcggacgcactcgtatactgtgcggcaccgcctccttcttcgccggcggcagcttctcggcttctcccgccgccgtcgtggcggtgccctgcagcagcttcgacacccccggctcgtgctcccacgcgaacgccaccgcgccgccgctcgccggcgccggcgccgccactgctcccgccggcttcatctcacacgtactctccgggctctacctagctagagatctcaaccagcttatatataatcgtggatggtttttggagacggtggtcagagctagcagcctagcatgcatctttgttgttcttgcttcagtttttatagcagcagcagcagcagataaatcgatggagacgtcaggttgggcaaaggtaagggggatcgtcgtttgatcgctcatcgctgacgtggacatgtaacaatggtggcttagggctatttcttttctccaactctcggcttcctcatttttcgttattatatgttttttaaactattaaatggtataatttttacgaaaaaatttaatataaaagttgttaaaaaattaaataaatacacttttcaattttataattattaaaatatgctaatgagttttcttattttgtgtgcgataaaagtttctctctaaagatggatatcgaacgcagccttagacttgaccatcatctcttctctcttcttctctctcaccttgtcgtcagtattttcctttgggcatggcagctggaacggacacacgcaagcccggccggcagctaactgcaagtggttgcgatgcagcttcgtatcgtcgacgtatgagtagtttttttctctccgtgtacagatacagtcgatggaatctgtttcggatcatatcgtcatcatgtagctggtaaatttctttgtcatcgatcgacgacccctgccttgattaacggatgaatgaatttaattgtttcctaattcctatttgttactacgtataggagtgaatttcactttgagcactgatgtttttctttgtaccataatttaaccatttttttaaaaaaaattcgaacgagatagtcttatactccctccgtcccataatataggggattttggtagggatgtgatacatctgtactacgaatctggatagagagcctattcatagtactaagatatatcaaatcccaccaaaattttttatattataagacggaggatgtatttgtttgtactttataccaccctaactatttccttaagcatatgaatgactttgagtatacatgctcctacttgtaaataaactctcaaagtcacagttgtatgtactactcctttaatatatgataaattagatgtagataaaattgaagtgttaatattggtctaaaatgctacaaagataaaattatccgtttcaaagtgaaaatattgagtaaaaaatataaaaaaaaacatcgataataagtggcggacgtaggatttcaacgatggagctacagagttatagactacggactgtgtacgtaatactaaggaaactacttccttcgtttcacaatgtaagtcattctagcattttccacattcatattgatgttaacgaatctagatagatatatatgtctagatttattaacattaatatgaatgtagaaaatgctagaatgacttacattgtgaaacggaaggagtacttggtattccaatgcattttagaaagcttggtaacaaagactggaaggttattgaacaaagaattgagaaaaaaacttagtagttggaaaggtaagtatatgtctgttggtggtagattggtgttgattaattctgtacttttaagtttacctatgtttatgatttccttttttgagataccgaaaggggtgcttcaaaaaattaattattatagatctcgtttttttggcaaggagatgatcataagaaaaaatacatacttactaggtgggatatcatctgccagcccaaagatcagggtggtttagggttcataatttggaaatacaaataaatgtcttttgagcaaatggttgtttaagttaattaataaacaaggggtttggcaagacttattgaggaggaaatatcttcataataagtctattacccaagttgataagaagtaaggtgactctcatttttggtctagtctcatgaaagctaagggtactttcttagacatgggttcctggattgtgaataatggagaacaaactagattttgggaagataaatggttatgtaacttagcctttaaagataagtatccttctttatatgccattgtccgaaggaaaggtttttcaattgctagtgtttatgagatctgttcaacttaatgtttcttttaggagagcttcaattggtcagaatcttatttttgacatgagttgtgtacttctattgtacatatccagttgaaccattcttctgattgttttagatggaactttaatcagaatggaaggttcttggttaggtcaatgtatcttactttaattaataatggctatattgagataaataaaataatttggaagcttaagatgccgcttaagattaaaatcttcatatggtacttacttaaaggggttgtattaatcaaagacaatttagcaagacggaattggaatgggagtttaagatgttttttttatgaaaaatgagaatattcaacatcttttcatggattgccattatgcaaagtttatatggagagcaatgcagtattcttttggtctatgccctcctagtagtatatcacatattttttatggttggcttttgagggtggacaagaaaaagagtaagcttatacttgtgggagcctctgcaatatgttgggttctgtggttgagcaggaataatttggtttttgacaaatcaccatctattacatatatgcaggtaattttcagagcagaatattggttccggtgttgggctcagctacaaaggtgtgatgaagatggcgagttaatgaaggttgcatgccgtaggcttgagacgacagttatgtaactttttgccaattatggttggagattcacaaatagacttcgataacgtgttctccttatcttagatgggttttttttttattttaagtgcgtgttctcaatgttttgttgaactacactcattttcagtgttctccttatcttagatgggtttttttattttaagtgcgtgttctcaatgttttgttgaactacactctttttcagtgcaactttataataattaattgtagctcgttttgagtaaaggccgagatattctattttattagtaaaaaaaaagtggttcgaagtgaaattcacctaataaactccatcgactgcgtcgtaatccaaaacgaggtaataaaaaggtgactaaaatcaaatccgtttttcttcatatgctgataactttagcgatatctctgtcgtgttcggcgtacgagctgccgtgatgaccgatgaaattaatgtggttaatgtgtctaatacacatggcaggcatgcatgcagcttattgcctgcagcctcgcggtcaagtgtttgcacacgtgaaggtacatatgttatcacgacattgacgctaggctacagcacaggagtcaataccccaaaaacacacacatgaagaaacttgacaagcttttggtcacattaattaattagagcacagacaaaactgtctaatacagtgctcgatcgatcgtcacaggccatgaaacaatggagaagacacagtggtcaaattaatgaaatggaattccaattgtcccctggacatctagcttcagaatttttgcatcaggaagaacacaaattggcgatggatgaaccgaacagtttggcaaattgtttcttcagaggttggccgggttgagagctggaagatttgctctgcacaacagggacaggtaggctgatttatcgatctgacagtgactttgtttggctacgctaaacctaacctagcttagttcgattgcaacaagtattagcagtggtaaaattcagatttgtttccacgcataacctgacatatccggaagaactggtcagatatcgatccaagggcacgcagacaaatctttcgcttttatgattcatgaatgcgtttttgccctgcaagatcggccggggaaatccccccacggtgagaaatccaatcagattaccattgtgtttatttcgatcagggggcgacctgatggcgactcgattctttagacagttctgacgaaagttcagtaatcctcatctctaccactttctactaatttaaaagcgtagtcgttctcctttcgtctccttctcaccgtgctcggatgtcgtgtaactattgtaggatccaatactttcatcttagcctacccatccaatcaatctccaattatatttgtatatagcttgtgttttatctttaatccacccatccaaccaatctccactcatatagacttggactatgggtgaaatcggtcacggaaattcccgatcgaccgagtgccgtttccgtatatggtgtaccgtttctgaccgtaccgtttttggctatttttaaattttgttttttcacaattctttctgcatcgtattaatgtcaataccgagtagtttaaatgataaatatggtcaattaccggccgattgagcatcgtttccgaagagatgctaccgattccgatcgtttccgaccgttttaacccctaacttggacaaattttctaaggggaaaaagtccactttgactcccttaaaaataggccgaatctaattcatacccctcaacaagaaaaccggacaggaacactccccgaactattgaaaccagcgcaattttactccctgagcggttttggatggtggttttgctgatgtggagctgacgtggcagggttgaccgggtcttcatctcaggtggtgcttgcgtagcattacaatttacgaaagagtaaagttcatcaccggtctctaaacttgtaccgttgtgtcatcccggtccctaaactcgcaaatcgaccattcaggtcttcaaacttgtccgactgtgtcatcccggcccctaaacttgcagatcactcgtttaggtcctccaacttgttcagttgtgttaccccggtccctaaacaggacggtctaagaactttatataaaaaataattcataactttttcatgtgaactctaatgaagacaaactttatatcaaaattgtagcccttgacgcaacctataactttgtagttgaaaagtttttgaattaaaactgtttagggtcccaaaatattgttgcatgtttatagattttgaaattttaattttaaaattacattttgggacaaaaaatgacttaaaataaaaaaaaattcaactacaaagttgtagatcgcatcgagggctacaagtttaatataaagtttgtcttcattagatttcacatgaaaaagttatgaattatttttaaatataaagtctttagaccgtcatatttgacccagatgatattcaaatccaagtttagagaccggggtgacacaactaaacgatttggagaacttaaacgagtgatctgcaagtttagagatcgggatgacacagtcgaacaaatttaagggcctgaacggtcgatttgcgagtttagggacagggataacacagcggtacaagtttaaagaccggtgatgaactttactctttaagaaatatatgtgggacccattgtcatttacacacaaaatattgtgggccctactgacatatggtcgtcctctgtctccaactcttcttcctcctccctctctctctccctcttatctttctcatttcttttccccttcgaccgtggcggtagtgagcgggacgacgggtgttggagcggcggcgctggcaagcgggcgaaggctggagcagcagcggcgctggcgagcgggcgaatgctccagcggcgtggagaggggtgtcccttgtacagcctccctgcagctgaaatgagccgcgatgattgctcacgctgaaatgcacacgcaaactcccattctacgaatgcacgcgtccatctccttcgtgcctcaccgtgttgggcttgccgttgggcgttgggagtccacagagctggacgtgtcgttggcgaacgagcacgtccgcgccgacaacctgaggtgatgctccgggatgcgtacacgcacttggcggcggacagcgtgtcgtgctcttgggattttgggagctcttcatgagccgcgatgatgcgcacctcgtcgacgccgagggagacgagaggtcaacgatggagtcttttacctctatgccactaaaaatgttgttgcttatctgtgtgtcacaaaaaaatttggagtcacctatatgccatgaggctaactttcgttgacccgtgtgccattccgtccatcttctgttagaacttaacggttccatatatctgacatatgagacccatgtatgaaaatgactaatttgcccctgctctattttcagctctactctcattctctcttctcctgctctctccctgtttttgccgcacgccagccgcaccctaaccctagccgcacgccgctgccgccgcctggcctcgccgtagccatcgccgccgcctagcctcgccggcgccccatcggcccgtcgccccgtcgccccaggccggcacgccccgtcgccgcgcgcccaggctggcgcggccttgcgccctcgcccccaggccggcgccccctgcctccaagccgcctccaggccagctcccgccccccgtctaattttttccctattttttccaccattttctaatttatcccacattttccttttttttcctggatttttaaacatttttaaaacttattctcacttattctggtttttaacttttttaaaaatttattttccatttttttatttttaacgccttttctaaattatttttcacttttctgatttttaaaccattattgtacacaagggcaaaattgtctttacacagcccataacatctctgttatgtctccatccatctaaaatggtacacggatcaacgaaaattagactcatgatatacaagtaacttcaaatttttttctggcacacaggtaaacagcaatttttttaatagcatatgggtaaaagactctcaacgagggcggccgctgcctgctccagctcaagcgagattgtctcacccgcacgcacggccacgccgaggacagcagtgagttcaagtttcaaggactccacggcacgtaccacgtcgacttcgtcacgcccaccagcaagatctctcccgggagttcacgggacagcctccatgctcctcggctcctcgccgtgacgacggggtccccagcgcgtcagccgtggtcatgctaggcctcgacggcctgggcatcgaagtgctctacctcaagttactgcacgacgacgatggcttggggagttcgcggcggccgacgacgtgctctggcgcgggcccgggtgcgtgcaacaattctaggtggagtgcacggagcagtgtccgccacgtggccggtaccggtatgccgctgccgctccggctgaaggggaaaagaaaagagagagataagggagagagggaggaggaagaagggttagagagacagaggatgccatgtgggtccatatgttagtgtggcccataatatttttttaataataaatgggtcccacatatatattttaagttttaataccatatgggacaaagaccaggtcaaccctaccatgtgagcgccacgtcagcaaaaccaccatccaaaatcgctgagggagtcaagttgcactgatttcaatagttcggggagttttcctgtccggttttgttgttgaggggtacgaattagattcagcttatttttaagggagtcaaagtagactttttcctttctaaggcaagcaaaaatggcgagattgggttcctgtgggcctcagtaatgggccgtggcccactatcaggactaacgaggttggcccggccagcagatccccgcgtcgaatcccaggaatggacggccgagatctcatctcccacaagccctaaccctaacgaagtactagcagtattaacaagcggcgagcgctcgagctgggtgcgcgagcggttggcggcgacggccggcggccggcggcgaggtcgagcgaggaggcgggccggcgaggcgcgcggtactttgtgcctcgaaacgagtgggcctttattttttttttggttctgtttcggctcgtcgcggatttcgcacggtttgcttcgttcttggtgattttcttgaagcgtcgtcttctccaatcgatcgcttcctgtagcttctccacccttcttctgtggtggatacagatttgttcttggaagcggctgggatttcggttaacgatgccattggtttctattctaacatatgctttctcttgtctcttgtgtctcttgtgtgttcagattgggcttgttggtgtcggatttgattgtggtttcgtggctgtgatgacaatcaaacctcgtttctcgatgctgagacttgatttgttcaaggaccagaactgtgctgaccttaatttgtgcgtgtctgagccaccccaaacacaccatgtccgaatcgatttctgcgaaagttagtatgtctgcacgatgccactcgatgctactactagtatttaggtgtctttattagctttttcctcttctatgtttattggctgtttcttgcatttgcgttgttgtagtgtggctgtgaggactaactactttgtttctcgatgctgacttgattcaatcaatcaaggaccaaaaaaatttgatgacctttgtgcgtgtctgagccactgcaactcagttttttcagtcttcgcttgtgtgaagatatcatcttgccttccgtgttttgagcctgaacgataaagaagagatgtttcttggtgctgattcgactcattttaggatggaattttgacgaggctcatgcgtgtctgaagtctgaaccattgtaaaacttggatgtagttgttgttttaggtgtctgaagtctgaaccattgtaaaacttggacgtagttgttgttttttttcctaaaaaaagagaacttttttctctcgttttttctctgctgtatttgaatttgttcattttttccagctgttgtacacttgtacttcatattgggatactgaatgttaggtgcgatcaatgtagtagtgcttgcatgtttgacaaactcatggacattaactcaagttatctaaaacattgagatccttggaatagttatgctggaactattgcatggaaattttacaactcgctatatgctagaagcgaatccccgtagttcattttcctcaatcagcccagtagatttctagctaatggtatctgataaggggcaaattgttttttcaaggatacagctgaattcataagaactgaaaatcgcaattagctggtattacattgcagaagcttgagaacagaaagaagggaataacatgcatgggtaacgccaatactaaagctatcccatggtgagctcattaacgacttgatctccatttcctgaagattcacattgcatgatcctcgaggttcagtaaccaaccatatggccttgcttctggtttcatgattgaatcgtcaggatttttggagtttgtcaagatctcacctagaggtccaccttgaggcatctcccaagaacttgagatgctatcctcttgcatttgtgccatattaggtgcatggcagctgacgcgtgggtcctctggcgaggaatagaaagttgatggaactgtcatgacattggaatctttgcttttctgaaactccattttctcgtccttaggcaagctgaaattctgaaggactgactgaaggcatccacgatcatgcatcttggtgaaaggaatgcttttgttgttctgctggttgctgctctcccaaggcttcaacatggtatttgaagaaatcgattcactgtctcctgctgtattgaacttctccggtttgttctgttgcttcaactgagagaacagggacaatgttggctgttgattcgttaaatttagcagtgggccattgttttcttcagcagctttgtttcctttctctttgttcgccattgtcctgcaaatgtgtacaggtcttcaaattaaatgattattactttctattaaaactgaaataatctagttgttttcctttgtccctgactatattgcagcatttgtattccattctttataagagatttttttccaccagaaccacaacgattaccttctatcatgaaaatgtaccagaaaatcttaaaccatcaataggatatgcaaaaatggtggaaaaaaatactgtgattcagtctgtagcactaaaatacttgcacgttgagaatattaaaccaagtttaaggatgtattaacctgttcaaactatctgtccaatagctgatactgcgtggcttcatttcattaacttttgccttcttgaagctgccctgcccgacagaagatggcaatgagccagcacacggtgtctctttcacagtctttctactttggttttccacaggctttcttgaacggtggcggtttctgttgatgtgcctctcacaatacttgtggtcggccatggcctcctttgaacaccgccatttcttgccatctgttcgacggcatcttccaggttctgggtcagagtctgcatttgggaagccttgatagagaggcctccagctcactgcagtacaataagtatgtcatgtttccatttgatttacatatcacgttgccttttgtcataataaacctgaactggtgagaactgagaacgtaacattgatacagcttgtatgcagctcctttttgttaataacatgctcacttgtacactcagatttgcaatattcagtttgtgaaagcagtattctttacatacacctaactgacacacatattggtgtatgtaatgtatgtatgtaacttgatgatcgtacgtttcaagttgatgtaaaatactgcatttctattttgctcatttatacttaacatgtgtttcatgtatatgcagtaacataagtaaacagttttttttctgttctacccaggatatgaaaatgtgagttttcaggtttaaagcatcaagatatttgggtttgaatacatacttctgttagctgatgatctgaagcttttgctgattgaaatgagcaggctggaaggtataggggcctttgcattgagatacttgtaaatgagagcctggtgctccagctccatccactgtgagggagtgaaaggcctcttggtcctagacaacaagaacctctgctcattttccctcccaaaatccaaacctggataagtcaaggaaaaacattttagtgtggtcaataatatattcgaaagaatcaaaaaccttatcttgagatagatatggatatggttaaggcatgcaccggccagagtcaagacaaaagtgtaaagttaaaataaagcaatgaaatgaaacagccttaggtttgggaagggggccccagggtttgtgctcatccccatgactcgttctgtagcactcatgagagctcatcaagttcaataaatgtatcacttgatttatcttttctgactttttttccctctcatttgtgcaggtgaacagaaaaaaacactgtccatcatgagttgcagagaaatacacagatcaatggccttacatacatacatgcacacatgatctttgcttctaacctattgcaagttaataacatggaagtgtgtatgtatgtggtgatgagcaaggccagacctgatggcaatgtgtgagcagccttggcgaatctgagcatcttctgttcatcaagaaagggggaagggtatgatgcagcagcagcctgggtgaagctaccagcagcagctctcttgatgaggctcagatcaccctccttggtggatggcactgtgagtccttgcaagcccaacacctctccaagctccatggcagcagcagagaagtcagcaaacatcttggaaggacaggaggaggggagaggaggaagaagaagaagaggagggggtgagcattgctggggacagtcacagtgaggctgaggttgagagtgaggagggtgtagtgtgtgctttctagtaggaggcaggaagtgtgtggtgatatattatgggatggtggctctttgggagactagaggtagggctaggtggtggcccttaaatagcaggagtcctttcattcttttagtggagtaactttttttgctgtcatttctttattttatttttattttattgattttttgggctcaatgtttctgtgaagtgatactgctgggtactgatggggaggagtaattggttcataaaaaggtagtagtagcagcagcatgtttattctcttcttttctaattaaggtctggtttagttttccaactttttattcaaacttttaacttttctatcacattaaaactttcctacacacaaacttctaacttttccgtcacatcgttacaatttcaatcaaacttttaattttggtgtgaactaaacacactctaatatataaattttatcttggttttcattgggaagtttttcaaactgtttaatggtgtattgcttcaatatatcaaatagaatcatttttttattttatgataattgaaacttaattaaacgtacgctaatgattttctcattctgtgtggatacttaatctccatccttgtcgtactcccttcgtcctaaaaaaaagctaacctagtattaaatatgatgttttctattatctgtccagattcattgtactagaaaacatctcatccaatatttgttgtactaggaaatatctcattcaatattaggttggttttttgtgggacaaagggagtaggtttgaacacaagcctcaagatcaaaatgtgattgaaagcaatgtatgtactgttccacaaaagcggagggagattttgcggccaaattgattgggggcaattacgtgagctgtaggggcaaatcaataactacatggctgtacacatcgctcagaattaaccctctatgcagtactactactacacttccaataagtgcagtgacccttgtgttctcttgcaagtaaatatgctcgaaatgaatggtcgagcttcatgtgatggtcagaggctcttctctcttgctccctccctgaaggaattgtttagtttttatgtaggagtatttattgtgtttttttgaagtcacacacacttcagtgcttttgccatgtcccaggacagacaaatttgattattcaatttagcaatatctgtacttcgcgccaagaagaagctcaatataacgcagagtttcactgtgctctaaggtatactcctacgtcgcaaagaaactaaattcagtacaattttatttttttgtgaaccattatctgtgtgtataaaatagtgtgattccgtgttttttaccacaacaccaaggatggtaggacgtccaaccaaagcgctgtgctcaccacaacaccagcagtgagtgactagtgaggcagacaagtagcagcagagctagtacccctggcatcgacgcgattgagcctctcatcgttttcgtattaatttttcagtcgtaactaaattctgaattataaaaacttaaattttttagttatttcaacgtagttagtttttaaaccgttagtgacacgcacataaaagttctacccataaatttattccacagcgatagtgagtttgctcttttttataatgcttccgtcctaaaaaaacattaacttttagggataaatcaagataagcatttgtctaaaattcatcctctattttatttacttatattcagtttactttctccgtaccaaaataaataaacttagcacataacgtgatacattatagtactaaagaatttgaataaacatgtagccccattcttttcttcaactccaaactttaactttttcgtttttcgtttttcattagcatgcttttcaaactgttaaataatactttttttctcttaagaagatgagatcgaacatactctctccgtttcagattataagatgttttgactttggtcaaagtcaaatagctttaagtttgactaagcttataaacaaatatagtaatatttacattaccaaattaattttattaaattaataattaaatatatttttataataaatttatcttgagtcgaaaatattattattttttttctataaacttggtcaaacttaaaacagtttaactttgatcaaagtcaaaacatcttctaacccaaaacatagggagtattagatttttatttttaattttgagatggaggaaatatgtgtgttgttggatggggggtggactcagactctgcatcgccaagtacggtagggcgtaggcgagggggcgcccccggtgagacgcgaagaagctgatagtcggctggtggcgctgcgcgcggtcacgaggttgagatgacgcctttcattcattgccggcagccgcccgtggccgtcgtccgtcgcgcgccctcgcccgccttcattcatgcgcgtccaagcaacaagatactgagacaccgtgctaccaccaccactacaggctcacatcacagcaacatgctgctactggaggtacgtagtaccaagcacacacatctctgataggattttatactctctctctctctctctctctctctctctgtgtgttctacctgaggtgtggagtgagtgagtgagtgagtgagcagctggcaaatctggcatgcatcatgtgagtggaaacagggggggtttaattgggtccccgatccccacactcagatacgtaatctacgtgtacggggctgcattctcctcgctccaatgggtgtacgtccgtgcttgatgatgttactcatcgggggaccaacaactgaagaaaagctcactacagattttacaggccaaactatcgtgccggaaattgtgtgcgccggtattttgaactacagttacgttaaaggagtaaaatttcagaaaactacggatctagttgatattattctacctgtgtactataataattgtatttttagaatttgaattaatttgttctaaaaaatagttgtcaca

SEQ ID NO: 27657 - DNA, 562 bp, Oryza sativa
acagatggaggcctgagacacacagcttccacctccccagtggtgagatgaccatcactctacaggatgtggctatgatcttggccctcccattacgggggcatgccgtgacgggcaggacagagactcctggatggcgtgcacaagtggagcagctgtttggcattacactgaacattgagcaggggcaaggggggaagaagaagcagaatggaatacccctgtcttggctgagtcagaacttctcacatcttcacgacgacgctgagccatggcgtgttgagtgttatgcccgtgcatacatcttgcacttgttgggaggggttctgtttcctaatgctgggggtgacattgcttcggcgatatggattcctttggtcgccaaccttggtgatctaggccgttttagttggggctcagcagtgttggcgtggacatatagacagctctgtgaggcctgttgtcgtcaggcaccatcatccaacatgagtggttgtgtgctattgattcagctgtggatgtggttaagactaccgggtggaaggcctaagtagaggcaaag

SEQ ID NO: 27658 - DNA, 506 bp, Oryza sativa
agttctctctactgaaagcgtgagaagatatatgttagggtctagggtgcaaatggaaataactttgacaaatgcaagaaaacttacgactctgtctctaagtggggcgtgctccatttgatatccaactctagtccggacatcatagggattccgcccctcatcggagtcgcggtcatcctctatgtcggcttccgtccaagtagggcggaggaacagtctatatgtcctatgcagccaacgaaggtactctgagaaaagatgattttggtgtatagtctcgatgtacctgtcgttccttccagctgtcatctattcatcaatatatctattatgctctagcccccagtctttcaccttctttgttctcaccctgtcatacctagacaagtagaaggtgatgaaacatagtgagcatcgacaagggtttaaatggtacaaaattgaacattgacaatgaaagcaaacaaagataagaaatatttacttgtgtaattcaactccag

SEQ ID NO: 27659 - DNA, 5077 bp, Oryza sativa
accgagaaattgcactataatcctgccctgtccatgggatgaacagggaatttgggtctcccagatgatacctagagattatttattcccacactgcatcataacagtactaggatctgcttgttttttatcgttagtccaatcagttgataagcactgatgtactgttagaggactgcctgaagcctctagctgagtggtagggcatatggttgcaaacatgtgatggttgtggatgtgtggttaactggttattctcaactcttttgagaaaaatatctcactaacaattggattgcaaaggtttttacataggaaaatacatccaggattggctagtgaggaactgagcctagctcagttggtcgatggtgtggatgtacgcctagaccacccaattccgattccttgttgaggcaaatttgggtgccaattttcttgttagtacaatgttccctagttcctgctaggttgatccctagttttgttaaagattagcaggtacggtcttggacacttgtcagttagacattatgttttttacttccagtatgcagaatctttgtagctttctagagcacaagatctttgtttaatcagataaatcgggactacaataagaacttggtacagccatttagaagttctgtgcactattttgacctaggtcatttgtgcatattgcttatggcctgtccccttgaacattcatatccttcagtatcagcgcctctcctgacttggcatgctagaaaactctcaatacttctgctaagttcttgtgcacaatctttgtattttgtagtgcttttgctcaccacgccctttgcaaatgtaattccttttttggtggttagtttgaatagatggcactcaaatttttaattcatgtgatagatgccgtcgcataactaaaatgtatatctgctaacagaccaaattaatagtgtaggtttgttgctccatgatactttgtccaatatatgaaaagagaattattgattgatcatagtcatagatatttgaatgaacacatttgatgtatctttatgttttccctgtttgtagtgataacttttgtcccatatctggaaagggattttttttcagatctttgaatcaatacgtttgttgcatcttcatatatttcccctgtttctagtggtaattttgttttttttttggcagactggtgcaaagaaggcttataagaaatttaaacatttcaagggcaccacagttgatcagagatgcggaccaattacatatagatgtggtctttgtggagcttcatcaaagtcgttcgagttgctgcctgttgaacctgagcaagagatgaaaaaacatgatgtgaaagattcagagttgagcttacctgataaggtcaaactggcaataaaattggttatttactgttctgaataaattagcctaaaacaataattttttttgggagatgaatgcaggattgtggtgctgcttttgtatttttcaaaactcggtatgcagccctggtcgtatcagaaattgttcagacatccaatcctatggaatgggttactagtcttgctccagatcgagatgacgtatattggtcaaatctttggttaccctacaagcagctttggattcgccgtatagttacactttcgggttctattgtttttatgttcctgtttctcatacctgtgacatttatacaaggtctaactcagtggagcagctgcagcaaaggctccctttcctaaatggcatattaaaaaagtaagtaatctaaacgctcaatgcctacctactgcttctttgctaggtgtcataaagaaaaaaaaaagattgattttcgcatcgagcatgtcagagattacttggatgtgtttatgtaccctaactattaccttatttgattggagagatatggctatgtgaaagtacatttttacatcatatatatgtgataattatgtcattttttacctttccatgtgaaatctggaagtccagggttgggaggtagacttgctgtcattaccgatttcttctccattagcagtttattatagtaacatatacatttttctagatctactatttggtgctcagggcgtcccctgtctgtttacagtcacaagtcacaggggacgcatttactactttgggggatgcttctactgtcgctgaatatttactactttgggggatggatttacattctcaggggtgggtcactgttagttcccttgatgctagttagcacttccatgtatctttgtttgtgttgccatgcaacattcaatctgttttttaggctttaaagttgaggtaacattataattattgcacgcacagtattatcttctggcatgttattttattcctttattcatttgtagaggaacataaaaatgtctatttctcttgcaggaagtacataacccagctagtgaccggataccttcccagtgtcatcttgcaaatatttttatacactgttcccccaaccatgatgtttttttctacattagaaggacccgtgtcccacagtgaaaggaagagaagtgcctgctgtaaagtattatacttcactatttggaatgtattctttgtgaatgtcctatcaggttctgcaattagccaagtgaatgcgttatcaagcccaaaggacattcctatggtgcttgctagagcggtacctgtacaggtgaattgcatgctcacttattttggctatcaggatgcagcaagtatttctgttacgcatatacaacttgttgatttgttaatagtgttgttcaattttactataattttttaatactgtttttatttgtctcaggctacattctttaccacctatgtactgacttctggttgggctagtttatcatcagaacttatgcaactctttggtctcacatggaactttataatgaagtatgttttgagaatgaaagaggatagctactttgtcccgtcatttccctatcatactgaagtgccaaaagttctgttgtttggactactgggattcacatgctctgtattagcacctctcatcttgccctttttactggtgtacttttttcttggttatgttgtgtaccgcaaccaggtgagaaactagagattaaattttgattccaaatcaataaattatctgtgattatgaattttgttgaaccttagttatagtgaagatgaccagactaactaattatgggaagttggtatgagtgcttatgcatttgtactttttaggtgaaaatgcaactgatgcattttacatatacatgcttctaattttgtgtaaattgttgtttcctggttcatgaatgtaaattctcagagtgcaaagttttgtgaaagattggtctgttgtgcttcttttccccgttcctgcaatctttttttgacgtaaccgttcctacaatctaatgggttaactttttttcatttgcagttcctcaatgtttattgcacgaaatacgacacaggtggtctgtattggccgattgctcactatacaacaatcttctctattgtgctcacccagatcatctgtcttggtgtctttgggcttaaagaatccccagtagctgcaggcttcactgtacctctcatcatcctcactcttttattcaaccagtattgcagcaatcgtcttcggccattattcaagactctccctgcacaggttagtatgaattcacctttatatattcttggagggatttacgctaaacttcttgccagtttacatttatgtgctctctactgagagtacatatcttgcacttctcttctgcaaatgccaaaaagtcctatgtcgaagcattatccctggctacctgaaatgaaatctcttacattagttctctctttctattacataggatttaattgacatggacagggaggacgagcaatcgggaagaatggatgacattcaccaccgtcttcattctgcttactgccagtttgctgacactgacgacatacctctgaaaggagttcacgttgacagagatgcagatgcaagcggaagttccggtgaatctagctgcaaagaagacaccaaccaacccacaaccagtgacatttctcaccctacactggaaggactccctgtaaaccggctacggcatgcagtgaggtcgctcagttccatcatcaggttacagaagagaggcctgtcaccacagcccgctggaccctccgccgatgtaaatccgcaaactgcataagttttgcagataggacatacatacagtgaccaaagaagcatacaaatgaatatacaaaaaaaaaaggcatagagatgcatataaaagaaaagaagcatagaaatgaaagagagcgccatctgtcctagttgctagggtaaaattttgtttgttttaagttttaactagtgcctgagcaacttgtgtcagatccttttggccatacaaaagttctgattcttcaattgattggtgatacttttggtcatatactactactgtcttccacaacctggtgatgcagttatctggtttcttttaaaatttattaaaccagtttcttgcgcttctgtttgctggggggcatatgatgtttcagagttcagacatacggggaagctttgaatacggtgtaaaccaactggaaaaaaggcacagaaattttcacatggttttgagtactcctgaaatccatttataacggaatagaatggagcatacaattcacagggactaatcacgcaagtggttaaacgaacaaaagatttttccattaattgaaacccgatactactacacaagcacaaatcgcagacgacgacgacggcgagcggatgtttattcggtggcggcgaaagtcacatgatggcgcagaggctggacgacggggcctcgccggcggcgtcggtggcggcggcggcggccttgtcggcgacgcccggccaggcgcggcaggcgcagtgctggccgtcggcgatctggctgtgcacggacgccacgtggcggccgcacccggcccacgtggacttgccgcacgtcccgcacttcacctggtagcacatgctcgctcgctcgcc

SEQ ID NO: 27660 - DNA, 1452 bp, Oryza sativa
tctgcttaatggcttccagcaaagtgggcaaacggacatacgcttcactccattcaccgtaaatgagcttcatagcctcctctcgtgccctccaaaccttgccatacttcaccctatactggaaaacttcaaatatatacaaagctaacgcagaagcagagagtgtaggttgtagttttatggcattgcataacctatttgctatgaactttgatgtcagctgccggtggctccctgaaccttcggcagtagcacaactatgttctttacctacccgtgatatcctccacgtgccactagacctcttagttgcatggaccttccatttgcaccgtgggttttcacatttaacagtgtacctcttatttgcggcagaattgacaacacggtatggacgatggtgcacgatggcgtactcctgaagccatagcttcaatgcgaccatggatgggaactctaaaccctttctgagaccatccacttggaatggttctggcaactgatctcggttgatgccgccatctagtagtgcaccatgggcatgtgttaggtccctaaactcaggaatgtccggcttcctcccaaacaccttctcaaacgcacgacattcctctaatgctaacttgtcattattagtaagtggagggaatggacggtcatcatcagagtcttcagcaaattcaacatcatattgctcaacacttgcctcctcgtccacatcatctctattgacttctactgagacagaatcgtgaccaccactcaattcgacatcaaagtaatcatctggattcacatattggcctgctacttctgtcgggtattcagggttgactccgtacgacgaccaatgaacactcaccgacaaatgttcacttagatcaagcccctcttgtactaactcccttttcatctccctcgctgcatccacatcatcactaccgcaatgtctctttgatggtcctgcctcccataaatcatttccaagcaaaggtctcttcttctctccttccccctccaagtcttcccgtaccaactcagtcttacttgtaccccctccacgacgagaataatatgtcacaaaattcttctcaacgtaatgataagaaggagatttgtttagatccaaattttttacggtacgaactaactttgatgcaaacacctctagagatctaaactgagactcttttaccaaatcaaagtaaacttcccattccaactgactatcacatttaatatatacttatgcccttgaccaacattggatctccaataaaaacgaatctccacattatcttggtccatccaaagaattttttcactggtgaccttagttcatataagagtggggggggtagaaacaaacatgccgttcaatgacatatcctcaaactcaacatgtgcaccaacataaggttccaccactctaccaccgtagggctgcaggaa

SEQ ID NO: 27661 - DNA, 9120 bp, Oryza sativa
ttacggactgaagataaatacataagatgttgtatttaacatttgaactcttaaagttcgaacataatcatgtaagagaggctccatagctcaccatcttgatctctcttgcatatttccaattgtaaatgtctccaatgatgctgaaggaatccgtacatggagcatatcttgtccaaaataattcagtggaagaactccaagtacacaaaggaaagcggctaaggagaatatgcgtatgctattgaaaagaaaaacacataagcatatcttggatataaaaccaaaattgaagacttaagtaatatagtgagaatgcagtaggcaaatgaatacatataaagtaataactttatgtggcataccatgtgagaccccgatgaatgttggtatgcacattatcaactttggcataagattttttattatcattaacttttttgaagttatttgattcccatattattttgtgtttttttttacctatcctatttgacagaggaaatgactcatcataccagtcaacaattagagattaaaaaccactagtttaaataatcgtatttagcttgattttcattttcaaagcgccacggcgaaccttttaagtgaaagtataagttgattcctgatggtctaaactctcaaggcacacaaagaaacagcataaaaagaaacatctatataaacttcaaataagataaaaaatattaaagtggaacagagaatcaagtaattgtgtacatacctaaatacaagaatcctattgaagacaactgcatccaacccagcagtagctaagagttcatcctccgtgcatcgaagacttctcaaaatccagctagcggatggaacaaatctctccaaaataaaagcctccctgagcctactattctcctcagcaatccttcttccaaaatagaccttaacattttgcggttgcttcctcagaacggaatacagtgacaaaaaaagtatacagaggctaatgttgattccagctgaggtcaaaagagcgccgactttcatctctgtcttatgtcatctaaatgcaacaaacttcgtatctcctttaattctgcaggaaaagattggaagttcaggtttgacatacaagaaatcatgagaagagcatgcacgctaaaaaaacagcactgcaagccatcctttggatttcttcaaggttacaaaatgtatgatgcagaagcatatttgaggcagctaactaaagagtagcatgggctattttaaggagataaaaccctaataccttaataagacatggaatacacttaagcatgccatcaagagaaaaaacttcaaaaatcttggaacaggcatcacgcagggacagattttgatttgtaccagaacaataagccagactaaaatcaggacacccgtatactaatgtgaatagttcacaactcagacctggtccagactcaaataaaatacaaacaaatatatttcatatggttaaccgcttactctaccaggaaaaatgttctgtccttattcaaactggtttatctttgtccctaaaatggcagtataagaatgttaatgaagacggtgagtagaattttcatgcatggaagcagagcaaccacacctaaatgcagatcaagcgaattacgatattctgtcttctttagattagaataaaatatatccaggaatcaggagaagtgtgctgccaggttggttagggagaagaactttggtgtgaaattatgtttaaatgaggctcaatgtgatgaaatttgaattatgaactactgtctattcaataccaagttgttatctgattaatcattcataaacttttctatcaaggtaaagcaatgaagtagaacttgttcagttttttttcctggcagaaaaacagtggtatgaaggttctgaaaggctagtaagtgggtattcgtacgctacagatcacccactttctccttaataccattaacatggaagtccttcctttcatatccagctttttacaggtcagccacttcgtagcaattatacaagcctaaaagaccgcttatgaggcccaattagctactactccttgaatatgccctaattagcaattattggtaacaggttgggcaccctttccttgtatacagccttgtagaccttcctttagaaaaccaaatggacccactaaaaattgaaatgagggcctggaagcaaattagttcaagtagccctgcaggctgatctcctatgtctcagattgttgcattaatattgacgagctatgaaattcattgtcctttcgtttctattgtccttttttttccttccattattttaaagataacgcggaactcacctcacctttcaaatacaccaagtagatctaaaagaagctattgagccaaggcaaggaggatttgttctcagtatacagccagagcaaatgtaagtggctaataaacaaagcactcagatacgatttgcaaagaaagatggctggaaaggcatgagaaagtacaaaatggaatatctgacagatctcatgggaggcatgaagaatcttaaagagagagaaaagaattttgtcagtatggtacaaagacaagaactaatctcgattccactacccacaaaggacgttttacactttggaaggccggtaaccgtttcagaattcatattattctctcagcatcaaaaggctgcttttgtcctcctctttttaactaaagataaagaacaatccatcaactgtcagagtttaataataagccttctagttcactcaaagtaaaggcaacaatatcctgcaggcatttcatttatccgctgtcttaaacgctaggattagagcagccaatcttaagaactcatacatcccccaaatgcatcggaaattcaaaaactaaacacggttgtcgcaatctcccaccggcccctggtgaatctactgggcaatacaacaacactacgccgtcagattccagatagatgaacacaaagccgcctcctactcacaaaagagacagaaaacttgcccgtcgcgacgcgcgccgaaaaaatcccaccaatgccccccggccgcgcctcctcaaaacccctgcaccacttacaaacaccgaaaaaatagattcagatcacacgcgcacgcacacaaaaggagactagaacaaatccgcgaggcgatcggagggcaaaaaccacctccacttcgccagtcgaccaccgccgccgccgacgcgcgatcgggattcgccgggggggatcggagagatttcgagaaagcaatgtgtggtgggagatttgcgatttggtggggggtttgggttggaagtttcgatcacaaggaagaagaagaggaagaagaaggaaggcagagagacgaaaagggaaagcgacgagaagagtgggagaggagagggagagtagcagtgggagctagaggagttgtcaaatttgtcaaaagaaaaatattcccaaaaataaataattcgaagtgggaggaggccggtggggtgggcccactgcggattggggtgggtgccacgtggcggaacagcagtggtcgagttgagtcggggacccaccggatgcaggggcatatcctcgtgccacgctgtatgtgcgggagttaatttgacaagatttagtagttactccatcatcatggtccttgttaaaactccatcatcatctttgctttgctcctttgctcaactaggaaacggtgaatatccaaaaagtttatttacatatacacagcatattagcatgtacaaactcaaatatatggtactggtattcagtagggagggaataaatgttcttgtggaaattatatcatgccacattagtaggtggtgtttgaatctcctgaacataaataataatatgtgattaattgttttaattattacaaacctgaaaaatggattaatctgatattttagaacaactttcatataaaaagttttcgcacgaaacgcatcgtttagcagtttgaaaagcgtgccactttaattcaaaatttaatacactcttttaagtggattcgaacgcagccatagtttaggtgactctaaggaggtgaaaaatattgatagaacaagaaaaaattacatgatcacaatggagaatcactcactcggattaggtgtttggctaaaaacattagctctagatcctaatgagaggacttgaagataatattacccctttatgtactaagaagtcctgagattaatatagatatcttctaggttaatgtaatactaatatttaggctacaattagcagctgagaattgagagaagatttctctcgttcttcacgtgcacgcttcccaaactactaagcgctatatttttttgcaaaaattctatagaaatgttattttaaaaattatattaatcaatttttcaaatttaaatagttaatgctcagagcctcatcgattcccctaataagcctaggccaaagccaaaatttgacttttcaaaattaagttgatttaaaaatatttttaacgtatctttttcacccttggcttttaagtcgctaaaaacatgtatataaaagttttatttataaattaaatttttgttccctaataagtgttttggctatggtaaccgatgagggcctcaattaatcatgcgttaatggatcaccttgttttatgtattttctcaatcttctcttttcctcttctctcaaatgcggccttagtatacttacaaatgtgtgcaaatattccaatacaattactacacatgtcccatattaagtttatttttggtcctcatcatttttcttaaaataagtattttaataatcgttgcatcggagtttgtgaaagtagaaaataattacattgggagtagattgtaacatcctcaaattttaaactaaaatttgactgcatcatgctggctttcgattaaattagtgtgttttaaaaatctatttgattcttaattggttcaagtattacttccttggaaccctattaatttaccctaattatttcctttattccaaaccctagtgaatttgagcaaattctctcaaatttcaaactatagattatttccttagtttatcttaatattaatgaggatttgctatacttcaaaccctagtgaaacccttccaaattcatagaacaaattcaatcctttctaggaaaatattcaaaattcttgaatttcactgttcattgccttcaagatgttcagcagaatgcctagcccaactaactcagcccaatccctatccaatcttgcacaaagtctagaattgatcctaggggaccacaccccactcaaaaccgtggctttctttacttcttcctccccttcacacgcgccgctcggacatccgacttagccgcgcgccgtgccgccgcgcgtcggtctcgggatcgatcgcgcgtgcccgatcgccttggcgcgccgctagccgttcgacgccctcagaccatcgccgccgcaccaatcacggcgacaacaaaaccgggatgacaaccgccacaaggaatcgccgctcgacgtcgtgcgctcccgtccaagccgctgccgagtgcgatttcgcttctacccagagtgaatcgcgccaattcttgccgcacggttggatgaaagttagacggtggtttcccctctcccaattcaaaccattaacccccaagccggccgttttaaccctcgccgccgccgcgcgtcgcgcccggattggcgccaacacatcgccagccatttctacacacggtcaagccgatccttcgctggtaagtattcaaacatggcctcccgccactcaaattgatcttggccaccctctcacagcctctgccgccccaaccatatccaaagatcgagctcatccatggcgatgatggtgcccgagctcatccgctcctcctagccctataaataggaccccaatcccttccttgtccatcatcgatcatcaacaaccatagccccacaaccccgaagctctgcttcgccaacccattccatcaaccaccatcgcccgtcggtcgaacaccttgtgcgcgatcgactccacacccctccatccatcttccaccctaaataatccttagaacaccttatatcaaccatgttctagcataatagaccctaaccgaagccctgcgtcgagttttacctcgccgcaccaagccgagcaccgccgccccgcgctgctctgttcttcaccgctgagaagtttttccggccgcaatccttcgtttcaaccgatctcggtgagttcttccattttaaccatctacatactccctagattccattttagcaatcactttgcactatcatgtcgccctctgggttgccgacgtgagcacggccgccgcctatggaggcgctcgtcggcaactaccctccgagccttgccaaaggttggcaagctgccgaaatccatctaggtacctcgtagatgctctaggagccctcccctagccatgtctaactcgtaccatcccaatcgccttcacggcctaaccgtgctgccgccgccctagccgctaggccatccacatatcaaattaacccctccgtcgtcactcgccatcgccggagaaccctagctccctcccctcctcagccgcaaccactttccctctccatcgccacagcaatcgccaaccctagcatcgccggcccgatttggggatcggctggaggtagaagaagagaagagaaagagagactgacaggtggggcccgcacacagtaccatttcacatttatttgattttcaaactttagaagcccatatcttttaaaatataaacccaatttcagtgaaacttggaccaatattcttctaaaatcattctctatattttgagcccctttttgctatttttgcattttatttcattttctccatttttcttatttttttggattttatttgaatcccttttgaatttgaattttatatgtctaaccctaggtcttgaagattcttctgacacactagataatatcaatcaatctcaggacatcgagcaaggcaagttaccatataccttttgatcatttaaacctatattttacaaattagttatttataacctcctattcaatattctattttctatgcataaatcaattatagaaacccagataatttagtattgcttactttgcttacaatttggttaaaataccttatacttagattgggacagtacgtaagatttggatgatttccgggtggctagtactgtctcgatcgatataagttttaccaggtacttatgtcgaacaaacgagtacgaccacagtttctaaaatggggacagacttagttattatgttaattagcaatatggcacctctgtatagtggttcttatttttaagttaagtcctcgtgcaggaggcaactatagccgcgaagggcaactttaaccattaccatgtacaggtaaatgatttgtgatactcgagtataaactatatggtatatttctaaaccctgatcgagatgacgtggtgtcatacgatcagttcccccttaaatacctcgggaacgccagaactcatcttgctgctgttaacaatacgttcagagcatatgaggatataagttcatggaacaggtgccataattgttaatgacttaatactgggccatgactaaagccgatgattatcaacaagtcgtggactgcgggtaaagcgtacatctactgcagtagaatatctttgaaactattcgaatagccgtactcatggagttgagtactgggattcatatggtaccctggttagaaatctaaagtctatatgttttataaattcttgctataactcttccagattatttattactgctttttgcgaagaaccctactctatgctaatgcataacatatttccatgataacttgcttagtattatgaatactcatccttgctcttataacccctttttcagatctgggtcaagaggagcacccttatgactattactatgatgaccccgattacttagagaatccataaaggttatacctccctagtcagaatgtatagaaacttccgctgtgtattaattattaattaattagttaggtgagtacctattattgtaaaacccttagtattgtaaaactttaacgtatgcaatgaagaaccagttatattgtatgtatcaatatttactgatccaaggattgatacattatcttagtcgggtctaagttgttagttccgggctccgacatagataaagtgagtaatagtaacattgagattggataaagtagaggtattctagtcttctggtatttgtattggtatgtgtgcgatggatgaaaataaacttattttgagacagaggcgatacttgtgaaaaataagtgtggtaagctagttagctgctcccttcatcccaaaatataagtatttttagctatgaatctgaataactgttgttacattttaggatggaggtagtagtcaaggaatggccttgcatttatacctgagcacaaaaggtctgacgtatacatggagttgatatatggtttgtaataggcaaattggacgcctcattgaagagaatggtgcgttggaccatagaacaacgtatggggcggatccagcgttatatgagtggtttcagctgacaccagtaacatttgccgtaacccatgtaccccttttattctaacattgctgatcaatcagccatgtgttttaacaccaaccatcagctaaaatcagcgtttgcttttgcttagcccgtcaactttcttgctcagcccgtggcgaacgtggcatcggcagtttatcccttcccctaaccatggcaaattcactaattcctccatctaatttccgtagcaattttgttcttgtctacctgttttttgtttttttagataatgttcttgtctacctgttaaggtcacccaattaatttcatgagaaacacctagatgtcttcgcggatttaaaaaaaaataatagtgagagctgaataaactacatcagtataaatcgaacctacagtccccacatcttttgaatctatggaaaaaaaattagtgagagcttagggggtctccactgtcccaggggtggtagtgggg

SEQ ID NO: 27662 - DNA, 3800 bp, Oryza sativa
ccccccccccccggcccccattgtgaatccgctccgggtcttctggctagctagcttcacaaggtggtgggctagacgaactgggttcgaagcctcaccccttctaactatttgatattatgtcctttcctaatatttatgttttttttcacccaattaatttccttaatctctcatgatcacttaagtttagggcttttgaaatctagaggttttcactttgcatggctggtcttctttggttatgaaacggttggtcactggcgtcacatatttataacatagggggctttgtttgttccacgatgatatttactcatgctgatcttactctagtgttttgcaatttaattttaacaattagacaattaggataaatatatatgatcaaacgatcctgaaaagagaattgttagaaaattacctacatgtgcattaaactctagcgcctacggatattgtgcacgtacgtggatttttatttcccacgggatttcagtgagatcgggatatatcgttggttttcgtctctttgagtgtgtatgtcacggatgtattattcgtgggtgtgggagtgtggtgttatgtgaatagtgatgcatgtccatttacagtataataaacaaaattaatacatattattaatctgctagaaactatgtacgttgtgaccatcaacccctgtcattatcgatctgcaacaaattgccagtacaattgacctatttcttgtgctatcattttcatatagctttcaagagaggaaaaatgaagacagtatacggttcaatgtcaaaatcgtggtagtttatgatgatctattttttcaatgcctccatcgcctctttctcgcgagcaattgtttaactaaccatttataaaaatacggcctagaaaaggttgaaaagtcagaatatgtctcctttcttgtcattcatataggtcattcctctgaaaatcatccacattttttccatggcatacttaattgtgcagagcactaacttaattgggcttaaaagcattgcgtatattctatttacgaaccttttgctacttgacatttataaatttataaatttatgcaccagatgtcaaaagcaatcttttaacaaaagctgcttccaatactatttcaaatcatattaaattgctagtcttctaaagaagtacataccagaacattgcaattcattaattatatctataacgtcggtggatacgtaattatttattccttctatataagttgaaattcattcagcctcatcttttcgcttatgcttatacttatcagctaaaatttaaattttcaaccttaaatttagagttgattttgatatttttcatcggagtttatttttcagcctttgcttttagatcgttaagaacacacatatataaaagttttattcacaaattatttttcatttgcaaatataccgtttcgcttattccactgataagcaaaacgatgagaaccaaaggcttataaagcagaacacacaaatatcaccactcactattaattacttctattattataaaacatattaaaacttttttaaacctaaggcggaactttgttccacttttatatttagaagaagagaattgacccagtttataaggaaaaccagaaccgaaaaccaacaactgcacggttaattacaggaaaaccggctgaaacccactgctacataactaacaatagcggcggagcccaatcgcaggacgtcgccgccaagctaaacacaaaagcaacacaattgctcccacatcgcagaagaggtgttatcattgccgagctagccgcctaagcgacccagcagcgccaacttcacaaccgaagcgacactgaagacgaaagtcgccaaagcgaaaagcggatctgacatccaacaatggacatcagccaagccaccgaggagccacttccttcacacggccaacaccagaactccatggaagagactgcaacatgtcatcgttcccaagcgtcgccgcacccccatcagcgagaagcttcgactcatcagcagaaacaaccgaagagcgtgtcgcccaccacaagaatgaagcggaccccaagaaggtgcagcctctccgaacacaaggtatgaaagattttgaaccgaaaaggaccatcaacagtcatcgatgcgttggaacttctccgaagcgacacccccaaggaggacacgacgcgtaacgccgccgccgcttgtccgtaaatcgtaacgaggttttcacctggagatttgtggggatatgaaagaacgccatgacaacgcctccaaggagggaaacgacgcccacgggcgctgtcgttgtcgaaccggccaaaagcacggcaaggctttcgttagcatcttcacatcacccacataagcaccctcacatcgatggccacagaatagtccataacgtctcacaagcagtcataccttgatcgtaaccaaaggcaaagatgggcccttggccaccctcatgccatccatccgccgcaaacttctatagcaagctagagcctccgccctcccccctagcattccccatgaccagaaaggggtccagccaaagaaggggggaaactgaaaggatggagaacactcggccgacaacgaggaagtcatcgtcgtggacgtcaagccccattcctgcttcacgccagcacaagccgtcatcccgccaactccacgtccgcacatcgccgcccatgagtcacgagacccaccacgggcagaagatgccccctgccgaacaggaggctggccaccagtgagccaccgccacgctcgccggagcccaccgagccgtgcaacgcccacacatagctgccccgccgaccggctgccatctggcatggaggcaacggatccggctgcagacggccagatccagccaggctcgggggcgacgaccagctagggcgcgccgccgcaacatccatcgtccaccatcaccaaagccgaagccgacaccgacgccggcgccgtgaccacggcgcgagcgagccgccgctgccgtcgcccgcccaccgtgacactgcccctgcctgccgccggtcttcgcgctgccccggcgccgacctctcccccgccgccagccgccacctcttccccgtcgcctgccatctcccttccccgcctccttgggtgtcgccgtcgtcctgggagggggacggactgtcacaccatgaagttcttttcccaagcctaaattgaatttataaatcacctcgagaaaataccggtgaaaaagcaagagagaaaccctaaaggaatcaatgcaaataataatcggaattggcatgtggaatttttcttgagttctatatgtcgaaatatgctaacaagatttttagtggaattttcagagctctagaaataattttaaccaattaaaaatgagctcaagcattatttaatccttggaaattcttttcctttttttctttttccttttcctccctttttcccaaatgggctgtcggcccatttcctccccctcccgcgcccttgctgggccagccgaaggccacggcccaaccgctcgcccgagccccccctctctctccctcaggcgctgacaggtagggcccacctgtcagtcctttccccaacctccagccggtggccccgggccggcaaccgccgccgcgcgcacgccgcctgcacccgccttccccgcaccacgtcggccacgcccgcgcgtgcgtccgcccctcccgcacccctcaaccccctctcccgctcgcccgcgctcccgaggtggccgggattcgattttcgaatccc

SEQ ID NO: 27663 - DNA, 4512 bp, Oryza sativa
cgctcccgcaccgtgcacccacccgccgccgcaccgcgccgccgccgccgttgggttcgcgcggccgaggtccacctcgtccacccctcctccatcgaggttcgccgccggagccccatccccgtcgtgcgccggtatgagacgccatggccaccgccttcggccggcgttcccgccctctatggtctctctctctccctctctaatcttccccatttcgttccttaggtcgtctcggaccccgtccgctgcttgtcgacctccctccatcgttcctcgtcgccggtcgccatcgtctccctccacgccggtcggaccccttcggtgaggacgcccctccttccccttccttcttcctcctctcttttccttggtagcgccgccgcttagccgtcgtcgcgccgtcgccgtttgccgaatcgtcgccgccgtccgccggtcaccaccggtgccgcgccgccgccgcgccatggtcccgggtcggcttgagccgaccgcgcgcgctggccgcgagctccccgccgccgtccgatctacccgagggtagatcggggccgtcggtccggctgcccgcgtggctgccacgtggccgctgcgtgtgcgccgcgtcggcgccatgtgtgcaccacatggtgcgccgctcctccccggtccgtagacccggtccaccatggaccaccctccctgagtcactgccatgcggggcccgcatgtcggcgccgccctctctctccccgggattttaattattgcgcaataaatcaattaagtatttttctgtttatagtaaaaacacagtgaatcttctaaaattcatatctaattcatccgtgctccgtttaagcccattcaagactcagtaaatcaaaagaaatgcatagaatctattaaaaatggttttgtcctctgtttcagtagtcttatagcctgtttgtattgtttgctttgtatgtcgcttagattccggctctcccgacgctccggtgtactttgaaatagtcgccgaggttcctccagcagcagagcaaggcaagtcatgcttgtcacttgaacatgttgatcctatattgcaaatgccctaccgttttcctttaaatactgcatcattttataatgtcactatgggatgtttacctactgttacagccatactatttttgtaccatgctcctttgttagcttggggatataacatgactagatattggactagggattgcttagtcatgcttggttcaactagcacacagtgggggaaatacattaatgcatagatatcagattctagtaatgatattggttaatgccattgctccggtgttggttaattaaaatatattaaatggtgggctgtgagtgcatggttttgctagtcgcacccatggcaattaaggaccggttcgcgggaaaccctggaagaattcctcgtacttaccacaagccagcgtgggcaacggctgggcttgtagtgtagcttttctctagccgacgctcccaggcaagggtgggcgtgatggagcggggcgggccctgcgacggcctctgtagcttctggattcacctaggcacgagaggggactgcccgttgcccgctggggacggggggtgaaacctgaggtgtggtgtgcttggctagagggggttatgcgaagggtcctgttacggcctcttttcggtatgtcgtggtggcatgtcggcgcacagaagcgtgtcttggggctgtgtcttgtgggtacagttgtacacctctgatcagagtaaaactattcgaatagccgtgcccgcggttatgggcggtcgaccagattcaccgtgattagtctcaccctagtttagtctgatggaactgattagttcaggtggatggttgggcctgttgcaacgtggtgtagcgttggacaatggatggttaatattgattaattattacagccgttttactgcttttaactactgtttataaatgctcgctttatacaaatgaaccgctctagccatacgttgattaaaccctgcatcataccccctattccggtatgacttgctgagtacagtggatagtactcagtcttgctttattttccccaaaaccccagagtttgagtatgcgtcagatggtggtttttccgaggagtaggcttcgtccgtgccgtcgaggatgcctgtggagtggtgttcccgctgcaatccaagtcaacgcttaactccagttatcttttatttttccgctgcatttatgtaagacttttataaagtttgtaagacgtggatatgtatgtcaactttgttgtttgtgtaccccggccggtcctggacggaggtttaaatgcacattctgcttggaattctattcgagaatttctgggcgtgacacggaccgccggatgtagcgaggggcgccaaatctagcgccgtcaccgccgcccccgcacccaaccacctccacgcccatccgttccacacctagctgcctccatgcccccaacccgacgccgacgccgatgccgtcacaccgtcgtcacccccatctggtcggggtcgtaggcaccgacccgcgacctcgagggagatggaaggccctgttgccgccttcctctcagccgcgtggtttccggcggtctgcgcgggcggcggcgaggcggaggagggaggaaggcggtggtggtcaccacctgtgtcaccgctgcccttagagcgaaacgggggccttctcagaagtcagaacgatgcagttcctcgctttaacatcttaaaactaatacaagtattacacgccatctataatttattatattcttgtgctcaacaggcaagcacaaaattaccatcctcatccatcatttctatagtactgcatcatccaatctatgctttctttataatttgagcttaacatgaaagcatgtcaaaatcctcattctcacaccattttgcaggtatttcggcatgtatccatagattattcctataatattacatgtatttattaatacatctcacaacaaaagcacaggacatcaaccaataatataacagagtcatcatgttttgaggcaagtggataacgactgtatttaaacatttactttataatttcacactttccacctctaaccaaaaaaataaaagaattaaggcctaccatactttcggcctaatagtcatccagctcatcaccctaatagcctataatgtgaacttcaccgataatctaccttctagcaagtatagcactatagcttctcgtataattgaaagctctcttgaaaaaaattaactttttatctagattctcaaaagctttagctataattcagaaaataaccctagaagctaaaatcagcttttttttattataaattacaccctctacttcatatctatttaaatttatagtgctagaatataccataattctagaagtaaattcctacccgttcctcttaatccaaagctcgctagtacaagctagcaatcatcttatctatttaaatttatagtgctaaaatatatcataattgtagaagtaaattcctacccgtttctcataattcaaagctgccctagcacagtctagcaatcaccctccatcagtgaacagtccaagtgaccaaccctaccatgcagtggggctgtgggaagtgggaacccgtgaggtatgaaaatgggaaaaccagcagcctgctagtagcatcagctagcatcagatgctgatgctagacacggtggatcgatccagcacagatccgcgaaaagatgagatgccattctccccgattcacgcacacgcgcctcccatgcaagcgacgcgccgcacaccttgggcggtggagccggtccatggaccaaaccacgtacacgtccgtgtgccgaatcgcttatatacaaagctgccgagaattgagcctcaaatcagcgtttgccgctggcgtggcccttgccggggcgtgacacgtcgtccggcccttctccggagctgaatttggaggctgcgcgttgcttgcttcctccgtcgttggatgcccatcgtgcgtccatgcctgcctgacgctgatcattttgcaaaaaagcccttaaactaattgataatttggttttagatctctggtatacagtttctacgttctacgttattacgtataggacctctaaaaaagaaatattctaatcaaagaagcaaaaaacagaaaataggactgcgctcgaaaacatagaaactaagggggttttctgcaacaacttgcatccctatcccggtccctcaccccacgaaaccctagccgccgccgttccgtcacctctctcttctcgctcgctctccctagaccacaccgccgcatccgcctccgcctccgaccactcttcttgcacccagccaaatcgccgcacctcccccttgccaccgcgaggccagttccggcggagggtagaccgtgctcgccggattcgggtagccacgacctccttgccggcggatccggtcacccggaggcaagggcagggctagcacat

SEQ ID NO: 27664 - DNA, 19616 bp, Oryza sativa
tacacatgtatgttgattgcagtgctaggagtgcagtaaatttttttacatgggtgtattttttgcaatgatggatgttaataattgagggatatgatgagttagatgatataaacaaggcacaatgaatgaattgaggccatcctgatgttgggttgcacatgtattatattttattggatttctccttttatgcactatgtacaatagttggtcagagaggaaaggctagagctagaagactttttcactttctttttttccctctaaatatgggctgttagacagagttttactaactgatagcaataacaacactcctctgaaaataagagagatgtgttcctctgtttgctagatgctactggccagcctaatggtaattgattaattccatgcagcaccatatttatcttgtatgtgacagtttataatatactgcattgcatttgtccacagtttgatcatgcagagttataaaaaaggtggcgtggtggtcttgcataggtgggtttcaaagtttctatatcagtttttcattgatgtggttcaagtgttaaatttccttgggttttctgctcagaattgtagattttctttactgaaaactgcaagcgacaagttctgttccattggtcaatataatctttttggtgatattctgcaagatgtttagtcaaatccatgactattatatccagactagaaccaaatttataccacaaaatatagtatttattgctgaggtcgtaaggtttatttgtaataaaatgtgttcttttttattttatgtatgtatgactacctgcctttgtttaatttatttctcgcatgcttgttttctatacatatctaactttcatgtaacctctgtttttttacctgtcttgttgccggcagcgcggcaacggcgcgcgccacccctagtaatctacacacgtgctcccgtccccgatttccttgtgaaaaaaatatttggcacaagctagtagcattggctaaaggccatgcgagcaatcaagcgggtagatccgtaccggacctggccgtctactcttatactatctccgtcttaaaataaaataaataaaataagtatagccatgctatccgtatttaacatttaaccgtttgtcttatttaaaaactttatgaaaaatttaaaaaatcagtcacacgtaaaatattattcctgttttatcatcaaataacaataaaaatagtaatcataaaagaatatcaaataaaataatagttaaatgttgaatatatacaatgtaaaattactcttattttagaacggagggagtaccaattattaaaaatagaggagtaatttatttgtgagagggggatgcacgccgagaaaaaaaatggagtgcataaaaaaggttgacgctatgattgattgtttgatttgatctagtagatgacaatacgtgggaaaatgaactaagcaagaaaaccatagttatattattaacggtttaaaagctaatgttaaaataaaccagataaaaaaatctttgtattatctgcattcctactatatttcgaaacacatgaaagttttaaaactattgttttattagtacatataaaaaattcaagacatgggaagagaaaagcatgaggtatattcttatgcttattttcaatggttttaaatagccggctaagacatttagcggttgatgatattctcaaacaactatagcaacaactacagtgggctaaaaagaatcatagcggataaattatatatgagagaaaatagctaaaaccattctcaaatagttgtagtcggagatttaaaaccatgtttattttcctccaaaattgctctagaattattaattccatataaaattttaagagaatggatatgaaattatcattcgtttcaaagggcttcgtacaattatattctataggatcaacatcctaaaacacgggaaagcatgtggtgaaaacttggaaactaccgttggattgaaaaatagacgtccgagattcatccacgtcatcacgagtaaaagttttactcacggatgatgacgtggacaaatttcggacgtctattattcgattcaacggtagtttctaagtgtccaccacatatgtagtttttaccatatattttcataaaaaagcccttacatatttttttaaatgagattctaaacgagaagaggctagatataagatgactcgcactcctttttaaatagctttaaaaaaatagccaaagggacaagaagttgcatgaggagccattgatgagatttgcgagacaaatgagcagtagggtcccgaagttggcgtccatagtccatatagaccggtcccacggaagacaccggcacatgccgacagcccacggttgcacaagcaaagcaggtgcttccagcaatttcaacccccgaaaccccgggataatcgcaaacccaacccaactcaacctccacagccactgcagcgtgggccctacacacccagtggaatcaccacttggcccacatgtcagagccaccacccatcatcacccatggcaatggccacccgtcgcctcgcctccgcgcccacgcatcgcctcgtctctctctcttctcgattccacttctacttctcttctcttccaaaatctcgcctcgcccagctcgctcgggcagcgcacaccacgcggcgtccctcccgctccccctcgccgctaaatagcgcgggagccgcgggctccggcgagcgcgagaggagagaggaggaggcggcggaggaggaggaggcggtggtgcgtcgcgagcgcggaagggaaggggagtagtagggggggagtggcgtcggcgtcggcggcggatggcggtggagtaccactgctgcggggcggccttcttcgagcacgtggtgatcatcgtggtgctggtgctcttcgcggggctcatgtcggggctcaccctggggctcatgtccctcagcctcgtcgacctcgaggtcctcgccaagtccggcaccgaccaggaccgcaagcacgcaggtgcgcgccctgccattcccctgtgcccgccccgcccgacagccgcctgggtgtattccgacgggcggcggcgttcgttggtgtgcgtgtcgtgcctgattagatgggtttctggtaggatttggctgcaacttttccgggcttggcatttcgtcgaacatcccgcgggcgtcggtcggaccgatgaatcgatgcatgaacgttgttttgtgatgaatttggcgaatagagcggttgttgggagggtgattggaacgtatgggtcgtataattttttttttgggcgatcaattcatgcaatctacacgcggccttcccgttgtgcctacttttggttgtgcctacttttggttgatcaatccatgcgattttagaggcggcccaacaaatttttgtgtactttttgttgcgaaggtttggcttgatcacctgggaagtggtcgtattactgctgttttaggggatagcgacatgctctgcactttcttatttcggaaagtaagacctagtggcatagaaaaagtaaattaaaaacaccctgtaaaatctaaagtaaaccctggtactcatctaatttttgttttcttttgttgctatgttaggcgatccattcttgagctatttatttggctgaatgaaatgcatatgcttcatcttttttttttaaatatgtaaaatggcatgcgtcaaatgcaaatcttctcatatttttgtgaaactgctcatcttaacttttctcttttctttccagctaagatattgcctgttgtgaaaaaccagcaccttctgctatgtactcttctgatctgcaatgctgcagccatggaggtatttggctttatttcaagctatttgtagaccggttagagctttaaggttctccagatgaatgaacatgtgatggcatgcttctgtatgttgctaggctctgcccatattccttgatagcttggtgactgcttggggtgcgattttgatctcagtgacattgatcctgctgttcggtgaggtgaattatatatactttactatgatgttcagctacaagcctatatttttgcaccccatgctaatattatgttctggtataaacagatattaccacaatccatctgttcacgctatgggctggctattggtgcctcagttgctccattagtccgtgtgctcgtttgggtttgcttccctgttgcatatccgataagcaaggtaattatactcgcagactctgcaatatcattacatcagtatactcgaatgcacatgtattaaatatattttactttcttttttagcattagtatcctcgaatgcacatgtattgaacatttttttacttttctttttcagctgctggaccatctgcttggtaaaggtcatacagctcttttccgtagagctgaactaaaaacactcgtgaccctgcatggaaatgaggtaaacagaaatattgtgtcttaaagaagaaattagattattgctattatcctatgtatgtgagactacacaaaattgtagatcatagacagctccactttttaagaatttcgggtgttaaattgttaatacctctgtatatcatccgatctacgtatgaattaccacagtcagggttctgattcgttgggttgtgtgatgtgcaaaagcttaggtttggagattctatgtgctattttgaagtaatttattatcaatatcacttccaaggaaataacaaaagaaatacaaaacataaaaaggaaagggagagtgaacttagtggaatctgatgcattccttcctcaccctaagtggattttgactcagagggcataggcatgctggaatattactgataaacatgctttgctttttttccccctaacctttcatgctttatacgaaggatatggttttacttcataggttgtgattaaatactcatgtctgcaaccccggttagaatatagatcttagatgtcctaatggagcaggtcatttggttggtattctgcttacaggccgtccacagtccacacttgaaactggacaggcttagagagctagttggtcttacctgtaccaatcattgacttagtcatgtaaaaaatgaattcatgtttattgatcttcctattagtttttgcatgagtgttgaggttacggaaatctgttttataactgttttacttcaatttcaacaggctggtaaaggtggggagttaacccacgatgaaactactataatagctggagctcttgagcttactgaaaagaaagctaaagatgctatgacacccctatgtcaaacatttgctattgatataaatgcaaagcttgacaggtattggttgcgttacaattacacatgatttaattggccctaccatattcttttctcaactgcataatcctgtcattcatgttctcgtgcagggatctaatgcaaaaagtccttgacaaaggtcatagcagggtgccggtttattatgagaagaagacaaacattattggattgatattggtaatgctatcttccttttcaaaacaatcatacgattcttgtaaattgtatcttgtgttttgtctggatgaaactttttttttagttttctcatatttggcatctacctgttaatgccttgtagcattagattgagcagaacttgattaacaaatttggcaaagaacccaaaatcactaattaccatccagatatgatttatgtgcttcttatttaatttaatacatcaaaccgtatggtttgtcaaactctggatcgagtataaccattgaagtgccaccagttggagtagattctttttagttgtagttttattatgaactggcatgcaacattttctcagcacaacgataattcttttattatgaactagcacgcaacattttctcagcagaatgataattctatagtgtacttagctgtgtaaatgagcataaattgtgaaggaaggaggcattcaaattagcatgttataagttgcagctggtaaatgtgcatttaaattttaaaacaggcaggacagtcaacaccctgcatctgtgccatcttcaaacaaaatgcatagcggtaatgtgtcttgtatgacagatctgtatgttttgagagcatccatgcattagataatgttgtgatgtggatcagtggatctgcgctcttcaacaaaaatggatagcattatgtgtcttgtatgaccgatctgtatgctttgaaagcatccatggttaatgttatggtgtggatcactggatcttgatttgagctgctagtacatttacattaggtttgcaatttatttatctggcaacttcagatatgtaattgtgttgtactcacctaaaattagcaattttcaggtgaagaatttattatccatcaaccctgatgatgaaattcctataaagagcgtaactatccgcaaaattcctcggtacggtattaaactgtaaattgttcttttatccaacagtgcaacatcttaatggtgaaattgttcaatacaactgaatattcctctcactatgaaattaatgcctgctaaccactggtttactgcaaacacaaagcaacagctgatataattaggtcatctgcaaatgcttaacttatccgtagttttgttgtaatttgtagtagaaatgaattctggcatctacaaaagggaactaatttatattgcaaaatggagaagttaacagatatggtgtataatagaaatccaggagatagttctgttttcttcctatcatattgcaggcttgatcgtggtagaatatggcaacagtatctctaataatagtagcaagttactaaatgacagtgttagtagctaatttctagatttacctgaagtgcctgtttaccttaatgaaatgcttgaaatggaataattgaacttgaacgtatggtagtttaagattcagcatttcagctaacgcaaccttcatcttgttgaatgtcagtgtttcagaagacatgcccctctatgacatcctaaatgaatttcagaagggccacagtcacatggcagtagtcataagacaaaccaatgcaaattatgcagctgaacctcctgccaacgacggtggaactcttggtgagctccaaggcaattttctttctcagtagcttgcatgtggcatatatataacagccttttatcttaccattttctccttgttttctttctttctttccatgtggaacaaagaggttgcgatctcaattgatgataagcatggtgagaaggttgtgaagaatcttcctccactaagaagatggaagagctgccccaactctcagaattctaatagagggaacaggaatagaaaatggtccaaagatcaatcagatgttcttcaaatacatgaagagccattgccgacactgaatgaagatgaagaagctgtcggtatcataactatggaggatgtcatagaagagctgctccaggttagtagtttgcaaatattctctttttattagaggtttgtagaactgtccgtttgttcaactctatttgtttatttaacacatgctcagtggcgattcaacacagtaagatgcggatgatcagccaatcatatactactcataaagtagttactttcatgtttatatgtccaaccattgaaccatgagatgtgctgaacttcaatgccctacataactgctctaaaattaagagtagttacaatgacattgtgcaatattatatcattaattcatatttttcatgatggcacaggaggagatatacgatgagacagacgtacatgttgaagaacaatgacacatgccgcagtcacttcccattttgaaccagaaaatcggtgccatacctttcttttggctgaggggaagtgccgggtgcaaatatgtgtttatattagtacgtaatactgtacttcagcgtagatagaaacgggggttgaattggttcatttgaacagctggtacgaatagtagtgcagtagtagagagggacaaagggttgtgtgattttgcttggtcctgggacagtaggattgcgtagttatgaaactgtactggttatcccgggattttgacgcggtaatagtgccgctctgagtcaatggtgctccttcggaaggcttcgctttcttgtgatgttggcctcactcgaagcgtctgcacagtaacaataaaaagcatgacagccttatatatttctcgaaatctgggaaaaatctcactcatatgatgggaacgagcgtcttcaatgagtgagccacatgcgagaaatcgctcccgagtcccggctccatgagcactactcgtccggtcagaacaacatcaaatcgcttatatacaaacctgccgagatttgcggctcctggagatttttgagctggcgtggctacctgcgcgagccgacgcgtcatcggcgctgggtctggtgggatagatttgcggctcctggagatttttgagctggcgtggctacctgcgcgagccgacgcctcatcggcgctgggtctggtgggatttaataccctttgttttcctctgaaaaggaggaagaatgccgtgataatagcgcgtagccggcaggagatacaaatccagaagagcattcttcgtcatccttcatcctggttgttgtctgccattgttgtggtctaagcgtatgatcaaatcattctaaatagctatcttgttttaaatcaagatgtgatatgtcattctaaatacttctatccattcacaagagtaatacctatttcatattttagttttttaaaacaagttgtttttatttgtagtctttttacaccaagattcaaatgaagaggtaaattaaatgtttgatcaaaacccaaggagctataataactctcattggttacttgcgtgtatgcactcttggatcagagtaatatgcaaaatatgcaaaatgagttaatttatttttatcttaatggtaaaagtaatatgtgtaacttttatggaatgaggaagtagttttcttgttttaaattaagacgtgatttgtaattcgcagtcattttacctaccatctctaataattggctccagtttctaattcgagttttcggcatggaactgtgaggcactagaggttttcatacaaatgatcaactatgatactcagtgtcaactcaaaatacgacgatcaaaattaagtgaacggaggcgggagtatctatcaagctaaccagtcgagatagagctgccgcaaaagcattaactccgaaattcgctggaccaatgtagtcccaacaattaaacaaaccgtggtccaattcgcattcgctggatcatatgtactccaaacaataaaccaatatggtccattcctgttggtcaggagggagcaatggcgcacgcggacttcccgttcccgtatcagaattttaatcgcgtcgtgctacctacggccgtgtgtggaacggcgccggcaaaaaaaaatttgtaccactacagttcatccagattttttgtcctcgtctacacgtacgtatctcctcgggatcctatacgtagtagtagtagcagcagtaaaaaattaaaggatttgattactgtcctataacatcaggatttttttgctctgttcccagaataacgtagagagcgtatatccgtgcgagtgaggatctatttgtctcttgtttgttactactactccctctgtcccttaatataagggattttgatttttatacttgtactgtttgaccatttgtcttatttaaaaaaatttagaattattatttattttatttatgacttactttattatctaaagtattttaagcacaatttttcgttttttatatttacacaatttttttaataagacgagtggtcataatgtgcaagtaaaatatcaaaatctcttatattaagtgacggagggagtactactcatgatgatcgaccgcacaacgcatgagacgatcgatcgcttgtgcgatttgtagcgcgcgcgtagccgcgtatacgtacctcgtgcggccaatctacggtctacaggatcgaattgagcgctcctatatatactggcaaattagctatagctctgagggccgagcaggacgcacaagaagtcagtaacttggcattcattgtcccacatggttttatagagttgaagttagccatttaggagtagtttttttttcatctagtctgttttttaaacattaatttttatccgttaataatatcaattaaaatttttatccatcaatatttttagttgttttatttgttttttcacggtttatcggttctgtgtgcggcagatgtcgaaacatgcttgcttttcgtgttgtccatgcggtaatattatgtactcctacatactagtagggatgaaaacggagcggataaggatggatagtgctcataccatatttgtttttatatttttttaccggatacgaaaacgaatactgaaaatcgaataggaataagaatcgaatatgatcggacacgaatatggaaatattttttctcggaacacgaaaaccaactcaacttctaatagaaataaatatcaacatatataattagctcattttatacaaaatgaagtataatttataaatatttttaaaatttaagtaatattaatagtattgactagtgttaagagataaactactattaaaatctataaaggtatattgaaggttatagagttagaaagaaatgggggtatgtctcgtggcttctgtggatatccgaatagcactgttcaccgaatatccgaattattatctatatccgacggaaaccccgataccatacccgggagaaaatatccgtattcgtatccgtatccgaactatccgagaaatttccgatccgaaaggtatccgtatccgtttttgtccggagcggatggaaactatccgctctgttttcatccctactacatagagctagagaatacaaagatataaacaacttacatttgagatacaaatgaaggaatgtagggcaatcctccatcaacaaaacaagtatactgataaaggtccattttactcccgtgaagtcttgaactattttattggagcaattaacaccttgaacaattgaaaacaattcattttactgtttgtcggagaaatagaaaccaaggtcccaatcgccagctactcgggtcgtatttgccactgctccctaacacgacctcccatgacctgtgcttggggaaaattcgccaccaggtgtagccctccatgggctatgcttgaggcacatttgtcgcctttccccaagcgcagccccatgtggactgtgctcagggcgcatccgcctctaggcccgacacctcgtgggttgtgctcgaggcacatccgcccctaggcccgggccctgggctgtgctcggggcacatctgtccccaggtgtagctccccgtgggttgtgctcaaggcaggtccgcccatgagtgcggctcccagtgggctgtgctcggggcacatccgtccccaagctttgccccccatgggctatgcttagggacatcttccacctttccctatgtgctcgaggtagatgcaatgcattgactcaatcaagtctcatattcaatgcgaggtgacatacaccaaccctaggacaccacggtacggctccacctagccttcgaggctggtgcgctgacccaacaaccaccaaggtatccacatcacctaccctaagccacgcgtcgaaggaaggagtaagaccagtcccaacccaagacactagatatggtttctataaaccttcacatcatcaagaaactactctttcaatgcaaacaccaatgttccatacttaaatttaatgctacttatctcacatgatgtcttggatgttgtgtagaaccatgtctcatgcaagacctggttttcttctctttcctcatttaatcacttgccacatcatcttacatcctagatgacagcttatttatgctatggacaccgtcctagtcattgggttgggactggcctaatggggtggagagaagccgctctatgccccaccaacatgactgaaatgcaagtttagggccaatagtgcccggcccccaactatcatgtgacaaggccaagcataccaccacttgtgggttgggtcccacttgtgcacacatgtatgggcactgtggtatccccatgacatataaaaagatgaccaataccactgagaaagggggaatgttcaattgggttagacttagttcaactcaagctgcaacttagagagcaagagctcatcccctagcagacacaaataaccctcaagaaattctctgtaaacatcatcatcatcatcatctagctaagaacacagaagtagtgtgttacacttccgatcatcccaaacctgtctaaaccattgtttttttagcccttgatgatccatgagatgccaatcacctcgtttccacacacccgctccctggccgaatcccaaaagagtgccacttctccatgctagaggagtttgagctccgacaccactcattagcatttcttttctttgtttctcctcatacgagtcgtattttgaactaaaatttttagagccatagatgacacaattatcaaagttgcaaaatattttcaaaaatttcattactattttaaacctcaatatttaactagttttagtgtttcctacctatttaaaagtagataaaaaaatctttaaaatattatgggtaagttataatgcatctatcaattcaaccaaaatttagcgtaaaatatgacatatagagagaaacaataaacatgcatatcattaggaggaaggtgaaccattttcaatgtttcgggatgtagaacgagtcaaaaaaatgtttagggtgttaactgctatagcgaaattgtttgagagagtaaattagatttttcttgcaatatactccctaaggtagtacttaaaatacctgtcaataaataacatatttacaataactgatgtttgtccaaaaagtgcactattgatcgatttcctctcatatgtatttattatctgccagtaccctatggagttatagtacagccgtacaggtatcattcccatcattttaaaataattacgagggagaattttggttattagtttacttccatatcatcattgactcgatgatcctactggtacaaagtcaaaatatgtttaggactgctggcgccaggcggttctacattaatactgcttcagataaaaaaatatcgttcaaatttaatcctcaaatacaacgacttctctacatctatattttcttatcttagctgatcataattacctcttgttaaatccctcttctgactttctcatttttcattttaatcatcatatttatagaaggtatcattcgagaccaagacaagaagcaccatatcttctaaaattaaacctcatcaattaatatgttgtattacgtgcaactgcatgcatgtgaggcatgctacgatatcatttactttggcataaataaatgaacagatatgtaacgataccatttgcttatagatgaataaacaatagatatcgataattaagatgataatcatttcggaaagacctaaaaagttttacgaaatgatcagattggaatagaactagtttaatttcatattacttcttaatcataaaaaggaaattctaaaagtacttttatatttgggacagatgaagtgagctcaagtacacgtgtggcatcatttatacccgcatagcacaaaatcctcggcgaaccccatgctaaggaacaggcttacaggccaacgtgacatgcatttacactcggtaatagtatgccattcggacatatagtaagtagtaggtcatatcggccacgcttggcatgccacttacggccccgcatttaccttttggcagcccggtaccagtagtccagtagaccagtacacataagatggcaatggaccttggaccgtcgaccatacatcgtattttgaggttttagataataataataatagattaaacctttcaataagcaataagtaatgtctttcttttaagaaaggaaatacagtaatcttttctgaggagccattttagttcgttatcagatagtgtgaacgatcctgaaaaatccatccaaggagatgagatggaaaacataaaaggtctttcagggatgaagggagtgaaattccaatttttcaattgctgacacttgtctcatgtacttaacgctatttttcctccaaagtagcatgcaccttaattaggtctcgttaatggcaccacgacaatcctatcttcctagttggtacccactaaaaagcatttactcctatacaataagatatgcaagaagccatatcatcaacaattttaagccatcagatcatattaatataaaaataacaaccgttagattaagaagctacttattcatccaattcaatcgattatttattagttatccattcacctctttttgcttcatctcatagttatacatagcactgatacatattttgtgcataacaccatgttttccgaatacaatcaaattattgtttaatatgtgattattgtttaatatgtgtattgtgttttattatgcatgataagatagcatacgattattagatattattacccgaatccatttttagataaaacttgagtgaagtagagagatgcaaactgtctaaatacaacaatacccatattgccatgaaaatcatattcatatattataacaatacataatgacacttggaaaaacaaagcatgaattgcattgtgataacataagacatatataaatctacattatcatatattttctatatacatagagttgcatctaaccatttaaaagtatgattttgtttgacgataaaactacaaaaccggtgaaaaatacgcggccaactagtaccaatgaggatcatcaccacctctcaccagtggcatagctaattgtgatctagagcaatgataatccttctatatgtaataagtcaaaacaaaagatgatccatataaaatgtttataatattaggaagtacatctacaatagttctaaactcgaccgaattcttgggcgttctatgggactatacagcgccactagctagcttcatcattggacctccctatgctcctcgccccattacatttcgtgtttattttgtttttttaactccgatgggaaatccatgtgttctcaagctgattaattacctcctcacaacaatttcttttttttcctacaatatcatttctgccttagcctcattgcttttgctagtcagcacctacaactttgattattgttatcttatataaaacctcgcaaactcgtatctcaaaactttaagcagtgtttggttcgaggacaagacataatagattgaagccatttttgtttttaagggataaaatggaatggtccatttttttaaggatgggtgggtatgacctgtatgttaatgagagtgaggcggtgagatggattggtccgtcaaattttattttaggattaacctgtgctgagtcttgagggaatattctctctagtcatcgtctcgtttctaccaaactcaaccaaacaactttaagaatataacagcccctttacatcattcatcttgaacaaaacagtcaaacagtaaggaggtagacgatctctcactcatatgtcagcttagaaaatgaaccagaagtctttggacacaaggcttgcacgaatgactgatggttaattattactactccctccgtttcacaatgtaaatcattctagcatttcccacgttcatattgatgttaatgaatttagacatatatatctatctagattcattaacatctatatgaatatgaaaaatgttagaatgacttacattgtgaaacggaggaagtatatgactttgaggctgcagccagctgtgctgaataaggtacggtctaacgcccataaattgtactccctccatttctttttttttaacgttggttaatttaaaattgaacaaacaaacgtcaaatatttggagaagaaggtaatatatattcatgagaaatttcactaaccatgcgtatatcgacacaaatcatgaaaaccgaaaaatatggcctaagcgtccacctcctgcgtgggtaattgctatcggtaaatgcggtgatcaggctgagctcttttgttgaagttcccaactcacttatctcattttttatatatttttaaactactaaacggtaagtttttttaaataaataaatatatatatatatatataagaaaattgctttaagaaatcatattaatctatttaaaaaaactatgcgctaattagtcgttccgttttgattgcgagagtaattaattcccaataccaagtaaagaacacagcctgagaggtacttcctctgtagaaaaaaaacaaatttagcatggatgtgatatatcctactccctccgttacataatactcataagatattttgagttcggtctgtcaagattaattgtactaggatatgtcacatcaaccaaaaaccctttattatgggacggagggagttgttcaataaatctcgacataggctcctaggatatatcacatctatgcatgtctaggtttttttttttttgggggacagggggagtgctgtttactgccaaagagccaatgagcggaaggctcttttgtacgcatgatgggttgccaacccgcaacagacacaatcgcaatgacacagtcgcgattggaacttggttgtggagtactagtacgtacaacgctgtacacacatgtggtggcacgtacgccgcgtacgtacccctgcgccattttaccagtaccaccaccatgcatatactcctctctactcgcacatgaatcatcaaatcacattgatggcccctatatatggccctgtctgtacaacaacatatatactgttctagtacctaggagtagtatctagcgtagtactccactacgtaaatatatatacgcatgtacggttgcacatgcacgcatacgtacacggtacacggagaccaatgggaaaggagccatgtcgagcgtgtatattagctgctgcagtagtgtacatgtccggggcctgccggacatgccggggcatgcaggagctagctacggatggctagcgcgtaatctcccagacatatgccgtgcgacgccactacatgcacgagacgacgagaacgatagagagagcgtctcgctcccccatcaaatctctcatgtcccgcgacgcggcacacacgggccagagacgtcgtcgtacggggcccgtctcagtaaaagcacgtacgccgatgctacgctacggtgtggatcccccccccccccaaaccggttcaccgccccgccccccacgtagcaaagcatatcgcgtcgcgcgcgcgggaggggatgagatcaaagggtcgcgaaaatttgatgccaaaatatgccctgtctaccgaattgttgatattttgaatagtagtttggctattgtttagtttgctaacaaaatatgtcaataagatacgtaagttgctaaaacatttggcactactaaaatttgcttatcttttagcattgtcaatattctggtatggcaataaaccaaataagcttatcgtttttgtaaagtaggattgtttatagttctacttatatatactccaccgattttgaaataagtttattttcactcatcttatacatagcattaaaaagctaaaaagactaattaaatacccacatttaattaaatctaaatgcaattatttcctagctactttattaatttccaatgccatctactttcatagactttaacacaataatttctagaaaatggacttattttttagataaataggagagacggaaattaaacttattctgagacgatacagtatgaatttgattttctttctgtagcatcatattgatctcattactaaacagttaaatggattatacggaacgattcctctaaacagagtattaaaaagaattccatgcgcgcgtgggcggaaaaaaacattcggcgtacggcagctttgccgctttcgcttgatgctttccctggattaactctgctgctgacctgctgtaggagtatgcgtgagtcgactgagagagagagagttaaatgcacgggtggattatgtatgggcccggtcggtcgtccggtgggggcaaacgccacggatagagctcactgttgacggggcccggttgagtatatgacatgggactgttcgtgatgctttaattatacagtaacttgggagaaattcatggcaagcgtagaacacgtatatatacagtgttgtagcgttgaaaaaaaacgtactgaccgtgcgaacaaaattatgaggagagggccagctgttcaacaatcacctgatatatatagttttttcgattaagatgtatatttttttctcgattaagaaggtttttcaaaccactaaataacgtgttttgtatgatttttttatgtgaagttattttaaaatattgaataaatctatttttaagtttaaaataattaaataattaaacgctaatgattttctcgttttgcatgcgcacttaatcttcattttaaactcagttttgaacaggcctagtcatatatttttgatgttttcgatagataagatcacttcaagaatcatacaaggatattagcctcaatctctcatatctatcaatagcgaataatgtgcctcgttggtgtcggtgaggcctactagccgtcgcctccctccctcactcctcctactcagccgtccttattttattagctcttcttgttcaaatctgactagattcttcgcgttgcatctctatcaatgtctccgttgcaccgaacaacaacacccatcatcctaaccaccaccaacgctatcccgtattcatcctctcttgtcctgcggccgagaggcaccactgctacctcatcaccctgtcacaactaccacctaccattgggctttcacctccgatcctacggcatccctatgaagcctccacctctacccgacactcctccgcttctcgccccaaccgcgataattaacctaatccatgcggatttggccagtaacacggcaccgtcgatataggtgatacttttattattaaattttctgctgacagttttcctccatcccatttacctactggaggttaaagacgattctctgattgtcaaattattagcatccacaggctaggagtggagaaatattagtcacctgattggtagctaaaatggaacgaaatgggtggacattcgcatcacttcaagtgatgcgaggaattgaaagtatgagattcaccacaatggccaatttctttcttcttcaaataattttcaaaggagatgtgaaggttctaatcgtattggaagaaggcctcatgcaagatgtaaaaacacaagagaaaatgaatgctgagccattgtagcaggctgaaatttttacattttggtcctttttgaaaacttattttgcaaatagacccctgaaaaaacttaaaccggaaatggtcctttttggg

SEQ ID NO: 27665 - DNA, 9094 bp, Oryza sativa
ataacaacttggtaggtgggtgcgatatagtataagaacatgagaattgaacatccgagtacaacaacttgacaagtaggcgcgttctagtacaagaacttgataatttagtattttgatgcatcaacttagctaacatatgctaggtgatttttttttcacgatatcaatatgcaattatatagtaatcctacgtatatttataatattggatttaatctttaagaattatacttcacatacaatttacattcaattaacttttaagatttttttttgttttcttcaccttcataataatatttttttacatccagtttaattgatttttatttattagttattaggataaaaataaaaatatgcttatacaaatacacgccaatatattgtcaaaataagtacttaaaaattgaatctataaaaaaatgctccaaataattaagttgccgcataacttcttaatttattgaatcaaaatcatatctaccttgtaagttattacatttatatgatcacttataaagtttttatattaaattatacctatctgccaagttgttgcactagaactttcatttctcaagttctttcaccaaattgcacccatctaccaagttgatgcaccgtcggtgcaatttactgtaaatcatgcttaaagtactttgtgtgataaaacaactcacaaaaaaaacaattgcattaaaaaaatcaacgatgtcatttattaaaaaaccagaggtagtatcaaatatacacttggagactgtcacaatgccattaacaacatgtaaaagagaataatggaaggactaaggaggatattgtaagaccaaattgcaatttgactatctgaatcattatctttttttaaaaaaaagtccactatgccagttgccaccccggaggcaccgagggataagggcttgcatattacacaatcgctggatgactggctccgcaatttcagaaaagctatattgcgagttggtcttttaattacaaccaagttcagaaaactgcttgtgcttgaaaaaacttttctgtaatgacaatgcacagatagctttattcacacgacgcatggaattgaagcttcctctgcaatcaatttcaggtttcaacagaagctcagctgagccaacatgaaagctgggaaatttgaattcagtttcccccagaggctgataatttgggttcaaatttcccctgattaagctccaatcctcctcctttttttttcttttttgtgggtagctccaaatttcttgtcagcacctcagggccaagattttcggtagcagctacaactccaaaatggcttcaaaaccgtcgaaacagtagatataactgctcaaatttatgtgctatgtcagctcatatggccgaccatgatactacatctgtttgatcttcgaatacaccaacaaattacaaccagcagtcgtagcaagtgtttttcttgattgttcagtcatgtttacacactgtttgtacacacttgtctttctgcatgatatgctattgtaactccgactcaatcagtacacaacaagcggaaattttggatgggatctagaaggaaagtaatccgatactggacactaggactcacgactccaccaatacacgaatggtggcttccccccataaatacatggcaggcatgtgcatctcaattcaaacaacaggttgataccacattggtagatttaccatgctgctaaggattatgcgatggttaatttgtttaggcaaatcaatggggaatagcattcaaaattggtggatcagggtaaagaccacccagccaccccttggcaacatatcggtagacagcctccgtgtagtgaatcccgtcccaggacactgatgctgttggattcttgcaagcgaccactccaggcatggcgcaagtagcgcttgcgttccagttatacacgccaccagtgccacagcaagccttgagaactccatcggcaccgaatcctgcagatgtaaatgttcagagataagccactgccttagtaggtcctgtttggggagtttaagattctgagaatttactgattggtagccaacttctgagaatttagagaaactgggtttttcagcttctgggttctagttaatttattttttggattctacaactacagattctcagaatctgggtttctcagaatctgggtgacaatctgaactgtttgggggagctagagattctaagagaagctgcagcagctagaagctcccccaaacagaccctaagactgaccataatcctttcatagttttgattataaaacgtttgtataaattggttgacacttttttattagaaaatgggataaacccagcctctgcatccaatcagatatacacagccaaaatcctggttgatgtatgtaacttaacaaagctagaacacagtatgtaccaaatcggcgaggttcttgggtgactcgaatgatgggttggtagaagtcggcgaagatgatcttggcatgagggtacttgcgcctgagcctgacgagagctgcgcgaagcagcgtgttgtgcctcttggccacgctgttgatggcacgcaggcatccgaggccatcgtagtccgtcctgttggggctcactcgttgcgtgaagtgctggtgcacaccctgttggtgggttccccggcacgaccacataaaccgcgccttggttgatgagactctgtgatgtgcaaattaagctgcagatttagaatgtggcttgacaaatattgctcatttttcttatattcagaagcaactttgccatggtgtgacaaagagatcaaacttttttcttgaaaacataacaaactcaaaccaaagtaaaacttcacggtattacactggagatttgctccaatccagcaaaaaatacctcgaggtaccggtaccctacagtaccaaatcgtttctgatcgttggatctaacaatgcccatcctgctcagctagattcaatgatctcaaacgatttagtaccgtgaggtaccagtacttcgaggtactttttgctggatcggtgcaaatctcattacactgagtgatgggtgtacctccactcccatggtgatttttttcacgactcgaggcatgtatgattcgacctcgtgtttggccttcccagccatccacatgaagttgtagtcgttcactccaaactctccaacgataaatagggacttactgaagcagttcttgaaatctgcagtttgttgaaatcaatttaagcccactgcgaagtagatacaaatactcattggttatatcttctctgaaggccagaatgaattcgattatctaaaaataaagatcaatgctgattattggcgcctatgattcagactactcgccatttgcatcttctttggttgtgttgcaaatcgatggcttgagctcctcgaaccagccaagctgcacatcaagtgaactgttcaaaagcttaaatgccacaatgttgttcctctggaagtagtcgatgccagtcgccggcgcgccaccgacggcgaagtttacgccatgggagacacttgagctattcgctagggaggctggaaggaaagggagaccaaattcctcggctagaaagcacaacaaagaaaagttagtactgctgagttgtaccatgtaatatgtaagtaaattgctctcatcgtcctcgtcaacttaatactagtacctccgtcccaaaatataacaatttttggctatgaatctggacacatagttgtccagattcataattaacaatgcttatattttgagacagagggaataccttcgttttgtaatatatggtgtcgttgactttttgataaatgtttaaccattcgtattattcaaaatttttgtgtacatataagaaaatttaagtcatgcttaaagaatatttgacgataaatcaagtcataataaaataaatgatagttatatttttttaataagatgactgatcaaacgtatcaaacaaaataaaaaacatcatatattaaaaaacggagggaataatattttggacgaactggttagtacgtgcaactcaatggtgcacataattaacgagcatgcaagttcacaatagaattctgaattctcctggtataatttgctagaagtatttctaggagttaacttgaaagaattgtttgtgtagcaccctgaatctttgaacgttactcaagaaagcgttttaagccccaaaggacatacatcttcgtgtgcatgtggcccaaatagctattaaaaaatatgaaaaaaaatatacagattatgatgtcacatattgattcacaaacatgctactccaaattaattagatactgggagtagaaaaaataacaattcaaaccacaaaaggtgtgtgtgatcgtgttcacagttattttctttcagtgtacatatattgaatttaatcttgcgtgtttgttcatagatgtataatacaacaaccatgcttcaattcttttttccatatattttacataattgagtgggccacatgcacgaaacaagggcataaatactcaacttaccaatgaaatcgataatgactcttccatcacttacgcggccagtgggatgaccaaagaatgacatgccgtaaggaggcttgtcattccatacgggcgctaccggagttgccatgatgacgaaattaccggtgtcgatgtacgagtctccaagagaaaacatcgagatgaaaaaatgcgaggtagagctcatatgggagagacagaagatgaaggcaatggagaatacaagcttgagctccatgatgctacttgctagaaaaaatttgaggagagaacaccagagacacatgagaagttgaggggtttgcaagccacttataatcacatggagatgatcatatgctttataaaagtaacactgtttaagacttgagaagtagtaatacacgttgtttaagtgatcaagtcttcaggtacgatttgacaaccgaggtgatccttcttattggtcaatccagaatattgcaaccaagctggaaaatatcaaagaccataaaggttataattgcaggacgaaagaattgtgatgttacaaaaatgcaagttgagtcaatatttgggtaaagatccacttgaccaacccagagacgctgtgagatgatcacggcttcaccgttacagatgtgttggctccgcttgttattgacgccgtttcagaaaagctgcgttggtctgaattacagacaatcttcagaaaactgcttgattgattaatggtagcttgaaagaaattttctttggtaatgacatagtaccgagcgtcctggaatctcaagccatcaattatgggatcctagcacacgccgccagctgtgccaatccccacgggcctttttgttttttgttcacattttttttcccgatcttttttcttttcttttttttttgctgtttctttccattttttttcaatctttcgcactcctctttacaaaatataaaattgaaaattttttattttcacttgaaagttttcaaatattgacttgaaagttttcaaattttgtgttgaaagttttcaaattttgagttgaaagttttttaatttgacttgaaagttttcaaatataggttgaaagttttaaatttgaattgaaagtttttcaaatttgagatgaaaacttgaaagttttcaaaatttgacttcaaaaaatttaaatttcgagttgaaagtttttaattttgtgttgaaagttttcaaattttgagttgaaagttttaaaattttgagttgaaagtttttaaatttgagttgaaagttatcaagtttgacttgaaagttttcaaatctaggttgaaaatttaaaatttgagttgaaggttttcaaatttgagattaaaagttgaaagttttcaaattttgacttcaaaaaatttaaattttgagttaaaagttttcaaatctgagctgagttggaagtcttaaactatatttgaacaaaatatggttgaacgcggcgaaaagaaaaaatcggtactaattactcccagagctaatcttgttttctaatatggcgtaattaaaaagcgaaagatcaaattaatcacatcgataatgacgttttctaatagggatatacgccataattaccagaagaaaaatcaaaactaatcatggtactagtcacgtttttttctcagactccggttttgaccactgcgctaacgacacgtgtaccaggtggacgtatgcgcgagttcgacatctggcgcgtatgcgctaattagttctttcctcaattattgaaaaccacatcttgttcacatgaaagagttgaaaattttgaaaagactggtagactcaggtcctcaatactgtctcactgtagtctactagtactccctctgtccaaaaaaaaaaacaaaccctggtttccgtgctcaacgtttgaccgtctgtcttatttgaaaaaaatattaaaaaaatttaaaaagacaagtcacgcataaaatattaatcatgttttatcatctaacaacaataaaaatatgaattataaaaaaatttcatataagacggacagtcaaaattggacacggaaactcaaggtttgcctttttttgggacggagggagtagtagtctactgcatgacttggattgtcaggtgagccaacccaaagatgagagttttaggaagctgggcaatttgaattgaggcttccccagacctccaaaaatcttatcctcagggctatgatttacgaagcagctagatatcatttatattactacctccgtcccaaaataagtgcagccgtaggaaccgtgtccgacgtttgaccgttcgtcttatttaaaaaatttatgaaatttttttaaaaaaatagtcacacataaagtactatttatgttttatcatctaataacaataaaaatataaatcataaaaaaattttaaataagacgaatggtcaaaagttgaacatgaacagtgcaaaactgtacttattttgagacggagggagtactatgaaagagagtagtggtgccaccacaacttttgcactattttttaaaaaaattagtccgtgataaaaaaaaatcgcagaacatatagctgctcaaatttccatgctgactggcatgatcaactttttttttggattgctattgtacgtaattccctcatcaatcaactaatactcattggtactataagggcgctggcaaggaggtacccctagcatttcctttcccttttcttttcaaagaggggtcagtactgtcgaagttattacaaaggtaacttatacgatgatatactttactgtttgcttgggccgaatttgggtcataaccacattcgtcaaaatatggttttttttttatagaaactttggcgtcaacccatcggttttctggtttttctaattttttctttgacagcatctgaaagatttaccctttgatttaccagaagtagaggcggtgtgaatttgttttaggtgtactccgatccaggtccagcccaaaacggcccacggagctctggtctccctctgaggcacggcttcgttcatcccaggcgtcactacgccaccaacctgcctgccgctgtcttgcccgcagccggagacaacaacatccgccatagaagcggttgcctccatgaagcgtccacggacagcctgccggagctagctcattttaaaacgaaatattaataaaaaaaattcaaacaataatgtccaactacagattgattgtacacactgatataggccgtgtttagttcctcctccaaattttttttaacgtatacggataatattttaagtattaaacgtagactaataacaaaacaaattacagattccacctgtaaaccgcgagacgaatttattaaggctaattaatccgccattaacaaatatttactgtagcaccacattgtcaaatcatggcgtattaggctcaaaagattcgtctcgcaatttacatgcaaactgtgcaactggttttttttcgtccacattaatactctatgcatgtgtccaaacatttgatgtgacggaatttttgaaagttcgaagggaactaatcacagccatagattacatttaccatgctgctaggattaatcatgtcatggtttttgctctcaacaaatcagtgatggtggtggatagcagtcaaaattgggggatcagcataaggaccatagagccaccccttggcaacgaaccggttgatggcctccgtgtagtgaatcccatcccaggatatcgaggccgatggatccttgcaagcgaccactccaggtaaggcgcacgcggagctgacgttgaagttgtaggtgccaccggtgccgcagcaagccttgagaaggccgtcgcttgcgaaccctgaataattaatattgcaaatgttgagacaaattaaactccggtcactatctcagtgatgcacaccgtagaattgtcatcgtgtttgagaacgaaagcacaaacaattcctataatctttgccaatttcgatgggtaaactatttgtactccctccatcccataatataagggattttgagtttttgtttgtactgtttgatcactcgtcttattaaaaatattggaattattatttatttttttgacttactttattatccaaagtactttaagcacaacttttcgttttttatatttgcacaaatttttttgaataaaacgagtggtcaaacagtgcaagccaaaaactcaaaatcctttatattatgggacggagggagtatatcttatgcatgattgcgtacaaaaaatatatatactacatatgtttcgtattataagtcattttgactttttcttaactaaccttttttgagttgagcaatatttttaacataagacacatattattaaaacatatttaatgttacgtttaataaaactcaatttgtattatagatattaaatttttctataaacttgatcatacttgaagagatttgagtaaaaaaaatcaaaacgacctataatataaaacagaggtaatatattgtatgaactagttggtgcatattactttcaag

SEQ ID NO: 27666 - DNA, 797 bp, Oryza sativa
ccacgtgggcgattcaatctgcctcaagcctccgggcgcaatactcccggtcccatatcaccgacagtagcccccggcgttatgtcagggcgatcatccttctcaagggaagcggtcgggcatgacgccactcataaagcctggtgacaggtgggaccggtctccgtgattgggcagaaacccaacggtctcaaaccacgcatatcggtaacggtgtcttggccgtcagtcatgggcggtctctccaagactgccacatcacttgagcagcgctcgaatctgggcgtgcagattcgtttcatctggagacatggtaacgtcgcttcggtcggcgagcgtaattaacgcgcacacgatacgatctatctcgactgccacaaccgcatatccacctcatgcgccgcaagcgggcgaatggaattagtggaagcgtgggcgcgagaaacgagggagcgagatagcgagtaacgagggagcgagatagtgggcacgagaaacgaggagccgggctcagcgatggcaagggtataaagctatcgaggaaaggacttgctcccttcctttcgccactattcccctttccttcgccgtttgcgccctaaactctctctttgctgtgcctcaccttcgccacacacactcgttctcaaccctctctttctccaacgacatggcacggggctccgctctgctcgacggtagcgtactaccgccttcccgcattgtgagcgagaggcaggctgggctgccgcgccgcttcatgccggaatccgccaccggccgggagatagtgatgc

SEQ ID NO: 27667 - DNA, 8792 bp, Oryza sativa
gcgtagatttgtttgcctgtgctttgtgaaaagttgttgtggtgtgggaatcgtaaccagaatcagcctatgtggcagatggacgacctgagtggtcagaaacgaatctgtgtgattcgggatgtctgcgggcatcatagactaggcttcccgagtggaagcggattgttgtgctgctgggtagctggactctgggagtccgagaaaatgaaaaaggctctgggagccgattaatcaagtggaatggctctgggagccgagaagtaatgatctaacccgggaggtcggtgcattgccaaatgagctattgaaaaacatctcttaaagtcgaatcgagacgcaagtctcttttcggcccaaacttagaaagaaataaatcacttagtgatttcaaaatgtcttcaaataaaagatttgcaaaacaaccttgcctctcttccaagcttgcattaaacacctaagttcccgtgacttgctgagtacgaaagtactcacccttgctctatataaatatatatatatagttcctccgccctgaagagaagataaagtgaagtgaagattagggtttcgtcctagttcccagccgtcgcctgtggtgttgggtattagaccgttggttccgctgctgctgttgttggtgttcgcctcgtccgtgtcgtcggttgtattctcgggctgtctgagctgcaacctaagttaagataaataagtcctctatttattttaaagattgctatgattcatatttgtcaccgtgggtaccagcactatgtcctgggactggtaccgagatcgcggtttcgtagaaagcggttcgcgccgttttccctacgacacgctcctgtcaggtgccgttgtacggtggtatcagattggggtgtgacaaacatcgactacaatccgctggtttccaccgtggtaggtcgatctgatccaatctccttgagtgatttgtactctcagatggttagctacgacaaccggatggatcatcttcaaggaggcggacaaatccaatcttctgccaacgccgcctcacgcggacgtggcaacggcaacagcaacaacttccgcgatcgtggtggcggcggcaatgcaggccgtggccgtggcaatggcggacgcggtggaggtccacaaggaccacgtccggtctgtcaacggtgtggcaaaactggccatacggtgctcaagtgctggtataggtttgatcaaacctatcaccccgaagagaaggttgcagcagtagcgacgaattccgcctacggcatagataccaactggtatgtcgactgcggtgccaccgaccacatcactggggagcttgacaagctctctgttcgtgagaagtataatcgacatgagcaagtccatgcagccaacggcagaggtatgaacattagtcatatcgatcattcagtaatttcgctgcgagaacacagggacggaagaaacaatacggacccacgaggtagtcagaagggaatggggccccaggagatcgagagactggtccaacgggtgctaaatctcaactccgtggatgcgtctctcatcccccacggtatcctccccctctgcagctacccagatcgcgcctccatcttaaccattatcacagcggtcggggcctcagaggagcaggctcctaagggctatgacagcgcaggtgggagccgccggggggatcaatctacccccggagggggtcgtgcttatgggccccgcgtcgggggctcggggagcaaccgccctaccgacgcccgggggaagaggaaaatgggaggaacacctcccccatctcctccccgagggggcggggcggtgcgtgccagcagcaggcgcccggagggggccgcgccaacctcgcagcccgagggggagcgcaaaaagaagcggctgcgcaagatgggggagacagaaccatcccggggaaacctaattttccctccaaggtggtcatttaaccgaccccctcgcaggttcgtcccacgctcattgcgaccgtcttttcttctattccaaaagcaagttttttcttacccatcctgtttgccttctggtttttctttctgcttcagtgatgtcccgtcacgttcctcccgccatcccaagtccggccaatccgaggccgaagatccggcggccgcagaggaacggaggcgagaatctgaccggcgagaggccgcagatcgccttcgggaagctgaagaggccgcccgggaaaccgcccgggctcgccaggctgaggataccgctcgggaggaggccgcccgggcccgccaagccgaggaagccgctcgggaggaggccgcccgggcccgccaagccgaggaagctgctcgggaggaggccgcccgggcccgccaaactgaggcgatggcgtctttcgaggcagcccacgacaaagctgctggcgcgtcgcttgggcctactccctcgggcgacgctcaggcgacagcctccggggcggctcgcgacgaggccgcgggcggatcgcctgggcccgctccctcgggcgactcccaggaccaaacgggtccgggggacatccccgagctcagtgcgtcttctggcgggccgagccgcgtcgcattttctccaaggcggctcttctcctcgtcttctgccgccccgctgagtgccgagccccttctgcaagccttggccgccgcaaacaccgcggtgctagatggatttagcgcccaggtggaggccttgcgagcggaacgagcggagctcgaggccgcatgggcgcgcgtcgaggaggggcggcgctcggtggacgccatggtggaggtgggccgtaaggctcaccgccgccacatctcggagcttgaagcccgcaaggcggcgctggcggagatcgcccgagaggtggaggaggagcgagaggccgccctcatcgccaccaccgcgatgattgaggcgcaggactccctccgccttcaacacgggagctgggaggcggagctaaagaaaaagctcgacgccgcccagggggtccttgacgccgccgctgcccgagagcagcgagcaacggaggctgaagcggcgtcccggcggcgcgaagaggcccttgaagcccgtgccatggcgctggaagatcatgccggcgccgtggagaccagcttggcggaccgcgaggccgccgccgctatccgggaggcgacgctggcggcgcacgaggccgcctgcgccgaagaggagtccgcgctccggctccgcgaggacgcgcttgctgagcgggagcgagctctcgaggagtccgaggccgcgacacaacggctggcggacagcctgtccctccgcgaggcagcgcaggaggagcaggcgcgccgcaatctggaatgcgtccgcgccgagagagccacgctggagcagcgggctgctaacctcgaggcgcgagaaaaggagctggacgcgagggagcgcagcggcggggcggctacgggcgaaagcgacttagtcgcccgcctcgcagctgccgaacacaccgtcgcggacatgcagcgcgccctggactcatccaccggggaagccaaggccctccgcttgtcgggtgagatagggcccggcatgctttgggatgcagtctcccggctggatcgcgccggtcgggaagcgggcctctggaaaggccagacaatttcgcgctccaccaatctggaaggcctcgccccgcaccttaggaggatggcctgggctgtccaacaactccccgaggagctcgagaagaccatcaagtcatcctcgagggacctcgcccaaggagcggtggaactcgtgttagcgagttaccaggccagggaccccggcttctccccatggatggcgctggaggagttccctcccgggaccgaggacgatgcgcgcgcgcgggtccgggatgccgccaaccacatcgtccaaagcttcgaggggtcggcccctcggctcgcgttcgcccccagctccgacgaggagggcgacgccagcggtgaggacgacggtggcgacgaggccggcgacccgggcgcattgggatgagcccccaggcccccgccaatctccaattttttctttttctttcttctttttgtatagatcaacttaatctgcaatcaaaaatgatgaaaaatttctatgttaactttattttgctatgcatatgagttgaggatgatttgtgccgtggtccttttgcattttagcttgatttaagggctcgtgctcaagtcccgatcctcaaatggctcgggtcggggctagtgcctggggagatccacatgtcgagactggccaggccgggaacatggtgaccgagggttatgggtgacccgattgtgggtttttgccgattcccccccggagttcaccacgccccggggcacggctcggttctgggccccgcttggcgattttagctgaccgaaccgagcccccgagggcaaggttgagcacgagtgaccttatttcaagttaagattcttcagaaggaaaaacggcacagacacaacctttaggaaattgaaactgcttttattgaaatgctgaaataagaaaagtaaggctgtgcatgtgtggtagcccccggctaaccctgcacacccgaggggggtgcggggttagcccgagcccgaaacctgacacccgacccccccccctcaggggtagaagcgacgaaggtgttcgatgttccacgggtttggcagctcagtgccgtcgcccgtggccagccgtacggagcccggccgggggacgccgatcactcgatacggaccctcccacattggtgagagcttgctcagtccagcacgcgtttggacgcggcgtaagacgaggtcgtcgacgcagagtgatcgggcccggacgtggcgctgatggtagcgccgcaggctctgctggtagcgcgcggctcggagggccgcgcgccgccttcgctctttcaagtagtcgaggtcatctctacgaagctgatcttgatcagcctcgcagtacatggtggcccgaggagacctcagggtgagctcggatgggagaaccgcttctgcgccgtagacgaggaagaaaggcgtttccccggtcgctcggcttggtgtggttcggtttgcccagagcaccgctggcaactcctcgatccatgaatcgccgtgcttcttgagaatattgaaggtcttggttttaaggcctttgaggatttctgcattggcgcgctccacttggccattgcttctggggtgggcaggtgaggcgaagcagagcttgatgcccatgtcttcgcagtagtcgccgaagagttcactagtgaattgggtgccattatccgtaataatacggttaggcactccaaaacgggccgtgatgcccttaatgaatttaagagcagagtgcttatcgatcttgacaaccggataagcctcgggccacttagtgaacttgtcgatcgcaacatacagatactcaaacccgcccggggcccgtttgaacggtcccaggatatcaagcccccagacagcaaatggccatgacagtggtatgatctgcagggcctgggccggctgatggatttgcttggcgtggaactgacacgctctgcatcgccggaccagatcgactgcatcattgagagctgtcggccaataaaatccttgacgaaaggccttgccaaccagggtgcgcgaggcggaatgggctccgcactcgccctcatggatgtcagcaagaagctcaacgccttgttcctgaggaatgcacttcaggaggattccgttagccgcgcgccgatagagggtcccttctaccagcacatagcgtttggaaatgcgttgtacgcgttcactcccttcgcggtcctcaggtagagtcttatctgtgaggtatgtttggatctcagagatccaagcaatcaatctaagggagcttggagcgctcccttcgggtcccgaggcctggactccgacgggcctcgggggccggtcaggcgcatccgtctcccctaaggggtcgggtcgcgccgacggctgggtaagcctttcttcaaaggcgcccggtggggtctgggctcgcgaggacgcgagccgtgagagttcgtcggctatcatgttatcccgtctgggcacatgccgaagctctatcccgtcaaaatggcgctccatacgccgcacttggcgtacataggcgtccatttgcgggtcagagcaccggtactccttacagacctggttaacgaccagctgggaatcgcctaacaccaggagacggcgaatccccagtccggctgccaccctgagtccggcaaggagtccctcgtactctgccatattattggtcgctcgaaagtcgaggcggaccagatatctaaggacgtctccggtcggggaggtcaacgtgacccccgcaccggcaccctggagggacagagaaccatcgaactgcattacccagtgggtggtgtgaggcagctgcgaggggttcgtgctggcctcggggattgagacggtctctggagccggggtccactctgccacaaaatcggcgagggcctggctcttgatagcgtggcgtggttcaaagtgcagatcgaattcagaaagctcgattgcccattttaccacccgtcctgtaccctctcgattatgcaagatttgatcgagggggtaagacgtaaccacagtgaccctatgtgcctgaaaataatggcgcagtttcctcgaggccatcagaatagcgtaaagcatcttctgggcctgagggtatcgggtcttagcgtcccggagggcctcactaacaaagtagacaggccgctgcacccttcggtggggccgatcctctctgctaggggccgtatccccggggcgttcttcgttcaagtggcctttcggggcgcacttgtcttctgtgccgatgacctcggggtcggaggatgaaaggggcggccttccctcagtggcctcggggccgtcctgggggtcgggggctcctggcatcgtcggacaagcgggcaaagggccaactccggtcgtcaggggcctctggcctccgttcggctcgggggcctcttctccctgctctttcccgggtcgagtcagcacagggttagcctcggggtcaaagggcgttaagtgcggccttcccgcagtggccttggggccctcctgagggtcgggggcacctagcaccgtctgacaagcgggcagagggccggctccggtcgtcaggggccgtaggccaccgtccgactcgggggcctctcctccccgctcgctcccgggccaagttagcacagaatgggggtgcacgaaatgaggattgtcttcatcgcgctccacaaccaacgctgcactaactacttggggggtcgccgctaagtaaagtagcaggggctcatttggctccggggcgactagaaccgggggagagctgagatatgcctttaactgagtgagggcatgttcagcttcctccgtccaagtaaacggccccgagcgcttgaggagcttaaacaagggtagcgccttctctcccagccttgatatgaaacgacttagggcggccatgcaaccggtgacgcattgcacatccctaagtttgctgggggggcgcatccgctcgatagctcgaatcttctcggggttggcctcaatgcctcgggcagagaccaagaacccgagaagcttgcccgcaggtacaccaaacacacacttatcggggttcagctttatgcgggcggagcggaggttctcaaaagtttccactagatctgaaagtaaagtttcttggttgcgcgtttttacaaccaagtcatcgacataagcctcaacattacgtcctatttggctacccaaagaaattcgagtagtacgttgaaaagtaggacctgcattctttaacccgaagggcattgatgtataacaataggttcctacgggggtaatgaacgcagttttctcctcatcctccctagccatgcgaatctgatggtaaccagagtatgcatctagaaaacacaaaaggtcgcaccccgcagtggagtcgacgatctgatctatgcgaggcagggggtaaggatccttaggacatgccttgttaaggtcggtgtagtcgatgcacatccgaagcttgccgttcgccttgggaacgaccaccgggttcgccagccactccggatggatgacttcacggatgaatccggcctccagaagtctcgccacctcctcgcggatgaaggcttgacgttccggggcctgccgccgtacattctgccggaccggccttgcgcccggccgcacggcgagacggtgctcaatcacctccctggggaccccgggcatgtccgctggtctccatgcgaagacgtcagcgtttgcccgcaggaaggagacgagcgcgtcttcctatttgccatccagaagaccaccgatccgtgtggtcttggatgggccgtcgcccaaggcaacctccttgaccgggacctcgtcgcatgtggcaatccgctgcctcggggcggtgggggcggaggtgccaagcctctcgtcaccaccctcgggcttggtcgcagcagcgaggtggtccgcgcgctgctccatgcaagcgagcgcgactttaaggtcgccacggacagagatggggccaccggggcccgacatcttcatctggaggtaggcgtagtggaccgccgccataaacttcaccaacgcgggcctccccaggaccgcgttgtagggcagactgaggtccgccacatcgaagttcacccgctccgtgcggaagttggctgatccaccaaaggtgaccggtaggtcgatgtg

SEQ ID NO: 27668 - DNA, 2875 bp, Oryza sativa
aaactccggcgagaaacgtgagcacacgctcccccgtcgacagtggcaatggtggccccaggttcttggaaacctaggtcatcatcaccgtcatcgatgtcaacggcgggggccttctgtttggcctcacttcgccgtttaccggagggaactgccgcggacttgccctcacggcgttcctgcctcctgtcctcctcccacttcctcgttcgctcagccaagtttttgactgcgcgacagtccgcgagatcgtggagggaggtgttgtggacggagcaccacttgctggctgggcgctccctgctgggagtaccagcctctttctttttgtcgctcgcaggcctcccctttcgggtggcccgcggagcgccctcgacggcgaggacgtgaccctcgtcgccggaatggaccgaccttttcttcctcctcctgtcacgccaccctgtctgagcggcggatccgggggcggccgaagctgccacaccggaaccggaggggttccaggtccaggcctcctccttacgagccactcggtccgcgagctgaaaaagttctgcggtagtctggggctctttggaggcaatcttttcgaacatgcggttgtgccgcacaccccccctgaacgcgtagatcaccgcgtgtgcagggatgcaaggtatagtattgcggacttggcagaaacgctgaatgtacgagcgaagggattcatcatcccctcgctgtactgcgtgcaagtccgcttcttcacctgggcgtggataggtgccttgaaagttcatggtgaactgctggcacagatcctcccaggagtggaccgacgcgggtggcaggttcattagccaaccccgcgcctgtcccttcagggccatgggaaagaaattcgccatgaccctgtcgtctcccccagcggcctcgatcccggtcgtatagacctggagaaactcggtggggttgacgctcccatcatacttctcggtgatggtgggccggaaccttgggggccaacggacattccgaagactcgccacaaaggctctacagccaacaccaccaaccgggggcacggagggctggtcctcacgtccatgtcgaggtgacaccctggacgaagaggcaccctccgttgcgcggggagcacgccgatcactacgtcggcgctcgatgtcgaggcgggcatccggctcttcatgctgatcctcccgagtcggaggcgccgacgagggagtggtagccgaatggcgtgcagcagccgccgctcgccgcgccctccgccttgatgacacagagccggtggtggcggcgccggaggtcctggtggtggcggaccgtccaccagcacccaggcgctgctgtgccgtcatgaccaagttggccacgtcgtccagccatcgctgggccggagactccgggtcagggacgatgggcgggtgacgtaggagcgcgccaacagcccgaagtgcgccttgaggcgtgctgccgtcgccgtagacgaggaggcgacgctccccatctcgccgttcttctgcaccacccgcgactggcgatgctgcggatttttcgaccctctcgagcgcctccccctgcttaggattttgttgtggaggaggtgggggcgtacgagctcgacggcgtgggtttggctccccgtcgtcgccgctcacactcggagagaggtcgtgcgcctttgcttgctcggccattaggctgaacaagggaaacttggcgcacacggaagagtatgagagctcagaaaacacacgctgagccccctacctggcgcgccagatgacggagctcgtggctcctcaccgggagaccgcgcaggcccccctttgccagttcggccgggggcttagggtgagatctcaagctctctctgtatgtggaaagatcgcgtgccaggaagaaacgcgagacacggacgatgtatacaggttcgggccgctgggaagcgtaataccctactcctgtgtttttggtggatctgtgtaagagcaagttacaaaatatcaaccagccctctcctctcccgggaaaatccagtcccctctctttgtgggcatggtcctccttttatatcttaaggggataccacatgtacccttttctttccaaactggacttttcttctctttatggacggagattggtatggttgccgtccgaatgacacttcgatgggacagcccacacctacctccactcccggcggagacaggcgcaacgtgggatcgtggctgtctgttgctgacgcgaccagtgtcagaccggtcacagatcggtcattcttgtcctctatgcgtcagttcagcgatctgcatgatcacccttctttttgtagcatcttgcctgtaatggttgggatgaagcctggtattcatctaaccagggctaacgtgccatctctaagaggtaacacgctagctccggctggagacgtgtgcctagaggctctcgtcttgacggaacggggcgaggcgtgcgtcagaccgccagtcgccacctaaccgttgatctgaccggtctgtgactggtcacagaccggataaaagagcgcgctgcattgcgctgcatgcagcgtgacacgcttgaccagaccgcaataaatgcggttatgtgagccctaccgtgttcacccaacctatgtacatagtgcataccccacaaggggtcggggcacctcgggcctcggggccggggcaggggcaacccgacccccccctcggggaaatcaggaggagggcggacacctcaccctcgggcccgacgtccccgaaggtgccaggccacgtgggcgattcaatctgcctcaagcctccgggcgcaatactcccggtcccatatcaccgacaatatatatatgtctatatatatg

SEQ ID NO: 27669 - DNA, 2579 bp, Oryza sativa
  unsure (1)..(2579): unsure at all n locations
cccatatccccggcaatatatatatgtatatatatatgtatatatatatgtatatatatatatgtatatatatatatatgtatatatatatgtatatatatatatatgtatatatatatatgtatatatatatatatatatatatatatatatatgtatatatatatatatgtatatatatatatatatatgtatatatatgttacttcgcatttatcctaatacatttttttgtatcttgcagaaaagacgtgttgtcggagtcgtccgtcaagcctgagtggaagagctagccctagaaggaattggagcaggcaagtgacgtaataatataaatgattgttatatttgtaatgcaattaattaagattattagacctgtaattagacttatcatataagattgtgtagtgttctaatattatttgagttttaatataagattattttattgcaaattagacttagtatgacattattgactacggaattggtgcgactcctagcaattgactattgtagtcttaattagacttagcatatacgcacgaaacacttagcatacattactattttagtcttagcatgtaatattatttgagttttaatataatattactttatttgtaattagacttggtatgtaattattgactacggaattggtgcgacaagtagcaattgactattgtagtcttaattagacttagcatatacgcacgaaacacttagcatatacatgactattttagtcttagcatgtaatattatttgagttttaatataagattattttatttgtaattagacttagtatataattatttactagctagggttgtataatatacgtcacctagacttagcttatatcacgatttgtaattagacttagcacgtaaggttgtgtagggttctaatgtacgacatttacacttagcatacatgacttagattgttaaaacataaatgtctcgtgacttagcagatgtttcttgtatcaacagatggctgaccgcgatgaggaacagatattgtacgatacaatcgcggagggaagcagccagtactggaatgaagaagaggggaacgaggatccaaaccagtacttgaacgaggaagggaacgtggagagggatgcggaggggaaccagcaggggcacgtggaaagggatgtggaggggaaccaggaggaggaggctagtggtagtcaaccctccgttggacagaagagggcacgcgggcaacgaggtgcagcgaagaagcttgagggtcggcacatcataacggaagtggaagaagatggacgtcctagtgccccggccgaagccgccaagaactatgtacgtcacagcggttgggttgtgcgggataacgtgcctgtcagtacggtgtactggcgaagaacaagggcacgcggagatcatgagagctttgtcctagattcggagaaagagatgctgtggaccacaatgctcgagacattcacccttcctgcgggtacagaggacaaagtgaaaaggtggactctgaagaaaatggcagaacagtttcagagcttcaagggagatctgtaccagaagtatatactgaaggggcagacaccgaacttcgacacattcccaaagctaagggatcactgggacgagttcgttgcatataagataggtgaacaagggcaggcgatgatggaaaggaacaaagaaaatgccgccaagaagaagtaccatcaccacttgnngtcaggaggctatagcgtcgcgatgccgaagtgggagcagatggaggctagcatgattgaaagggtgtcgaaccggcaacagccaattggccggaacgatcgaagttctggtactatgctcacggggaacgctcaacccagctgatggctcactggtcttcngctatcagatacaagaggctgcgcgacaactaacagatgcagtggaagcctcctctcaggcacgttccgaccagacagaaatagggacgagctgacactcgccctgcagactccagagcatccaggacgaactcgagggaaaggggtgattctttggaagattggtttcaaggaggacatccacacgtacaggagtcggatgaggagcaagagagataccgaggcgaagattgcagacctagagttccgggtatcgagctacgaactcaacatgcaagaggaggtggcaaggaaggttgatgaacgcatggccgcacatcggtcccatgatccccagccgaccattcctcctgcaatggtgagcccgtcaggaaaccgtagcagctgcgcctcaacggggcaggtaggatcacagagcatggacgccatacaaacacaggacgaatcgacatgtcccgttgatgacatcactcagcggacaccatgtgagctgcatattcctttcaagaacttatcaataaaggtaagatttagccattccgctagttgctgcttatatatgttgattactaataaataatctctcacaacatgaaggtggcgtcgggcatggccatcccaacggacccttcaggtacttaccactgcaggccgattccagcaggatactccaagg

SEQ ID NO: 27670 - DNA, 13637 bp, Oryza sativa
caggtcccagcatcgactcctcctcaggatctgcaccgactcctcctcgtggctcctacacctactcccccgcaagctcctcttccggcaccttcaaagtcaagggcccccccagctccaccgcttgcccacacaagggcaacaaagaaggcgaaagttgacgccgccaagaacaaggacccggggtacgattgcacgcaagaggagcttgacgcttacgttgcatcagaagtcaagagacaattcaagcctcgaagtccagaaaagaagattcctatagaccccagtgtcaggaacttcttcaggggtatgtctgcatctgtcaaggaggccatcaagctatcggactatgagcgaacgctgaagaaagcatcttctggaaagtccaaaccagtccctcagcttggagagcaaccaaaccaggagatcgagccgttggtgaccggtaaagaaatgacgatagaacaatttattactgacaccggtctaactacggatcaattgctagaagtcgcaccaatcgaaaaggcggaagtgaaatacatgtacgaattcggtaaaccgcttgtcaagcctgagttgctgcagtccctacccacacaaatgtacaagttccatcagctgtacatggagatgagcgcccccggtagagagatgatcggagcgaggatcagggacacggacttcttgcaaggagatgacattctctggatcaatttcaggggaatctacgaactataccagctggacgccctcgacgtctctattatgagttgctggattttgtaagtatatcgttcagttagatttcttactatacgtctcctttaattaattaggtccttgtatataagtagaccatagaaaataatatactcccttttatcgttgtagaatggagattcaaagggcccgacggcggagggttttcgatactggattcatcgaccctcggaaagtaaacgtcgcaatgctcgaccaatatccacaagaaacagaggacaatctcgtccatctcctgaaggcgcagcattacaagacgttcatactgttgccatacaacacagagttagtttaattttactgtcttcctacataccaaatttcattcccgtacgaacttgctaagtgtttcatatgtaatgcatcccacgcacattgcagattccactgggtgcttttactcatcgacctggaggcctgcaccgtcaacgtatatgactcaatggataaaaaagagtctacgtttgacaaggttttcgaacttatagacaggtaccgtcataagttcctttgttaattaagaaaatcttgttatgttaattgctactatgaatcatagctttaaactccatgtagggcttggtatcggttccgtcatttggtccgcggcaaatggagagaaagacttaggcggaagttcaaatttcctgtgagtacacatgctctacatttatatttctccgattcaaatacatacaagtgtatattaattagatctctcgttgtttgtcatttatttgtagtgcgcaaagcaaaagcaaggaactaacttgtgcggctattacgtgtgcgagtattgccactgccttgcagaccaaatcatcaccacaagagagctcgatgtacgtacaaataaattcaaaatttcattacgtagcgatttcttgtttaattactaatcaatttcatacattcatgtagtttattcgcatgagggataacctaaccacacacaaggaatttatcgcggcggttcaagaacaactcatgggattcatcaacgaagaaatccttgatcccaagggtgaattctactacgacggaaacacaattcaccggtccttagcttctgagctagcagcgagtactactacgtcgaaatcgtagctagctaggacatataatggattgtaattaatacatgactacatatgtttctatatgcatgtgtacacattttctataatgtaaatatattttgttcatatatatatctatatacatatgcatttgcataacatatatatgtataaatacatatatattatgcatgtatatacatataatataatataatataatatatatatacatatatatatatgtatgcatatatatgtattgaaacatatatatgcatggtttatatatatatatatatatatatatatatatatatatatatataaaccatgcagcaacaggggcatgcaaaaaaaaaaggtcagctcgatctttagtcccggttggtgttaccaaccgggactaaagatcgatctttactcccggttatttcacccgggactaaagatagcgatctttagtcccggattggtactcccggtttggaaaccgggactaaaggggggttacgaaccgggactacaaagggtttctccaccagtgataagtaattaattaaccagcaaatgggttggtgtagcattgaatttccgttgcaacgtcttaatccaaccaatggcgataaatatatatatataagagacttcatgtgaaattgggacagaatcaacttcaattccatccaatttcttccagctgtctgatgaagatcagaagacatgatctcctggggattggacgcatcaggaactcgagccgaaacatggattaaaccaccctaagggacaaccaacgggagtgggtaagccaagctacagctcgtcggagcagcaggtcacccggacacggcgacggctaggatccgacgcaattaggacgccatagatgcgcatctcaccgacatggcactcgtgtgtttttttctcatcgcctatgctcaactcaaccagttctgataataccgtaacgagcttagcatgataggctcgctgatgggatgaagagaaatgggaacaattggctcgtttttgccttgggttagcttttggatgtgcggaaacaagctgaggcaactaattaatggactagaatatagcttgtctcgccttctttgccacggcctatacgacctgctttccgtcattccttgtatgacaaatatcaaagctaaagaatcagttaccgatgccgatattgctaaacatctctccacaattttctttctcaatctcgcacgttttttcagccaatgattttccttgagatccgtgtcatgcccatgataccacactaaattattagtagcttaatcgtatcgatcatccggattagattagagatttcatgcgcaggatttttcacaatttgcttcttttgaaatatttatttcgcaaatatacctctgaaaaaacttaacgtagaaatggtcctttttagacgtcagagtggctggcgccgtcctcctaccgatgtggcggggcggtgctgaggtggcatggggagcgcgccaatgtggttggggcctcccccccccccaccccagcgccaccatttttctcctcccttgtcctctatagtgtagaagagagagatatccaacatttttatatttattttcacacttaggagcacataagaaccaaccatggaaaaaataaactcaaataaacaaaatatgtgacatctagaattttctaaatatctaccgaaaatgggtgtcatttattaaaacaggcgtaactttctcatacggactcggaatcaagcaaataatatatctacggacatctatagaaaaagttactgaatcgagccgaaaaaaagacttgaagctcatccaccctgcgatgaatcacaatcacaatccccaactcccaaatcattcacaatcctcaatccccaatcaaacacatcacagaacaagaaacattgaagaacatcacagagatctgtcactaacacagaaatcattgaagaacattgaagaacagggagggcgccgccactgcctctcgacccgccgtcgggccgccaccacctcccctcccgccgcatgccacctcccgctgctgccacctaattttaggtttaaatctggacatacattatctccagatacaaactcaagattaagtgtttctttaacagagggagaatacagatgacatgaccggcctcatgtgccgcccctccccggatctggcgaaagggagggttcctcccaccgcctctcgtagccactgccgcctcccgccgccaccgccgcagaggcggcagcggcggcggaggggagggcaccgcccgccgcccgtggggagagagagagagaggcgcgggattggatgagagcgagagagagagagaggcggatgtgaagcgatgagaccgagagagaggggctcagcgactcggtcttatcctctccctcggtcttatccgctcctcggctcggctcagtttaaaaggaacctataatttataataggtgctggtttttaatattaaaggttccgtttttaaaaaaaacggtataaaatataatatgtgccggtttttatttagaatcgacacctataattacttaaaggtgtcggttttttgcgattttaacccgtggaggtgggaaaaggcacctatagtggcgacacttatttgatgttttgtagtagtgcatccaatttctttcggtctgctagcaggagaagtgtgtaagctagggagctgacaaggatcatgcagtgatctactgggtattggacgcatcaggaacacgagccgagacatagatcgattaaaccaacctaagggacaaccaggagcgagtgagatcagcaacaactctccggaacaacatgtcgtccgggcacactatctaggatccgaggtggctacgccgtcgtaaagggacatgccttgctagccttgcatggtgatacgagcatctccagtatatgagtaaaatcgaaccatgtttgataaaaaaaaaatacaacacactgtagcaaccgaccaactgtacgtatcagagcaaaaatcgatcacaaaagaagactcaaactcaacaacgaaaaggtggtatgcagccgttggtcccacgatcgatgtcacacattgcagccaacgaatcaaaattttgttcgaccatgctaatcgaaccaggactgcaggttcctacgtatgccagttgatatatgtctcgtcggccgaacagtgtaaagtacggcgagctctatgtggccatgctaggtacgggtgtaaatggtaagccgcaaacccacttatagatcaaaataaacagatttacggcttattttgatttataagtggatttcgtagattagctacttacactcgtaatactaggttatctgtagtgtagcataatgtatgaatttacatgtgtcatcgataagacagccatccgtatcacttctctgggtaatctggtttgggggttcttaagcactgccgaaccaaaatgagatcaggagaggcacaaccttttcattgatcactgcgccatctgcctacaaggctacaacctagttgttgatgagcttttgttgatagagaagtattaaatataaacatttatgtacatacctcttctatttggtgagaaataagcaattgcatcagcggtaatttttgttatgcgttcgcacagttacatggtatgcagtacgttaaccttgccgatattttggttaatttgtaaaatagtcccctcttgtatctaacttaaatccatataatacaccacacgcacaaattgtctcccattcttccctatctttgttttaacaatttagtcactgggttgctaatccaaatggtaataataagtaaacaatgtagcacccacccacccgttcggtaagtaattaaccaacaaaaagggaggattggtgtagcactgaatttttagtcactattagtgagcgtgcacgtgcaaggcacgtcgatactattgaatggagttaattttgaaagagtattcagtcttggtactaacaaaaatatgtgtattcgtaaatatgtgattattccatatagctctaaaaaaggttgagattgttttaaattgctgaaacacgttggaatgttcgatttgaacataattctttgtaaacttgaactccaattcatttacaccgaaacaatgtcaaacatcagttttcaagtatccattcattattttacaaatattacaacttacagaggctaaaaaaaatcagagaccatttatctatcagacgcttattttgtgtgaaaaaaatcaagcgattttcaatggataatagacagtcgcacaccacttctgagttcttacatgcatatcctaatggcatagattggccgatcgccgatggcagtataagcatacacaaggacaaactataactacactaaatgaatggcataacatgaactaattttttgatttaattagattaacattctcattttcagcctgtgcttgctgccgacgctgttggctgactgcttcctcatgctgaagtagccctggtagctctgcaacgccctgctcactgaacacccaacgtcggtgcgtaaagactggattttcttttgttagttcctgagatcttgtcaggtttcagaattaagcatttgctagtaagttcagttgatgccagctactgaagtttctaaattcatcacctttagctcaatctcacctctgatgaaacaaggcatggcttcataagctgcttgccctctgcacgtaaccgctatggaaccacgacagtgtgttccgtcacctgttaatgtgtctcattctggaactgaatctgtcaaggggggtagtactttggtcagatatttgaacctcagacctgcagtgcacatattatgaatttcgatgctgaaacttcttacgcaagcaacaactcattgtaggcccctcagatgttgcttagcaaagtcctcatgtagagatatatatatatacaagttgcaaaatgaaattattttgcttaacagtatatacactactgaaatagtgatagcaaagcactatatgaattggcattaacactccaaatattatgtagtgaatcaggcaacatgatcaatcaaaggtaattagaaggttaacaaatagtatattccttatgaattacgatgtgattcaaatactcttttaaattcctcttatatggtcaatattgttaaccttcgtgtggttgatccaataactgaaggacatgtaatgttgttatatgggtcactcaattaattcccttttctggctattatatatgagaatcgacaatgatttctgacatcaatgcaatatatatgtgttaaagggtccttttaagatcatatgccaccaaaccactactgaatacggcactgaatagaagaatttagtcatttatgcatatttgttgcattttttatccattgagagtatataattcgatatatagctcaagttatttattacctgagaagtttttggacatctgccatttgacattgtaaaacaccatggtgacttgataattcctgccaaacaattgatttaatcagcatctgaatatcatagataagaagcaggaaacaagaaatattgtaagttgttacatcatccttgttgaattgtttcgatgtacctctccaatctgagcccctgcaatatatcggattcaatgtcacgtgcaaaatatgagcaccgtaagaaaattcagcaaacattatagtgtcagcgttaatcgggccatacatgatgcataccttcaaggcaatggcataataataataatcgtgaaagcaacaactctatttggccaacctccaaccaagccgtagtaaacaactaaagataaggccagcagtaggccggccttattgagataatccaatataaagttaaggatatatatcgcctgcttcaatcccagcacttagtaaaaggataatatttccagggtcattttgatgatcaaaagattgttggattacaataagcataggattgaattgataaatagctttgcaagtacttcctgaagcaattctgatgacatcaccttatactaaaagaaccatcttaatttctaaattatgtactacaagcatttttaggattagatagttgtaatgtattacaagcatttttaggactgggtagtttcaaacatagatatagagcctgttttgagtctacattcaataccaaatgtgcaagttttgaagtacatgatgaccaaatgatcaagaaccagatcgtccagtgccaaacccaagtttaaaccatcagaaacaaatgcagagataaaaatgttcagatttcagaagatgagatgacaaagcttaacctgttggaaatcatggcagatcgaagacaccaaggcctctgtggaccatgtgatcgtcaatgacaatgacccatcattgaactaaagtcaagatgttaatcttcatgccttaaataagtacatttatttagtgaagttacaaccagggttttcaagtttctttgagtttgaattccaaaactggtgcattaaagtataattttgctcacctgaacatgcatgttcaggacatcatatcaagctcaagagagtcaacttaggcatgccactcctcatgatctcataactttcctgtaaagaaacaaatataataattaaattttacatgaagcacaggaaaaaaaaactataatcgcttggctgaaatggaactgatcctctttggccatcatcaaagcatagataaacctcaaatgaatctgatggcaaacaagatgaaccaaccaaaaaaattctgaacaatatatgttgtccctagagagcaatagccaatagatagtcaggagataaaaattgacatctctattggacttttcacacagtaaaccctaaaaaacaaatgatcagctctagctggtgtgctctttgcttcagaggtacacatagcttttgttgacgatcactaaagcttatttgacagcacatataagttaataggaaaagcaaactataaatcgtaaccatcaaacttaataaatctatcgctagatgatcttggctagattattcagtttgacatgctattcttcaagaacatcgagcaactaccggtgtcgataaaatatcatatatctagtttttgtgagaggcaagtgttgaaattgacctgctaagtgatcatggaggagacaaccatgtagaatactggcacactcctaagtagttggcagggcaggcacctcactggcggatagaaccgcgtcctgtttccatgcaccatctgacccatcaatacactgagtagaaaaaggttaaaaaataattaaaaaagacaaatctagataggaaatcatgttcctttcacagggtccagatgaaatgaaaggtatgaacttacaatttggcagaagatggagtgattaaaagcataaatacaatctgaaaaaagatgaagtgattaacaaacacacacaaaaaaatttttgcaatggacgaagagaagagacatgtcatgatctgattgtatctcgatgtagtaagaaaagatcagagcagccaggcagtaggaagaattgttagaattaattaaccatatgagcttgcatagaccacatataattgaaatatggatgtatgagaaaacatcaaacaacaatccccatatacatgtacaggattgacctacatgaccttaagtcaccttgctaattcaagtaaataattaagagtaaagttaatgtcagtgcacatctaaccagattgctatataaatgcaatgccatacagctatgagaatttcatgattgatgcatcactactattgtttactttataactctgtaaatagagcacaaatgttgagcgcaatgcactgtttcggtgtatattgccattatcagatccttactatcctcccaacaaatgaaaatattgtacccaacaaagatccgaggcggcggcggggtagggtgagcggcgtggccgcgtggggatggcggagggcggaggttagatgcgctttttttttttggcgttctttttttttatcggcgtttttttttgtgcgtgacgtggtccgcgcggatggtgcggtttgttttgagccggatgacaggtgggtcccacgcgactgtagatccgaaagattgtaggattgtggatgaactcgtactttttatattatagataaatatatatatatgtgacatcgatcgtatcagattgctgggcatgcagaaacacatttaactttcattcaccttagtttgctaagaggagaggatcaaacgaacgttggtctcatatataggaataggacgcatcatgacacaagccatagctcgatctgatggtcaggcacaatatatgtgtgcttcctacgctaggatgaacgctgatgcagcaagttcattcgcttccggttcctagactgaaaggtgagagagagttaactgaaaaagtgtggcctcttcgttgggccaaacgagaaaagaagaagctagcaaccggaaggggagctgccaacctgtatcaccgacctcactaaccaattaacctggtctattttgttcttgcgttgtcaacaaattttattgccagaattttggtaaccaaaaacccaaccagcaaagccaaactggagatttcagttgcatgtcaactacaaacatatactccctccgttcctaaataattgacgtcgttgacttttttaaacatgtttgaccgttcgtcttattcaaaaaattttgtggaatatgtaaaactatatgtatacataaaagtatatttaacaatgaatcatatgataggaaaagaattaataattacttaaattttttgaataagatgaacagtcaaacatgtttaaaaaaagttaacagcgtcaaatattcagagatggagggagtaatagctaccttattaaaaaagttgtatttctacctatgcacctacctagacaacagtgataaaataaagaatcagttatgcacacgcttcttctatttggttagaaataagccgtgttcatcatagtgccatcagcaacgccatgtaactcagctatgccaaaaatatcctttgatatgctttgctttgccattggcattctcatgtgcagcactggatcaggatcctctacagtcaactgtacataccgtgctattgtcactgacatgtaggtccgatgatccctggacccacatattagtaacaaaggcacgatgcattaactgcagaggatctcaattcgtatagcactacctagtgcatcatccgctgggtagcaatagcatacatatttttaagttgttttaattaggctttattaattataatactactattacgtaataattagagtatacataaaaaaatattatatttgctatggttgcctggtatacactatttttaactgtggcgaattttttcattaattagtaaataatctgccttcctcttcaaaaatccacagtgcatcacaacatgcacaaattggctcttaatatatccgtttaacaatatagtcagtggggttttttaaaagcttttaatcagtgtagttgttaatcaaaaccacaagtagataagtactaaacgacatagcactcacttgatgctaagtaattaacctgcaatagaggttggtgtagcactaaatttttagccatcactacgtgcacctatatatatacatcttgccttgacacaacgcataaatacgcgacttcatgaggtttgggggaagaaccaacttctccatcccttcacttcagtttcctaagagaagagagtactgtgtgcaaggaggaagccagtgagaggggtcggattcacgccatgtgtgatctcatcggaataggacgcatcaggaacttgagcaaaagacggtgacaaccccaaagtacgaatagtgaatcgcccgctaagatgaaagctagcgaggacggcttgtctgttctgttccggttcctgttaagtgtgcaagcttgcatggttgagtggggaagccgtgttctctccagtgcatcaaagcgaggaaaacaacaacgagaaaggagaatgaaaaatcgtacagcaacttaccagacatcatcaccttgattacgatggagctcttgaaggcccctctcctttcttatttaagcatagatttattgtcttaggcttcatgtacttggatcgtcagctcgtcgccattgttcgcgaggacgttacaaatccgcgaaaggaagtaccatgctattctcctcttcatcttatcgatgtttggtggaacacgccccaatcagtacttaatccttatctgcgcttccttctaggtatgcgtgtgttgcgtatcgatcaggtgcccgtgtgctagcttcggtgcagcattccagcttactccttctgttccaaaaagattctaagggtttgttttgttcccaaacaaaaacttttcactatgtcacatcgaatgtttagaaacatgcagagtattaaatatagacaaaaaaataataattacacagattgcgtgtaaattacgagacgaatattttaagcctaattgctccatgatttgacaatgtggtgctacagtaaacatttactaatgacatattaattaggcttaataaatccgtctcgtagttttcaggcggaatctgtaatttgttttgctattagtctacgtttaatactttaaatatgtattcaaatatgtgacatgctaaaaattttcgttcgcgaactaaaacatgcctaatcttaggtttaaatctaggcatatacaccgtgtccagattcaaattcagattaagtatttctttaatagagggagtacggatgactggatttttcacattgtgatccttttaaaaaatttatttcgtaaatagacctctagaaaaacttatctcagaaatggtcctttttggggcgccagagtggctagcgccgtcgtccaacgagacggcgtcagcctatttggcgccgtcctccttccatcgtggcacacgcaaaccgatgtggcaggaggagggcgccaacatggctggcaccgccctagggaggagggcaccagcatggctggcgccgcccccctccccccacccctcgcctccattcctatttctctatatagagttgcaacctttttatttttgttttattttttcggatgttttttcgcacttaggatcatgatacaaccaaccactagagaaacaaaaaaaatttaaactcaaacggaatataccacttagctagatatccgaaaatagcataccacttagcctactttgcaccttcatcaaaattagaccataactcctttagtaaaaccctttgatcagcatataaacataatgcactctaccactatatgaaattacttaatctctaattcaaaatataaccacatgaaatgatagccataagttaaacagtacagagagatacagtttttttatttttttgatatttttttcacagttaggagaataaatgaaccaaccatagaaaaaataaactcaaatggacaaaatatgtgacttgtaaaattttccaaagctctaccgaaaagtcattcaggtgtcatttattaaaataggcgtaactttctcatacagactcggaatcaggcaaataatatatccacggacatctacagaaaaagttacatccgattctctcccgctttgccgggttcggcaatattaaaacctccaaattccgcttgcaagattgtgttttcgatgagagaagttt

SEQ ID NO: 27671 - DNA, 2740 bp, Oryza sativa
cagcgacatcctcttccccggcctcctctccgtttcgcccagaaggctgccgggagtgcatcctcatcggcaaccagtgcgccaccaccgtcgttctcctccagtcggccctcaccatcgaatcgagggacgccgcagcgcgccactgcctccaccggcgtcgcagccgcctcctcttcctcggcccaacctctatttctcctggagactgccggaaattcgtcctcaatggtgagcagtgatgacgtcgctttcatcctcgtcctccggcagccctccctcgtcgctagagtgccggctcgctgcaccgtcgctgccgtcggcttcatctcgtcgtcttcgtcgtcggccgcgcctcctcgctgcccgaagacccgtggaacgtcgccacgtcgcagtcgccttcctctggtcgccgttcccgccaagactaagtgctgcccgtcatcatcgtcgtcaagtccgcagcgccaagcccctcgtcgtccgcctcttcgtcaagcccgaggattgccagagccatcccctcgtcttcgacccgttcgtctccgtcgccttcctccgttcgtcgttgctgtgccaaggtcttcgccggtcgccatcgttgttcccttgccgcgtcgtgcccgtggtgagaaccctccccttcctgccctctcctcgtcctccccttgtggtcgccgcgtggattgcccatgtgtgcagctcacgtggtagtcccggctgccagtcgctctatcctttctctctcgagtgatgttacattgcacataatttaatggtataataataataattaaacaactcggaaatatccactttaattgcacttaaaattcggatggtcgtttctcggccatacaagctcctaattcactcgttaaattgtttaatttctgttataacttaaagaacccgtgtttattgtttttatgtgttgttattgtttctttcttagatttgtagccctgttttgttgttcgtgtagctgccgtcgtttcggaagttcccaaagtgcagatcaagtcgtctgaagactttctcttcgagcaaggcaagtcataccatatttcttgaacatattgaatcccattattgcaaaaactatgttgtttcacttctatatgcatcgcttttataaattatatgacgctcaccattgtttatttaatagttaatattccaatgttccttgttatatagccatgttgttgaattgctacccatgctcttgacaaccctagtaaaatgataaaatgactagtatgactccgtatatgatggacttactagttgcactaggttgagcttatctatgcttagatccaacatggaaaccctttttataaattagactgtgggtaataactaaaatattcaagattgatgatcaggtggctagctgagcctggacatgttggaatctcattcaaaactcccaaaacctgtttttggtggggcgcgaggtgcatggttttgttagaagcacctcggccactataaggaccagtcttcgggcctctgttgcgaagcataacagtgcaaccacaagtctaatgggtaaggcctgactagaagtctagatcatctcaaaacaaaggccatcggtatgataggtctggggctaggggaggccgactttgacctggcgcaagagggggcctgtctcgtcccgggggatccggcaacctttaccttatcgaggaccggcgggcggcgaaaccttagcgggtccttctgttttgggttgagctaggtggatagtcttgtcacgatcttgacttttcgggtacctttgaggtatcgcgatgcatggctgacatgaagtcaagtgtgtcttgtgggtaaaaatgtacacctctgatcggagtaaaactattcgaatagccgcgccctcggttatgggcaagcctagcaatgtacccaagttagtgtttttcttctgagtgatggttggaattcatggcactttggacaggtggttaacctggggtttaaggccggtttgcgtggtttcgcaatcgtgataatattggaccgagtttaaactatgctttaaaaacattaaaatattgcaactctggctttacgcaaaaatgaaccctattatgccaactctttgttcccctttgcactataattcatttcccggcatggcttgctgagtacgatggttgtactcattcttgctcaatctttcccccttcagtcagcgaaactatttgaagaatatgtcttaggtggagtcctggcttataccccagttaagtgcctgtgaagatggagccgtaggcccgctagtctgctgctgtttttcttttgttgtcgggcctaatgtgcctttgtaataatgtaaatattatcgtgataattaataaagatgtgtcttttgtatcaagtttgttgtggtgtacccctgcatttcctgcgacggggattaatacattagcgtttgggaaaggtattttccgggcgtgacaagttggtatcagagccatctcgactgtaggataagccaaacgaacaaaccctaaggacttatttgccaaacgaaaactatttgtcaaatttccattttccttcttccctatgctatttacaaagtgttcatctccccctcccttgcttggattcaacacataatagttgtgaagaaggaacctgcctccgaagttccccctctaagcaccaaggagtgaagatcctgaagaatcctataattgaacctaagctaccaaga

SEQ ID NO: 27672 - DNA, 6043 bp, Oryza sativa
gtcggtttcggtttcggggttgtttgtttggatatccgtgattatttcatgattatggcttctagatggatactatacgtatgtaatactgttgtttgctactaatgtgtcaagttggaattagcttggtctcggaatatggtttctttgtttatttcatgtgtaggtgactcgatgcctcgggagagtatttgcggtgatggaccgggagtcggcttggggataagacaacgtctgtggtggtcagagatcatgcgggatacttaggctagagttgatgcacgtggttgatggagattccatatggcatacgatggaggtattgtgtgcatatgggatgcggagtcaaatttggaaggagtccaaatttgatatgattggttatgaaaagtttgtttcttgtactagagagttttctaaggtgtttaggacttctagtatgagtttggttcgtggctttaggctacctacctcgggtataaatagagggggagcgtgaggcttcccggtatcgctttagagagcaattgagttgagttttgagttagggtttcgagtttagtcaaaatttttgtaaggagtgctattggtgcactttgtaaacacagagagaatcaataaagtcgtcatctactttaatagttcttcgatttgtgtttcaccaggtttcggcggtctaaccggcggctcaccggcggtcagaccggtggcatcgcggcggtcagaccggcggcgacaggagtcggcagcagatcatctcggcggttcaaccggagttcgatcgctgtcagatcaacgttcattaggcggtcagaccggcgcattcacttcggtcagaccgcgatccatcgaattcgaggtttacttttttttccgctaaaagttttcagtttttgggtataccaaccattcaccccccctggttggcttagttcttgtgattcgatcctacatatggtactgaattaattaagtcaccattctgggtactacccagcagagtttcccgtacctttggaataggggttgccttcaccctaacaataagcacggttaccgcgctaaccatggcaaacagtaagacaccgtataaaacttatcaaaaattcaaattatttttcaaaatttatttgaatttaatggagttatctcagttttaccttttatcgtacccggcaataaatgtgataaccacgataaccctgcagttatcgccggttttgtaaaccctgcctacccagccgcaacacataaatacgcgcgcgatatatatgtcgcccatgagccatgcccacgcacacataatctcgtgtgggatgattggagaggcagatcaaagagcgtaggatcacttcagtttgctaaattcgatcatgcacatcggaataggacgcatcatgaatccaagccgaagcatcccctttgtatccttcacaagcagcgatcgagaaccacggtaagatgaacgccaacgcaggtggcatatgtatgctggctcatgcttccctgtcagtgcaaacgtgcgaggcgtacgtgctcccttcagttcagcagaatgcagggaaactgcagagcgatggggagagcccagcagcagaaacagcagctagcgtgcctgagcaacctctcctccggacacaataacggcgtgaacgtggactacatcccctgtctactctctctgttttttaaaaaaaatcaatctgaactaatacttgtcccgactctagattctagattcatttttagaattgagtttctttttagactgagagtagcccgcaaggctgtatagtagcaaaagagctgtagcaaccacatctcaacccaaaactagcatgagtggagcgagcttagttccaaaactctatgtaaatccattaaaaattgtatacaaaattttaaaatatactctctccgtcctaaaatataagcatttttagactaatactgtggagattatgggtatcctatatctacacggcgatggtatttgaactgggtacaggatacttaatgtagatagaatatcttatctgtatctcgggtttgtttcttaacttgtgtatcaaggaaacaccctgagaattagtcggttacgactgtattttacctgtatcttcatattccgttaggaatatagattatcttttgtaacccggactccttcccatatataaggggggtccgggcgcctctaggggcatatgttgatttttcccgaatcatacaatcaataatacactcggcggattcatccccggacaggagtagggtattacttctttcataagaaggcctgaacctgtataaatcctttgtctccaaacccatacacttttctagcttgatagccaccccctttattattgccgaaatctagtttcgacagttggcgcgccaggtaggggtagcgtcaagcttttcgccgatcagtgcaatgggtcccttttccggcatcgacgacctcgtcttcccacccgggcaggcgtttcggttcggcagcctcgacttcatcaccaacaacttcggcaagatttctctcctcgactcggaatcagaccagtcgggagagaaccggctttcggtcccgtttggattcccgaacgcggctgaaagctatttcaagaccatctcagccgagtcggcttcaaaccactcggccgagatcgcatcttctccaacgacaccagatcaagatgacggggcttacccaccagtcctgatgaagctccccgacgatttagcggccatcttcaccacgacagcatcttcatcccgtaggcctaggcggaagtcggcttcaacaccgatttcgcctagcttcagggaagtcggcgtcatcctccaaccactcggcacggtttcgacggaccagctggaagactacaacagctctcccaccgtcgactcacgtcctactgacatcgtggagtacgacgagtttagttctcgctacaacgacttcgacgacttcgacgacttcgacggaagcctagatgacaattacacccctctctactttggcgttttcatggccaataatgagacggaggagcagcgccaagcccgggagaccgaagaacgtcgccgactggaggaggagcatcaagcacaagaacaagaacggctacggcgcgagcagcaggaccgtgagcggactgcgaaggaggctgaggatcgacgtcagcgagctttggaagcagggcgccgagcacgtgatctcatcggtcagcaagatgtcgaggggacaccggttttccgcacccctcaacagaatgcggttgccgcgatcacccttctcgacaccctcctcaaccaaaacgagctcaatcgttccgaccacgtcgtcaacatcttgaaccagacgaagaccatgattgcggcgacggtcccagttaactccgaaagcgtccacacgccgactggcagccgggtccctcacttccgatctcatgactaccgtcatccaagcctcagcatcactggagcaggatccaatcgcaggagcaggggccacgacgagcggtctgttcactcgcctcccgaacttcatagggagcgccgagtggaacggcctcgctcaccacctcgtcgccgccccatcgatcttcgcgacacaatcacacagcgccgagcagctcgaggctaccatcactcgccggatcgccgcgacgacgaccttgacggagttgctgccttcaccgacgacctgcgtcgagtggattggccagccggcttcaaaccgactggaatagagaagtacgacggtaccactaatccagaatcgtggcttaccgtctacggtctcgcaatccgcgcagcaggaggtgataacaaggctatggcgaactatctaccagtggctttagcggattccgcccgatcttggctccatggattgccccgtggtaccattggatcttgggccgaactacgcgaccacttcatcgccaacttccaaggcaccttcgagcgtcccggcacacaatatgatctttacaacgtcattcagaagtccggagaatcccttcgagattacatccggcgattttctgaacaacgtaacaagatctccgacatcaccgacgacgtcatcatcgccgcattcaccaaagggattcgccacgaagaattggtcggcaaatttgggcgcaaacctcccagaacagtcaagctcatgtttgaaaaagccaacgagtacgccaaagccgaagacgccgtcaccgcatcgaagcagtcgggtcccagttggaagccgaaaaacacgccggctacgggaggaggtggaagtaacaatcataaggaccgcaagcgtaagcctgaggaacttgttgcaaccgctgctcactcttctcgacagcgttcgcgcgtcaacaccttcgacaagatcatgaactcccaatgcccgcatcatccaaactccaaccacgtggccaaagaatgcttcatctacaagcagttcgcggagcagtacaccaagtctactcggaagaactccgacgaggaacaaagcacgtcaaggaagaaggacgacggcgacaccccggctggatttcaagaccaccgcaaggagctcaaccatatcttcggcggccccctggcttatgagtctaaacggaagcagaagttgactgaacgggagatcaatgctgttcagcccgacacgccccagtatcttcgatggtcagagattgcaatcaagtttgaccgctcggatcatcctgaccgagtggtccacccggggcggtaccccctggtactagacccagtggtccgtaatgtcaagcttcgcagaaccctcattgatggtggcagtgcactcaatatcctcttcgccaagactttggatgatatgcagatccctcgctccgagttaaaaccaagcaatgcgccttttcacggagtaattccaggattatccgcaactccactcggccagatcactctcccggtcacttttggcactcgggaaaacttccgcacagagaatatcagctttgaagttgccgatttcgagacagcataccatgccatactcggacgcccggcgttagccaagttcatggccgtcccgcactacacttacatgatgatgaagatgcctggtccccgtggagtcctatccctacggagcgatatcaagcaagctgtcacatgcgacaaggagagttgcgacatggcccaaacccgcgagatggcgtctgcccgagaggaaatctgactggctgcaaccacggtgagcgaaggagaagtgcccgctgccaagatttcaaaaagtggggaaaccgaagcccagactaaaaagattcccttagatccttctgatcctaccaaaactgctgtaataggcgccgagttagattgtaaataggaaagcgcgctcatcacctttcttcaaaataataaagatatctttgcgtggaaaccttcggatatgcccggtattcccagagaggtgattgagcactccttacatgtcaaagaagacgccaagcctattaaacaacgactccgccgatttgcacaagacaggaaggacgcgatcaaggaggaattgaccaagctgttagcagcaggcttcatcaaagaagtccttcatcccgactggctggcaaacccggttctagttcggaagaaaacagggcaatggcgcatgtgtgttgattataccgacctcaacaaatcttgccctaaagatcctttcgggttgcctcgcattgactaggtagttgattcaaccgccggctgcgagcttctcagttttttggattgctactcggggtatcatcagatccgactgaaggaatccgactgcttgaagacttcattcatcacgccctttggggcatattgctacgtcaccatgccgttcggactaaaaaacgcaggagcaacttatcaacgcatgattcagagatgcttctcaacacagatcggccgcaacgttgaagcctatgtggatgatgtagtcgtcaagaccaagcaaaagaatgatttaattttggattcggaagaacccttcgcgagcatccgcgcttac

SEQ ID NO: 27673 - DNA, 3520 bp, Oryza sativa
aggtcgtgagcacagtcttggttgtcgagcgtgaggaagaaggccatgtccagaaagttcagcgaccaatttacttcgtcagcgaggtcctggccgactccaaaacgaggtaccctcaggttcagaagctgttatatggtattttaattactaccaggaagctgtctcattactttcaaggtcactcggtaacggtggtcacatcattcccactcggtgatgtactacacaaccgcgaagcaaatgggcggattgctaagtgggctttggagttgatgtctttggacatatcattcaagccccgcacttcaatcaagtctcaagcgttagctgattttgtcgccgagtggaccgagtgccaagaggatacccccgtggagaaaatagagcactggaccatgcattttgacgggtcaaaaagactttcgggcactggagctggagtggttttaatttccccgactggagaaagactaagttatgtgctttggatacacttttcggcgtctcacaacgtcgccgagtatgaagcgctccttcatgggctacggattgcaatttccctagggataaagcgtctaattgttcgaggtgattcacagctggttgtcaaccaagttatgaaagagtggtcctgcattgacgacaacatgatggcatatcgacaagaagtacgcaagctggaggataagttcgatggacttgagctcagccatgttcttcgacacaacaatgaagctgccgatagacttgcgaactttggatccaagcgcgaagcagcgccctctgatgtttttgtcgaacacctttatacgccgacggtacctcacaaagatgccactcaagttacgggtacccatgacgtcgctatggttgaagccgactggcgagagcccttcatacgatttttaacttctcaagagctccctcaagataaagatgaagccgagcggatttcaaggcggagcaaactttatgttatgcatgaatctgagttatacaagaaaagcccttcaggaattttgcaacgctgcgtatctttagaggaagggagacaattgctgaaagatatacattctgggatatgcggaaaccatgctgcagcgcgcaccattgttggcaaagcttaccggcagggttttttctggcctactgcagtgtccgacgccgacaaaattgtgcgcacatgtgaaggttgccaattttttgccagacaaattcatctaccagctcaagagttgcagactatcccgctgtcttggccgtttgcggtttgggggctcgacatggttggcccgtttaaaaaggcagtcggcggttacacgcacctcttcgtggccattgacaaattctccaagtggatcgaagctaagcctgttgtcacgattacagcagataatgctcgcgatttcttcatcaccattgtgcacagattcggagtacccaatcggatcatcactgataatggcacacaattcaccggcggagttttcaaagacttttgtgaagactttggaatcaagatttgctatgcctcagtagcacacccaatgagcaatggacaggtggagagggccaacggcatgatacttcaagggattaaagctcgagtttttgaccggctaaaaccctatgccggcaaatgggtgcaacagctgccatcagtactttggtctttgcgaactacacccagtcgggccacaggccagtcacattttttccttgtctacggggcagaagcaatgttgccgagtgaagtcgagttcgaattctttggcttccgtaatttccgtgaagaacgctatgaagaagaccgagtggacgacttgcatcgactggaagaggtccgcgaagcagctttgattcagtcagctcggtacttacaagggttgcggcgttatcataatcgcaatgttcgatctcgtgcctttctagtcggcgacctggttttacggaaaattcaaaccacacgagatcggcacaagttatctcctctatgggaagggccatttattatctctgaggttacccggccaggttcataccgactcaagcgcgaagacggcactctcgtcgacaattcttggaacattgaacatcttcgtcgtttctacgcttaactttatcattgtatttccctattttgactgtcaaacatcaagttttctccttgaagttgtcagtcgggggctatcatcataataatggagtgtgattttttatcaattcagtttgcttacttggtttatcattgccttgtttggtttttctacttagtttgagaggactgaaagtttttaatagcttctttgggttttaggctcaacaaagcttagcaaaaacttttaagaaatcaaaaactttgcaagaatcatcaagcacagcataaatacaccagtattgtacaaattgagcctccatgtattacatctacactcagtcagagtcagtcctttcatcatcagagtcatcattactcggctggaggtcgttgttgcgaaattgctccacaacatcactcgctattttgtcagccgcagtttgcgcactactgataagatcaagggcagcttcttcacttgtcccgtctgcaaatccatcaatggtgtcgacttcaattctcgggtacaaggattttgtcatcgccaaggccatgccagctcccatacttccagctttcttgatattcttgaaatatacttccggagcaacactcagcttgtcaaatatttcggttgcgtcgagtgtactcggaccaccattattgaggaacatggcttggataattggtgcagcggcattggcgacatcatctcttgctccttctagcctcttgatcttaccaaccaggacgtcgaattgagcttgagacttgatcttgcggtctacaaaacatatttatggtgagaatctgctgcattgaaaagagacaagttcaggccaatagctggcagtaccttcaacttccttcaaggccgagtccctctgcgcagccagttctacattgtctctctccagggcttcaacttgctttttcatttgttccattctggcggcttgcgctgtttgaaatccagttggttgaggatacagttatgttggcctaaatcaatggaacatatctggatgattaccttttgatgaaccacttagttcgaagtttgcatcctggagctgggcgattcggtcccttaactctttctctgtctttttggcgcactccttggcctcatgcagctggtccctaactgcttctcgagttcccaaatgaggaaccagcttttccaaagttgtggtcttggcttcattgcgaagatggattctctgcatgatggatcatagttcagttctgctaaaaagaaaaacaaagttacaggaggccgtcacttggaagacttacgtttacaatacgagtggcttctccgagcgctttcttcagctggcacacttcttcatcttctttttgacggattatgactatgccggcggcttgtgagttctcgtcccaccatttgatcaa

SEQ ID NO: 27674 - DNA, 11186 bp, Oryza sativa
tgaggttattgaaatcaccgttgtatgagaagacaactaacctgaagatgtacttagctgagcgtgaggtgatctttgttccttgcctggagatccagctatcgagtcattaccagcttctggcccttgggaagctgtcgtctgcgcttctacttcagggatttcttgatcagggcctgcgtccgactggtttccagtcgggggctcttgagttgttgctgcttcagttgttgccgactggtttccagtcggcggctggtcactcggattggcctggtcacccgaagcatgggcgccggtcggctggcttttggcagtcggctggctttcggcagtgggctcggggtctttggatatattttgctctgccatggctggatcggggtcttttccagatggatctatatcagatggtttcctgcaaagtattctttcagaatttagcatcattttcatgagagagcttaccaaagtgaaatcataccgagaggtcttatacctggaagatgttctaatttttagcattgcgcggccggccagtttttttctgggcatggtgcgctttgggggtttattaggcgagcccttatccccagatttatcatcgtcgccttcatcgtcatcaagcaccagtttcctcttgcgaggacccgtctgaccagttgatttggaggtctgaggctgcggatctggtctgatcgttggccctccacctccctgagcagtgtgttggcgaggagaccggcgctgagtgactggtggatctgacttcatcagtgcatattcctgaacaagatgcttccatagttagtcaattcagcatgaagacgaaattatgttctgatcatagtttgaagatttccgatacatacctgcggaggcggattgaatgcattatatggcacgactggcagctggtgtgagtagctgacgacgattgcatttgagaagattttatacatcctctccttcatgattctgaaatccagagagtctgattcttcacggttaggatcatacttgccgtcgaactcgaatgccgtgcgagatctttccttgattggcgctagtcggcatttgatgaaatgccgagtgatctgttctccctgtaagccttgttctttaagatttaacatacgatccaacaactccaaggcttgtactgcttcatctccgattggaagagagttccaagtatcttggtacactggaggaagacaagagtacccgggaagagcaggctcgggattctggacatagaaccagtttgcatgccatcctttgttcgaagtcttgaagggcatcgagaaatatttttgactcagagttccccttagttggaatcctgcccccccgactacacacggtttgttcttgtttggttggggcttgaggaagaagatccggcggaatagggcaaagtgaggtttgatccccaaaaaggcttcacaagcatggacaaaattggcgatatgcactatggaattcgggtttaggtgatgcaagctgattccatagaaattcaagatcccgcggaaaaattttgaggtcggaagagcaaagccgccgtagaagaaatgcgagaagaccacaatctcatgagtatccggagacgggaaggcctcaccgtgcgctggtcgccacccgatgatctccttggcagggagaacgccgtgcgccaccatctccttaagattctcctccgttacatcggatgacgcccattggccttcgaagctttctctctcttccgccatcaatttcactcaaatgtgctgatttgatttgagggatggcttgggagaggtgagggattgaggcagtggatcacgggaaggattttgatgcacttttcggaggtggatttggccggagttgtgaaccctagttcgccggcgcagctttgcactgtagcaaggaatggggaaaatggcgagcgttccggcggggaagacgaggcgtcgcttggatttcgggttttattgttaagggtatcggaagtgctaatgggcctaggcctgaacagtacttcagcccaatacttttaacagcgtggcccattgtgttccttagggacttaggcatattttgctttggcaatattatgcgcacaacagtgttgcccaatgctgatcaaatcctttttatgcggtcatataattctttggaattattgcaatgcaaattaaaaaggtgcccgacagaaaggcgttatgctgtttttgcaagctcttttaggctacaaaagctgtttgggttaactagggatgacttgtttttattatagtcatttccttggcatgttatatgcctgttttcatggtaaatagtcatggcctaggctattcgacttatttattaccataatctttataatacttgatgggtaatctttagagtttttatattcggatgcctgtcgagtgtgttcattcgtgaaccttttagagtgtaaaccactcggatttcttttattgtggctaaaaagcagtcggctagcatgcctatttaggcgccgcgtatgcttttgtcatataatgcacaattgtgttattattttgtctttcaactatatgtttagtttgttaactaatcacatagttgggggctacacctaattaggtgcatctattcgatgcaccatattctttatcttttcgccctttacagtccactcggcagattttggcttgaagagtttgaagtacttggattatcatctttgagaaggctatgatggtcgactgcaaaggactcgggggctactgtggagattatgggtatcctatatctacacggcgatggtatttgaactgggtacaggatacttaatgtagatagaatatcttatctgtatctcgggtttgtttcttaacttgtgtatcaaggaaacaccctgagaattagtcggttacgactgtattttacctgtatcttcatattccgttaggaatatagattatcttttgtaacccggactccttcccatatataaggggggtccgggcgcctctaggggcatatgttgatttttcccgaatcatacaatcaataatacactcggcggattcatccccggacaggagtagggtattacttctttcataagaaggcctgaacctgtataaatcctttgtctccaaacccatacacttttctagcttgatagccaccccctttattattgccgaaatctagtttcgacaaataccaagtcaatttttttaaattttaactactgatagcaaaaaatttaaaaaatcaatcatgtaatttgatgtactagttttatcattaaacaaactatcataacatatcatttaactatttttattaaaacatcttacttttgctgatattattggtcaaagtagtatctcgaaaaccgtcttgaagtctaaaaatacttatattttgggacggaggaagtactttagtttctaactagaatcaccaaattcagtcctagacttataatttactacctccgtcccaaaatatagcaacgtctagatacattgtcttaggatggatcttattccatactagactgctatattctgagacggagggagtatgtttttctccgccgctgcacactgggaagtaatcatgtggtagatcatcggttgatcctcctcaaaccgtacattctagagaacgtctcgaatatgtgaaagcaagaactgtcatcctcctctttgattggtcactcacggcaggtcaattcaatcatctttcgttcggaattcggaattgatcccgtactccctccgttccaaaaaaaaaacttaatctagtacacgttccaaccaatactagattaagtttttttttggacggagagagtatgcaactcttatcaaaaatatatactctaaacagcaaatttcagaatggcaaccaaatgaacagcaaaattttagcaaacattgtttcttttcttgaggaatattgtaatcacatatttgtagtcgaataaagtactagcagtgttcaccctcaaaattttagcaaattactacaagtctgaaaaaaaaatatcaatttttcacacttcttatgtttgttgagaaattagcaacattttcccttttcttctgtgcctgctgatcaataagcaatgctaagctggcttcttcacacttcactcatacagcaacatgtttcttttcttttgtattctttttcttgctgctcctcggttacttcaaaaaaatagcacccctgcaacaaaagaagtaaaaaaaggaaaagcaccacgcagagacacacacaaacacaagccgaccatacttctcccagttagctttagtttccctgcttctctcatttcctgctcctcttttgctttcccctatcgcttcagatgattcatgcgtcataccatgcagtgcagatttttttttctcttttttttttgttgaggaatttcacttttgatgaatagtaacatttgatgcagtgaaattgcaaaacaacaatgaattgttcacacacacacacacacgaactgagttgaatatacatcatcgaacagcttgtcaggttggccgctctgaagtctgaacctatactgacaataagaacagaagggactcttggcaagagaatgatggccaattcggcatctctggcttcttaattacacacaagaaaaaagggaaagaaagaaagaaaaaagaggaatcaccatagattcaaatcaaatcatggaagaatatgcgaaagattggtcaaaaaaatggcagatttcttgagagggaagattgcaacttttgtacatacccccactaccaaaatcctcttcagtaaaggagaagctagctacctctttgcacaaagccaatgatcctccatcttatgcattgccggtagagctggctagtgcacatcatatagctccttcagtctcatccagatgctcactggaagaagggctttcttcttcttctccggctagtctctccgccgcggcgcaaccgtcgtcttcccggcacgcctgaaaagccacatttctgtcagccatggagctttggtaaccaacctagcagaaggtgagttgaaagcttttcatgtaagtttgaacctaatgtgcttaatatttgaaaattttaattgttgatgttcagaaccatggccctcttacttactgacctgtgagacccactgacaaatgctgatatgctgttcttttgttttgttatatatgtggtgacaatagtactgtgttgccaatcatttgtctgagatgcttatcttagttggtttcagataaactaaacaaaagcagggagcagagatgatgaggacatattgttccagtagtggaagcttagatgcctcaaatactaataacataaatgggctgctattgattatgtgtaaataaataaatcatcaccctacttgctaaaactaatatttgttatttattataggtgtaaatcattttgtgttttactttgatttcttatgcattttgttagtttgtttctgaacaaacatatgcaatgtacattgcatgcctgaactgacaacgagcagagcagagtagtcgtcagacagcatgagcagagtatcaaggaatgttcatgcatggcacagtcgtccattccaagccattttggtccatgtttctactcgaatttagtactcgaaatgccataaaatttctgaagaaaaaagaaaatgcagggtatgagtcgtatgactgaacagcaatgcatgcatgatgcatcaacgaacctgttgtgaatagggtcaggccccttggggatcctcctcttgctgcctctgaactcgtctgcaccggccgagtacctcgccggcgaccccgccgtcaactccgtccacctcccgccgccgccgccgccagcggccgcagcactcgtacccttcacagcatccatcgtcgttgtcgtcgccaccaagacgcagacgcagaagaagaagaagaagaagaagaagacaagaactatcctgcagcacgccattgcccttagcaacctctctgaccgccgcctgattcccatatagaaacaagaggagacaagacccttcttcttcttcttcttatcgacttatctcaattctctcctcgatctcaaggaagaaggaatggcatgtcgtgtcgttgagctgtaggagaagcagagagccaagagccaagccaaggtgtatgaagctaccagacagtgttcagagaagagaagagaagttcagagagaggatgtatgatgatgatgacaacgacaatgacaacaacactgacaaatgccaaggaatgtaaggaagcatgacacgatcttaattaggagaggagtacagtgcaacactgataaattgctcagctaatgcggcttttcatgggggtggatttgaggtgatgggaatctgtgattcttatcccctctcctgctgcaacgcatggatggatgcttgcttcggtttttcttcgcttctttcttttttttctctcttctcattcgctttgcgtctctttgcgtgatatgctttgctttgggtggtgatggttgctttctttctctcgctgctgctgctgctgctgctgctgctcgcgtcttccccagctagctatagctttgctctttgttctttgcctttgcgagagagggggttcaaagcaaatctgccgcgcttttgtaggaccaagcatgggggatagtgagctgagcaacgtgagttgagtgagtgtttgaatctcctgaagatgaagataaagatgaagattaagattaagattaagtgttttacgcaaaacaaggtgataataacgtgtgattaattgagtttcaattattacaaacttgaaaaatggattagtatagaaagttttcgcacgaaacgcaccgtttagcagtttgaaaagcgtgccacgagtatccaaaatttaatcttgcttgcagaagaaacgaacagggctgagtgttgcttcagttttgagctctcctctctttggaactttgtgggtcctctctccatctttttgcattgctagcttcttcttcttcttccggcctcctttcacactctctgcccacacacccacggaatctctcctaagcttcttgatttcctttcttttctttgtttctttctttctagttcgagattttttcttgagcaattttacggtccttgaggaggtactatgaggtaccactttttctattgtaaatttaatatctcttagtacctaggtactatgaggtaccaaattttacactaaatttttggtacctcatggtacctcgtaaaggaccgtagaattgctcttttttctttatacggacggactttgtttatggatggttcttgcttgtggccatggatcccacatgtcgtggtttcttggtgccatcggcttggatgtgcgtcgatattcgtgcgcaatttcgaatgaggtcattaattgatactccctccatcccataatacgagataattttagagggatatgacacatgacaatactcggtagaatatatcgcatcccttcaaaatctcttatatatgggacgtagagagtagattattgttgtctatataatcttctctttcatctttctcttcccttcccttccaccataaaattctactagtatatatgacacctgctcttagatgtaacattacaatattattgatgccctgatatggtaggattaaaatggccgaaaatgatattatttttacggaaatggtatagctaggattatttttatatttttaaatgtaactcgatattttttttcttttttattaatgtaggattttcaacttttgataggacgttgtggctaccttttctattaatttaagataatgatgtatagataaattttgattgtgcctcccaactcatcatgtgctagttcttacaaccggatatattacccatataaaatgccggaaatttggccatgttgttttctatctctaaataaattaacagagttgttgtaggatccatgttctatctgaaaaatataatatgaagtattcctacgacctctcacaaaacacgcgaacgggtccttgtaaaatttgagcataatttatttaaggggcaagtgagactaacatcaattttgtcagtgacccactaactgcagaacacaagacaaggacaaggagcacaagctctgtagaggaacactaaaaaaacgagatttctccaaacatttttttctaaattgtgagtatgttgagaattgaacacggtatttttgaggttgaaaccacacgctccatatcactgtactaaggatatctctgaaagggaaacacttaaaaaaaataagcattaatatggcccatatatatgaagtgtccaaagaaggaagaacaaagcagttagcagataacaggtaggcccaagtacatgagttcaaaacaaggtattgtccaaaatttgaaggaataattgtacttgcacacaatcatttcgcttcttccgctcacttttactttcttttttttattcccctttcgacagtcacctctttggcttactgacaaaggatcgaattatgagagagattatgccaaattaagaataaatgcctttttaatccaaaactggtagaaaagagattgcccacttcactggcattttgtccttaaatggctcatcaaccaaaccaaatcaataaagtacaagaacattcaattgacagagcttgagaggttgtaaaaaaacaattcatttcaagtcactcagcttgtaacagtcctcatcaaatcaacctttcttacgacataaagactctcattgccaaaaattccttccaactattgtatatgagttagacaaagttctaaactaactattatctctgttctcaaattaattatgttttgcatatttgtaataaaaaattaataagatttattatggaaaactggcataaaaaaatttccatggaaaatactactatacgttacattgattaaaaaattgttacagtcaaagatgaagatgcaggaacgtggaagtaaataaaacaaaaaagttagaatcacggccaatctattccggcctcatctttttcgcttatgcttatactctctccgtacttataaaggaagtcgtttaggacaatgtttaagtcaaaccttgggaatataaatcatgaataactctcaagttattgagtttgaaaatgtaaaaattatatgaatagattggtcttgaaaaatattttcataaaagtatacacacatcactttttaataaatatttttatataaataagaagtcaaaattatgttttggagaccgtgtcgctgtcctaaacgatttcctttacgagtacggagggagtacttatcagacaaaatttaaattttcaaccttaaatttggagttgtttttgactttttcatcgaagtttatttttcagcctttgtttttagaacgctaagaacatgtgtataaaagttttattcacaaattacttttcgtttgtaaatatgccgtttgacttattccacaaataagcgaaacgatgaagccgttcatatcttttacacttttactgagattttgagattttgtgtgatcacatagatgagcgtgcgtatgtatgaacaccagtatttgtacagtattcaaaataaacctacatcaaaacactttatatatagtgcatttaagcatgcatccacccactttaattagcctttagctaagccatcaaacgtgcaggttggcagcagagagggcttttttatttttttctcttgctccgagagatttttccgaaagagcccctgcactttcctcctttcccagacgacgacggaaagtccccagtcaaatacggccgtctttagcttcactcaactcgatcgctacctcgtgtaatctactcattgctaccattcatccatgtttttttgttgagatagatttagagatcctttagtaaaaagagcgtatatcctgcaggcagatgcatgtgatccatctatacgaatcaggtgtctttttttttctttcaatctacgtactttgagatgaagacgatgatgatgatgaatgaatgaatctagcctggttattccaatcttttgttaaaagagtagatggccgtatatacccttgatctggcatctctgcacgtatgtgtacctcgatccgggagcgtatagatgctctgtaaaaacatgcccttttttcttgatgcaaagtttatgacagattatgggatggaattaattaatttctttgaagtatatgagagcaaattttatagaagattaggtggtcgtcgcctctaattttatccatctaaacttgtgcattaatacattatctctaaattagctctaccacgccaatctcaatagtttattttatttgtttgcctaattcactcttcatttttctccttttttttcgagtttgtgcagaggcttgcattctctttttttttctctccttcactttattatattagtttatgtgatattttagggcaagtgtacagtaggttatacacttgtggtacttgctctgagattcgccgtttgatcttcggcacaacttcttcaaagtgcaaagcattgttgaacgatgtgcgtttgcgtgattggttggttaggaattttgtgtcgtgtctcaaagtgagagacgaatgatcaggtcacaggctcaagcacagtagtccaccttggtgtcttcgcatccggtttttgtaccgtccatccaatttgcttcagcctgattcatagtagtactcctaaccaaaacccagctacttatgctatactgatcagtgattggattaagttatcaccgagtggagaacattgtagcacaatacaaaattacagttaatactgctagtgcatgttcagatttatagtcaagaccccttacatttaaggacaaagggagtagtaatgtgatggaatcaaaccactctatagaaatgtttatgaaaaaatctgtatatatttagatgagatcgcattgacagaagatttatcctactcaaacgagcatatgaagatggcaactataaatctggaaaaaaaaattgaaagattgttataaaattattataagagttcaagattagagaaatgaaacaaactaatctcctgaaacagattttctatggatattaaggagagttgaaattcaatgaaagact

SEQ ID NO: 27675 - DNA, 2106 bp, Oryza sativa
  unsure (1)..(2106): unsure at all n locations
aaaacaacttcgtttcgatgaatcagcttgtcgataaggatccggagaacagccatcgtgtggttctggaaggcgatcaactccagggacaaggtggatagtgccctgaaggacatggctgtggtgatgaagcagcaggatcgcgccaaggaggcgatagaagccatcagatcattcaggcacctctgctcaaggcaggctcaggagtcccttgacaaccttctgatcgacctctacaaggtgtgtttcgttctagttctacctgcatatctcacaaaattactaacaaaatgattgctgcggtgtactgacaatatgcgggatttcattttcagaaatgtggcaaagtcgatgaacagatcgatctactgaaacagaagctgaagatgatataccttggagaggccttcaacgggaaggcgaccaagacagcacgttcccatgggaaaaagttccaggtctctatccagcaggagacttctcgcattctggtacagattaccgctccccctgttactcctactgattggtaatttggcatgtcaatgctgcattcagttacactcgaagttactgaaaccttcttgtgtgcatattacagggcaatcttggctgggcttacatgcagcagagcaactattcagccgctgaattggtgtatcgcaaggcgcaaagcattgagcctgatgccaatagggcatgcaaccttgggctgtgcctaattaagcagagcaggcatgatgaagcaagacaagtacttcatgatgttgtgcnnnnnnnnnnnnnnnnnnnnnaagatgacaaggtggtagcccgagctaagcagcttctccatgaacttgagccggtgacgcatgttacgtcgccaaataatgctgggctgagtgtcagtgaagagatcatggagagactagaccttgtgttgaacgaatggacgccgttcaggtcaaggaggctgccggtatttgaggagatagctaccttaagggaccaaattgcttgttgatccctttattcgcaaggtttttgttcttttgcttaatgtgcatacgggtgcgttgccttagaaattcatgtgcatatgtagaggctgttgtgggcttgtggcagtgcgagtaatggagtaaaggttgtgatgttcagatagatatcatatagctagagatcatgcaaagcatccaaggaatagtgtattttgtcttcatgttctatgatgcttataatgtgttgtaaacattctacagactacaagaaatccaagtgtacacttcacttggcttgttggaatcaaaaactggaagactgaaatggtttggtttcaagtttgcagcacaaaatgtctctttctctgaagtaaaaatgaaaatcttcgctatggaatgcagagttggtcctagagatgtatacttccgttatcctttttttaaaaatactaatacaaagttgaaaggaaacaaaatgatggggaaaacaaaaatcagtcagatcatatcagacaagcatttccagttcgaactggcctgtttagttccaaagtttttttctaaactaccaactttccatcgcatcaaacctttcatacacacataactattctatcacatcgtaccaatttcaatcaaacttccaaacttcagtgtgaactaaacacatcagtgtgaattactaacaacagagagcagcatacatcaaagtatcaaacagccaaacaccatctatattccgtgacagaaaggcacccaagaattggatgactaaaagaaattgcagtattattcatgaacaaactccaacattaatattcacaaattgagtatttgctttctttctgatgtttctgtcactacaccatttcttttcaagctaatagtaactgtacaaatctacttccccatgtcagagaacagagcaaaagtaagttccatcctagatgagtgaaaactcacaacaggtacaagaatgtgttaagttctgaacccagaaaattcgcgtgtcagagcactgaactactttccatttcttcaaacactgatgcgtgccgaatgcccatttccaaatggaaaattaaagagccctcgccactgcagatacagaatttacacaagg

SEQ ID NO: 27676 - DNA, 3273 bp, Oryza sativa
aaaaagttcataaaacttgcacctctggaggagtgcaagaccaggactaactccatgtctctgttgccgggggggaggtcgaggcgaccgggaacagccccggcggcggcgcggcgcacctcctgcggcagacgacgaagtcctcccggcgcgcctcctcctccagccgccggcgcagcgccgcgaggctctgctccttgaacgtgaagtacctccacgtcccctggtcgaagtcgtccacgcggccgtcgtctctcgccgtgttgtagaagatcgtccgcgccaccagcgcgcccggcgccgcctcgctcggcggctcctcctcctcctccccctcctccggcggcggcggcggcttcaccaccttcaattcctagagaaagagagatcccatttgcaattcaattattcaagaattcaagattatgcacatctcagcttaagaattcaagatggaagaaagccaagcaccttggcggaatagaatctgacgaaagcagtagtgaacgccgtgtcgggctccgacgtggcggcctcgaggcgggcgtcgcaggacagggcgcggcagcgcggcggcggcgcctccgattccgggacgacctcgacgacccaggagctctcctcgggggcggcgtcgcggtcgacggtgacggcgttctcccgcggcgtgagcccgaacctggcgcggaggaggcggccgtagagccccgtgagcgtgaggtgttccccctcgcggcgcggcgtccacaggaaggcgccgtcgttggggctgggcggcgagcccgcctggatgacccagcagcacgccgcggagccgcggcagccgccgtcgagcgcggcggggagctcggtggcgcagaggtagaggccccggtgtccctgcagcctgacgtagtcgtcgccggaggtctccacggcccagacggtgccccggcagttgcggcggtagccgtgggtgacggcctccccgccgccgccgccgccgtcgtccgccgcgcagaggtacgtgcccaggtggctcctgagccgcaccgacctcgcgttctcgaagacctccattgctgccgcggggccaagaaaccaagaaccgcttcttgatttggagagacgggtttgggcgggaggaggaagacgaggctagttgggggggtattattgtccttggcaattccaaccttaacggcttccgattgtggtaaaccgactacgtggcactttatggggcgttgggatctaggatcaacggctcagattcggcacaatttaggtatctcacgcttcagtgcttcaccgccatcatcatttatcagcaagtacatgagaccatttcctgttacttgtgactgcacgctaaggttttgttcggtttggaaggggttaaaggggattgaaggggtttaagggaaaataattccacaccacaatagatgtggaataaatcccctacaatccctctctcttgggattaaccgaatatagcctaaggaggattactcgtgccactttgttttcgaactctccattcctacatttcaggggaaatttgccaaatacttcgatattaaatttatttatttatagtaagtactcaaagtgctcaatttctcttcgtgtttggggtgtattttaggcccatttatagcagtggagtaagttccactttaactccctcaaatatacatctaatctaattcatatccatcaatagtaatactagatatcttgaactcctaacaaataaaatcggtacaaaatgatttcctcggtggttttaagggtggtttccactagcgtggctcgtttactagtccaaacatcgagtcagcatgtgatgcccgtcaatgggctgtaaccaaataggatatttgtagagtatgagaatcattggtgccagggtatacgcgagtttgaggtaaaagagataggaggcatggatttttatacatgttcaacctccttacctgatagacaatagccctactcccgttggctaaatctagtgttttatatatcagtaccatatatagtacaatatctgggatgacctaatctagtcgctgctgacctaaatagtccttgtagcatccgagtagaactatatttctcctttcttatccggaatatcttccgtatacgaggcatgattccgtataagactataatagttggtgtatggtgagcctcactttgcttaatacaaaagtattgggtatgccttatctataacactgacaacgcccacctgtcatcatctctctcttattcccttcctcctccctctctctctcccattccctttctccttctcgacagtggcggtaggatgagaggagcgccagaggagttgttttacaccagttttaatagttagagaatgtcaagatacccggttttatgaatcagattcgacctatacattaagggactcatagtggaccttttcctctagcaagcttccttccagcacttgatcggcccaacccaatcacacgtgggccccacccccgcagctgcccttgcgccgcttaccagtcccactcattcacatccctacccaaactgtaattacagacaactcgaggggggcatctgcaaaataccactactctccgtctcctccttggtccaagggttaaaaatccctcgtcctcgaggtagtcgcgacctctctctcctccgtctctccattccccactcgctctcgcctctcccccctcctccccaccatggcggtgaaggggaagggcaaggcggtggcctccgcgtccgcatccggcggcggggtcaagcggcggaagggccccggcgacgcggcggggccctcttcctcctcctcggcggccgcggaggccgccaagcgccgccgccggtctggggtcctccagttcttcgacgacgccgccttcgtcggggacgaggaggaggatgaggatgaggaggaggaggaggaggaggagatgttcgcgtccgacggcgacgacgacggtacggatcgcctcccggttccctggacgacgacgagttggggctgctctcgcgggcgggttgggttggtttggggtttggggggtatatgagcaatgcggcttctattgggtcagtcgcttgttggggatttgatttactacatgtgttgttgtattggttggttggatttgtggtgcttgggggtttcagtgctgtgtcccaaaatctcgcatgttgaaactagggtttggatgagcacttaagaggttgagaggtgttgatgcatatggaagtgtttgggtgagg

SEQ ID NO: 27677 - DNA, 3210 bp, Oryza sativa
gttttgaatggagacacagcttacaggtttcttagtaagtggctcggtgagtgagccactttctctggagcgattcgatggtcagtggtagagtagagtctgggaggacttcgtcctgttgcttctcctttcgtttgaatccatcttgttagaagtttttgttggccttagaccagacagaatattgggcaaaaaacaatttgtttgtgcctgtgaacttgccattgttctactgtaagagcaaatgttttttttttatctgaaggattaaagaaccaaggaatctataatgtccacaattgttttcattttttgccattttggtgcatggtgaggtaagttaatgcttcccttttctgttctttttttttccttcaatcattggtatggtgctgcattttcatacttaggatgacagtgtcaatctttaattttttaccatttgatcttttgcctatgttaggactgattattctggctacttggctagaagatattgctgtattttacacttaatgttcatagtaattaccaggacgatgcatgttattgcacttgaaatggcactagtgagcaatttatcctgcagcttttggccattggcatcttaaaatgttattattgcctgattattctttgaatcttctgttgatgcaatcttgttcattaactgcaggtttcttcaccgagggaaaggcagaaaatgttaacttaaaaagaactgaaaggtccaccctcttccgtttcttgggatagttaaggaagaggagctgagtggtgatgaacttgaagaatttatcaaggatcgttattcaagtcgagtgaaacacaccccttttgatggctccaccaatgtacaggatgacgagtttaccgaggatggtctattgaaagagccagtaatttggaggatcaaatgcatggtttgtgatttactagtctttgaccttacattgttaatctagtatttggctgcaaggttctgatttgtttggctgcatttcaggttgggcgtgagcgccaaattgctttctgcctcatgcaaaagtatgttgatctgcaaaagtttggtaccaaagttccaattatctcagcatttgcacttgatcatgtgagaggatttgtttttgttgaagctgagaaggcctgtgatgttacagaggtacatgatttgtggcttccattgtaaaaagatacccacattgaggagagcaagtcaaatacagtagatgtaatcatttattcattgcattatgtggtttgatatcatgctctgtgaagggttgagaacttattcttttatctgctactcctacttaaattagcactgtcttctttttgccatttctcacacacttcaattcaattcactcttttgtgtaacataataatttgaggtttggaactgaaataggctttacatgtgtagttctgttactaaaatcatagtttctatgataatctaggaaaaagttgtttgctcaaagatttcttcctgtcctgcttgtaatctgacctactgaacatttgcatttcttactacaggcatgcaaaggattttgcagtgtttacataagcagaattaattctgttcctgtagctgaagttcctagcttgctatcaagccgcgcaaaaccatttgcaatatctccaggtacatgggtgcgcatgaagactggaatttataaaggagatctagcacaggtatgtttaactcagcttcttacttttctgggcccccaacccttttacatatcgtcacatttttttgttcttacatcactacacccctgtgaatttgtaggttgttagtgcagatgaggggcgaaaacgggtgatgatcaagcttatacccagagttgatctccgggctatttcaaaaaaaattgtaattctcttatgccctctttctgtattatatttatttttggcagtaaatgatgcctctcatttttagttggtttcatttaagttgtactgacttatctatatcaatgtataataccccaagtagctttgtgaaagtcttgtgaaactctaactaagctaattacattatatattgcctgtacctgttgaaattcttacatttccaatgatgggtatgtacctcgtcctttttccccctggtggtggggtggttaggttggagcttcatctttgtcagagaaacttcacatgtcattgttgttttttggtacactggataatgtgacattccagtgaaaccatgtggtgtctattgcgtatttccattttgctcaactgtagtatcatggcttgggtggcttatattatactgttgtttttatctttgattgtactattgtcttgttcatctgtttttcttgttaacaaccatttctttttatttttttcttccattggtcttgtccttctaatagtttgagtttgctaccacattatttatattagccttcaccttgcagggtggtgctattccactaaaagaagctgcaattcctgctccacgtctaatcagttcacaagaattagagtaaatacttcctttctgtttccagtgtctctcttcatgcactcagtatccttctcatatcatttgtttctacctaggcttttgacactgttgccacgatctcattgatattaggttcttcggatctcatattgaaaggaaacatgatcgccagacaaatgatttttatgaagtgcttgatggtctcatgttcaaagatggtttcctgtataaaagggttgcacttagttctttgatttactgggggatacaaccaacagaaactgaacttctcaagttctcttccactccaactattacaagttcaactgatgacttggattgggtctccagcatgtatggtcctaagaaaagaaacgttccaaaagaaccggatatggagccttcctcttcgaaagcttcatcttctaaaggaaaatactccaaggcatcttctaaggcatccacttctactgaagattacgaggataaaggatttaatctccatgatcttgtactctttgggtcagtctctgttatgcaatccttactaattgtcacaaaagtttagcagatgtcatccttatttttgtttcatataaacaggcgaagagattttggtgtggtcattgcttttgagaaaaaaggtcttagggtaagattttttatagcacactattgtaccacatccatgatttttgtctgagaatata

SEQ ID NO: 27678 - DNA, 3716 bp, Oryza sativa
  unsure (1)..(3716): unsure at all n locations
ttccctttagcaagaattggtgtaaagttctttttgcccgtaatccgggaaaatatgcatcttttttcgttcttttcaagaaaacattcacctgaaagaattctaaaggcaaaattggttccattccacttgaaaggtcactagtttagatatataccattgaaagattgtggtgcactttaataccatcgaaaggtacatctgttttaatttttctttttaccattccatcctttgccagtttggttttttgctatttttccttttatttccacaccaaaagggtgtgcgtcagtacatgtttgccctctactgcagtgctgtttggtttcagccaagcacgaagcagtttaatcaaccaagcaaactgacccccaaattcatgagaaaaccatccatgcctacctcagtaaccttgctagttgatatacctccatcccaacaaaatcccctgctctatgccctctgttgcaccatcctttgatatcaatcaaacacagcagcacacagaagtgacaagtggtgactggtgaggtggtggggccatgtgtggaggttgttgtttacgaggatgagtagctggacacctcatccttgctgggaagcgagacggtgccatggggaagcagccagggatggctttggagaatcttcacaggagcaaaagggatgtgagaagaggattgagggagagatggggtgatggaatggaaattgaagtgagcagagtgccaaaatcgtcaacagtaacagttttaaggacagggcatgatggagaagtaagaaaactgaagatcttaaagtgtgcccatgaacttcgatggtatagacctaaaacagtgatatttcaatgccacgaaaccaatatttccaattctaaccccggtcaaaaaaaatatttccaattctaacataccaaatactaacatacctgatatggttattgtcttctctcaacttctggtaaagtcgtaatttaccatattttaggaaatattttggactccctcttcttattaactgttagttagaacatcaacatagtttgtgtatgcacttgttttatcattacattttctaatcacatactatatttatgaaaaatacttaactacatccaagaatatttcatgacaaatatactaatatcatttttacatattatctattaattttggtatatatttgtgatttaagatttcttggtttgactgcacgcatcttaaaatgacgtctatctgtgaactgagggtgccttttaaaatgaatgtaacgcattattctcataataaaatgatttacagcactagtctatgcttctacatttctttaattatgagaatttgattcctcccatttggcacccttactgattcatttaatatttttacagggtaagcaaggagttgttaaacacttgtacatgggcatactgtttatccataatgaaagtgaaagtgagaacagcggatttttctgcgcccagtgcagttcatgtgaaaatgtcaagaagcggaaggaactggcaagtttcacttttggaaattcggtatgtagaattgcagatacaatgcatgcactgttctacttcctctattccatattgtaagacggtttaattttgtcctaagtcaaacttctctaacttcgaccaagtttattgtaaaatgtaccatatctacaacatcaaattagtttcattaaatccaccataaaatgtcttgattgtgtatttatttggtactataggtaattatttttctataaacttggtcaaagctaaaatttgacttataggacataactaagataccttacaatatggaacggagggagtacttactaaagaaggtttgatattttctgtgacactttgtttttgatgtaccaggacgataatcctattcccatgttttcatatgaacaaaatgagcaacgggacagtaagtgttcctggagattgatgattttgtcagcataaaatagtttttttccctgattcccttgatcctacagatgaaaggccttacaggagcactagagaacaacttttctcaattggggagatgctgcgtattcgaaagggtcctatgaagggctatctctgtcgagtagttcgaatatttcgcaatgatgtaactgttaagctagattcactgctgaagattgtcacaggttggttacttgagtatccttgcagctgttttttgacagtgattgactacttctgtgtaatgtttgcagtgcaagctgagtttctttcagtcccagctaaaagagggtaagcagcttaccatgcttctcttctcttttcattttggggcctgctttagtaacgctgatttttgtaaccatcatattgttgcttaatgccacttacatctgtgcaccttattgcattaccagggataactcttctggtgctccatctggtccttttggtaagtgcaagtttcatgcacactgcaactattgccaatntactcgctgctggcttgctgccatggagtttgttacctatgctgattgtaatgtaggttcagaagccgataaaccctcatgggacaatggattaccatcttttggaaggttctttcttgctttccagcttcctactttgtgaatgttttaataaattgttggacttcagatttcctaatcaaccacctttatccgaccccttcccaccaatcaaaatgaacctatgcggttgacttggtgtatatcattggttggttaaataaaaatcctcgactgttatttatatttgcactattcactgaattgttcaatcttgtgcagtgattcctggcaacccttttcaagtgctgcattaccagttcagaatgcaggtatattcagtcgtaggcctttctatttggtggtatagtttggctttgttaatttttagtattgtgaagtcatgatgttgcaacatttaacctgttcaaaattgcttgctcaagtataactaggggtggaaacgagcctggctcggctcggcttgcaatggctcgcaacaagctagggttggcttggctcggctcggttagagaaatgagctaaaacatgagctcggctcggctcgtttcctggctcgagccagctcgagctggcttgcgagccttccgttgaagctatataatttgtaatcattaagaaaagcaataacaaatcatcaacatgtaaaattaaaataactttatatattcaattcatcaaaatctagacgataaattacatattgacaaataataactccactaaaaaataaagtcatccatacaaatacatgatggcttaggctcgcgagccaaatcaggcggctcgcgagctagctcgggctcggctcgtttcagaaacgagctgaaaatgaggcttgggcttggctcgtttggcattcaagccgagccgagctaagcgagctcgagccaagcctgagctgagctcacgagcccaagctttttttccacccctaagtataacacactcaaccagttatccattccatgtctcatagaagtccttgaatttttgtaagaataggcgcaacaggggatcaagtgggctctctaggattggtagagcagataactcaaatccgtttaatttggtgtgggggtgaagtcacaggtggaatggttttttattgggttaatgggacaactttttctacaaaattgacaagtcttaaacgtgaacagaaaggggtgcag

SEQ ID NO: 27679 - DNA, 2518 bp, Oryza sativa
gatccatggtgtaagaaaacttcatcttctgccaatgattctgatccatggggtacgaaaacaaaatctgcatctgttgatgtatggaacaccagtaccacacaagtagagaactccagtgacaatgcatgggataaacaacctggaggtagtggacctaatattggtggaagctcttgggacagaccagcaactgataaggaaagtgaaaaaagtgacaactggggtgaggcatgcaaggagacagagaaaactggtagtgatacagatccctggggaagcaaggtcaaagagatagatctgaaagaaacggatagctggggaaaggcttcaatgcaaccagagaagaagttggaggatgatagtcaaggatggggccaacctgttggcaagtcaaaccaagaccaagaaaaaggtgcagacaaatgtggggcttgggatactgttattgctgggtcatcttcgtctgttcctggcagaggggatgatgactcctggattaaaactgatactttgcctgttgctcaagatgatgcctggggcaactcaaaagattgtagtgatggggcagctgggtggaatgaaactagaacatctaaacaaagccacagcactggaggatgggatgctgctgctgccaacctgaatgaatcatctgatgtggatgcacataaggactcatggggcaaagcaaaagatacaacagctaatgctgaagaaaaaaataatgaaagtggaaactggaacaaagctggaccactagacaaagtttgtggcagtgattggggtagtccaaagttttccagtggtgatggtccatccagctggaacaagggagacaaaattggaggagattctcaaaacggcagctggagcagacctggtggaaactttgaaggtggtcgtgggtttgggcgaggacggggcagaggcaggggccgagaatctggggatttcggtggcagaaatgaccaaggaagctggaagaactcagggactagtgacagttctggaaggccctcttggaggtctgatagtcaagttgagaaggaagtgggagattctggtggatatcgggggagaggaagaggaagaggccagtatggaggacagggaagaggagacaatggttggagaaatggaggtcaaagcaattttgagtttggaaggagtgatgctgatgcaccaaactggggaaataaaggtgtatccaataaaggttcttgggatagtggtgacaattggaatgccccaaagtcatctgatgaaaatcaaacttccgcttggaacagttcagaagataaaaggccatctggaggtgagcggtctgtttgaaattgataccttgtattagatttgcatggtcaatatacttttgtctacatgtgcatgtgttttcttctttatgttttggatcccatatttatttgaatagtgctattgagatttgaataaacttttttttaacttcaacaggagcatgctacttgaatttcttgctttgattgctattgtggttacttaggtttagtaatatggtttctacttagatttaaacttgataatgctctttttgggtattggtaaacaaaatgatccttaggtttagcaagatggtgctactctgggtgctggagggtatcaaaactatttgctcgaagttttatcaatacaagctaatgcacgcgctttgctacgggtaaaggaaaaaaatatcataatattgtctaaaattgataaaatcatacttcccatgtgatagggaagactcaccttaatttaattttatatgttgctatccatttagacttagtagttatgtaatattaagaagttcaaaatatgtaaaaaaaactgcaatgagagtaggtagggtggctgattcactgcaaccaccatgaaattctttttaaaggagtatagatgttgaagggctttatttctgttctgttgcataggtcataggtgaacaaagtgattgttgataagttctaaaggtgaagataattaaatttagccatatctattattctacttgatgttttaagctatagttgtgcgctgacttgtatatcttgtaggccaagagcaacaaagtggtgcttgggctagcaagatgacttctactgctggcgctgaggataaaagtgatgcctggggcaccaaggcggaaggcaattctggtagcactgggggaaagtgggagaatgcttcatctggtaattctgatgccaagtaaatttcttgttctgttcaatggtggatatactacagagcttatggtttcctatcatgttcaggggaagagcagcaaagcgacccttggggaagcaagatctgttctaatgaaggtgcttagaggatattaaattgtctctctttgttgtatgcttgatttttgagctaaataattgattttgtccatgtatttacatgttgccttgcaatgcttatattatactactaacttgtaggcaaagaacaagaaactgacccttggacaagcaaggtgacatcc

SEQ ID NO: 27680 - DNA, 1185 bp, Oryza sativa
gaaggtcgcgtcctaaaacctcatctatttaagcacacagagggaatgaacccttgtgatctttgtcaacgccatttatatatttattttccagatggattgcaaactgtattgactattgagcaagcaacaacttagccacctcgttgacaaagggtagttaaggagtactccctccgttacaaaatataaggcacaaccactcttaacccaaagatcaagaaataattattattatctcatagtttggatcaccttaataaatataatgcatgcatccaatagaattagagatcttgagggtggaggacttaaaaaagcaataatctaatggagaagaggtcctaattaattgtgtgcatgtatacatgccttatattatggaacataaaaaaaagtagttgtgccttatattatggaatggaggaagtactaatttaagtattaaacaatgggttatttttcatctgtcatgtcttacggttataaatagctagaaggtcctctctacttgtgctgtgtctttgtttttctttcacatttctagcaggcagagagagcatcatggagctcaaacttgtattcccattgccttcctcttctgtctctctcgtgtgagctctacctcgcagtttttcacctcgatgttttctcttggagactcgtacatcgacaccggcaacttcgtcatcatggccagtccggttgtgcccgtgtggaatgacaagcttccttacggcatgaccttctttgaccatcctacagccgcatgagtgatgggagagtcatcatcgatttcattggtaagttaagcaacaccctaaataggtattcccttcgtcccaaaataaaccaatctcgtactaggatgtgatacattctagtacaacgaatctggtattttaccgtgagaattaaaaaataggatttccactatgaacttgcatgatcagtttggtactatagttctaactttgtgttgacatggtttctagccgaggaatttgggctcctttccttccagcctccctggcgaatagctcaagtgtctcccatggcgtaaacttcgcagtcggcggcgcgccggcgactggcgttgaatacttcgagaataacaatattgtgccgtttaagcttctgaacaattctttggacgtgcagttgggttggtttgaggagctcaag

SEQ ID NO: 27681 - DNA, 4367 bp, Oryza sativa
gtcctccagaatcccagccatttcggtatgtaatgttattggcttattgagttatctgcactaactagtttataatttttattttattttttccacacaatcttacggtgtggaaatacttcccatcataacttgtgaattattaaattatttgcgcgttggtatcgaatataactattatgctactctctctgtcccaaagtatattaagttttagcctttagcacaggtattaagaagagggtacaaaagacctagttgacttcttgggataagtgaaatatactccctccataaaaaaattattggattatttttagggatagagggagtaggatcggactagttatgggttataataaagtcaagggcagagataatacaggtagtttagtggtaaagtcatattttatactgtaagcattatgtttctatattttatgatggagaaatagtatattcggaaacactacatataaattgttacattttgaacggagggagcattgctcaataacacagtgacttttgtctgacatttgctgtacttatgcaggagtcgccgccgatggcgttctcaaggcttgctgcggcaccggcggcgcctacaactggaacgccagtgccatctgcgccatgcccggagtggtcgcctgtcaggatccatctgccgccgtctcctgggacggtgtccactacacggaggccatcaacagctacatcgcccaggggtggctccatggcccttacgctgatcccccaattttggctgctatcccccactgatttgctgaaaggattgatcaaaaccatggaagaataataatccaggcagattgtgtggcaagtctgtataccgtgtgcaatcgatcgatctgtggtttgacaattgacattcagattatgctcaagaaataaataagtgtaatacagtgtgtgcacaccacagtttgtaaaagagaagaaaatcattttctaattaaccatcctggttctgagtgctatcctgatcctctgttggaaccttaactgattgtgagaggatgtatttccatgctaaactgtctcactgttactagtagattttaactctttcgtgtgatttgtcaacttggaattccaagaagctatctgtagttctgtacaacctgataattaacaagaaagttgtttcaataaattgttgtcatctatatagaaccatcaagcagtaatcttcacgtgttactatcattaaggatcaactcgtagtacggtttttttctttctaaagagccgtctatcaaattgcgaaaccagataaaacgtgtaagctttgatatccacggcgccccccgtgggcggccatggtggatttcggactaaatattgacttagactgcaagttgtaatcgttatcacatttcttatgtcctgcaatcataaccttaacctttctcaacctttatgctctttatcaatacagatctacattttcaaacctttgactgcaagctctaccgaacaagcaactgcttatctcactttttggcacatatttaaagttttaaacaatctactattttacacttcatctgatcataaatatttcacataatggactttgaaatgaaatttaccattcatattattcaaatttagtgtaaatttttttaaaaaatataagtcatgttttaaatacctttgataataaaacaagttaaatacctttgataataaaacaagtcataataaaataaatagtaattaaaattctttaaaaaaagacatatagtcagaagtcatttccaaagtcacctgcaacaaaaacttatgaccggagggagtagtattgaattgtacctccatataacccaagcagttagctagcactcagctctgctcttcacatttctagtaggttaggtagcatcatggagctcaaacttgtattttctatcaccttcctctactgtctctctggtgtgagctcaacctcacactatttcacctcgatgttttcctttggaaactcctacatcgacaccggtaacttcgttatcatggcaactccggttatgcccgtgtggatcgacaagcctccttacggcatgacattctttggccaccccacgggccgtgtctgcaatgggagagtcatcgtcgatttcatcggtaagttcagcaatatttcgattcggagaacaatacaaatagttcaatttcctgaaaattacaatgacactggaagaataatcggtttgtttgtagccgaggagtttggtctccctttccttccagccttcatggcgaacagctcaagcatctctcatggcgtgaacttccccgtcggcaccgcgccggcgatcgactctgcattcttcaagagaaatacattgcagataagcttctgaacaattcgctggatgtgcagcttggttggctcgagcatctcaagccgtcgatttgcaacagcacagatgaagccaatggtgcgtcggctggaattggtaacaattctctgaatcgaagacagcatcgtactgcactcttctccacgagcctaaattgacttcaagagaccgattggtctctacagggttcaagaactatttcagcaaatccctcttcatcgttggagagttcggggtgaatgactacaacttcatgtggacggccaagaagaccgaaaaagaggtcaaatcgttggtgcctcaagtcgtggaaaaaatcaccacggccgtggaggtaaacttcgatctgcattagtatcaatttgcagttttactttgttactatattcgttccaaaatataagggattttggttcccatcctagtactacgaaatctgaatagacgtagcactatatacatatattttagaacgaagagagtactatatacatattaattcacttgtattcttgtttacattgcttcaactttgggtattgcagaggctgatcaaccaaggcgcggtttactaggtcgtgccgggaaacccgccaatgggggtgctcgccaattgtcctcacgctcttcatgagcccgaacacgacagactacgatggcctcggttgcctgcgtgctgtcaaccgcatgtccaagcgccacaacgcaatgctccgtgcggctctcgacgggctcaggggcaagtaccctcatgccaagatcatcttcgccgacttctaccgacccatcatccaagttctctaagaccccgtccgttttggtatgtatattttctagtctcaaaaacgagtctcctctaacgtactactctttgatatacgtcactaacatgtgagcttattgactgtgggatccacatgtcagccactcaaaattagagggcagtatattagacgatccgtttgcctagctgcttactaatcaagtacagtgtcccgttgcaagatttggttcgttcagttttccataaggaaaaaagaaagcaatgaccagtactacgaaatctgaatagacgtagtattaagatgtgtcacatccagtacatggtatatccatctacaatatatggttaagtgatttgtacatttgtgatgtgcaggattcgccgccggtggcatcctcaaggcttgctgcggcggcggcgggccgtacaactggaacggcaacgccatctgcggcatggcgggcgcggtcgcgtgcgaggacccgtcggcgtccgtgcactgggacggtggtcactacacggaggccatctaccgctacatcgccaaggggtggctctctacggcccttacgctgatccgccaattttgacagctattcgatcgatcgctactgatctgattgcaaaggaaaccatggatgggagcaaagcttgctaatgtgcaaattatcctgtactgcaatgaatgaattttgagatggttcgcgcttgttaggaaaggttctctgtcttgtctccgtccgaacaggagtagaagtataatggttgggtttattcttacatcggtaattgatgatatgtgagcatgacttaaaagatagggacagttctcacccttcagactagtcttttgaattgtctatacttataatctaaagttggatctgtggtggagcagacccaattaatctggatggaccgggctgcacactcgcagtaggactgtacaagaaggatttgttcttcctgtctatcaggtggttcaggtcaagcagttgcttttgcaatctacctgctcggctaaaactctttctctctttttttccccttctaaaactcgtatggacgacaggacgatgacgatgccttgggtggtgggtatgcttctttgttctgaaagatggttattttggtaacagaatttctcattgtatccttgcacattaattatggctctttcccttagctta

SEQ ID NO: 27682 - DNA, 1278 bp, Oryza sativa
agggtccaataagagcagactatagattttggtgataattaattacattaattataagagcaggtataatagcatactataaaccatgtataaacacatattgaggagataaataaggagagataaaagcagcggactacatatttaaagccagctgcagcagactacaaaacataatgtgtatgtgactagagataatttagagctagtagttggctatactattaaactcactctaaaacttactctaagccttagcgatgtgtttactgtgctatggcatataataatataatataccataattgatccaaaattatcaaaacggatgctaaaaccataacaggggattatcaacgttacaggaacaaagcaggggtctgcggataacaaagtaattgcattgttattgtcctatgtatatcctacagcagtaacataagttacataacccttgtgaagcgcacgcaaccatggagaaacggtgtttgagagcttcatcattatgcccagaggcgcatccatcaaactaacacaaaatatcacatcgtcaaaacaaaaggagcataaaaacacctgggaatcgtagagatggtgatacaaagctaccttaataaccgtcagcaatagataatgttctgctggaattaaggtaagttcgtagtttagagtagcatggcgacgttattactaataatagcgttctaagtctagaaagagtagaaatatacagcaagttcaagctgcatggcaaccattatatacatgcactaatggattgcagctgatcctggatcgagcttaccacccaccattgccggagctcccacccttgctgctgctgttccatccgccatctgccttgtcccaggagctgccgccaccacctccttgggtgcccttgttactgttcccgccatccgccttgtcccaggagctaccgccgccacctccttgggtgccctcgcacttgctgctgttccatcctccatccggcttgtcccaggagctgcctccaccgacttgtctcccgctcccctcgcttttcccccatgatccttctttcttttggccatcttctgatccaccccaagaagattttcctggggtcgtacctgaatcccttgttcctccagacgaattccaggtatcctcagtcttatttttccaagaccctcctccaccggatccaccaccagtcatgctgtcagcaggagcaccccacggattgtttccattgtgtttttcctgcctggtcatctccaccagaaggttttg

SEQ ID NO: 27683 - DNA, 676 bp, Oryza sativa
tgccacatagaaggatcaaatcctcacgtaagtataggccattttaggcatttacaaatcaactccaaccaccttgatcggtaagtgagcaagcttctcgtccttgccttaccaggaacccggtttgtccgagcccgccccggcgttcccaactattggcatgcgaggtttccctgaaccgactagttacttagccagggtgtcccattccaccttgtggttgcactttgattaggttcgatgagtttcccacaggaatcggtccttatatgtgaatacgggacagtgccacataggcacaacccccgcatcgcgagttttcacaattcattttattttcaaacacaccgacaccacatgtcgggttttgaaggcttcacaaacccatttcccaagttttcgacaaacaacggtgtatgtgggatatttggtatacgcgctcagagagcacgaataccgaggtaccacaagggtggagcgacaaggaatcagggtagtacgacctacggaaattagtgcgactactgggtaggtccgtcggtttggcatgcaaaccgaggccaagcaagttaagtgtgtgattctaataatgcaagttgcaaacaaaataataatgacttttcaattataggagcaattgatcaaagggtgatttgccttgctcaaggtcttcacg

SEQ ID NO: 27684 - DNA, 978 bp, Oryza sativa
ctgcaccccccacgcaatcgacgtgatgcacctcactaaaaacctttgggttaacctttttgggtttcttaggggtttccggaaggtcaaaaaatacactggaagcacctaatgatctgaaccatatggaacaaccggcgaccttcacccggaaccaaaggagaaaggaagccattacttgagtccagccagctacactcttagcaaggcagagaaggaaagtatgtttgaatgcttggagagcataaaggtaccgtctggatactccacgaatatcaagcgaataataagcacgaaggagaagaagttcacaacctaaagtctcatgactgtcacgtgttgatgacacaactgctaccagttgtaataaggggtatccttccagacaatgtccgggcaacaataacaaagatatgtgcattcatgaacgcaatttcgcagaaggtcatcgatccggatagattagaagcccttcagaatgaagtggtgcaatgtctcgtcagttttgagttgatatttccaccttcatttttcaatataatgacgcatctgctttgtcaccttgtgaaagagatccgtattctcgggcctatgtacctacacaacatgtttcctttcgagaggtacatgggcgttctgaagaagtatgttcgtaaccgtgctcgtccagaggcaagcatcgccaagggttatggaacagaggaggtcatcgaattttgcgtagaatttatcgaagaccttcgcccaatcggggtacctgaatcacgccatgaaccgagactacggggaaagggaactctcggaaggaaagcaataacgacggtagacaacaatttattccgtaaagcccatttcactgttctgcaacactcttcattggtagctccttacatcgaggagcacttggctctagttcgcgccaggaacatcggtaagtccgatgcatggattacacgacatcacattgatactttcccc

SEQ ID NO: 27685 - DNA, 1193 bp, Oryza sativa
tattaccaaccgggactaaagatcccggtgatctttagccccggttggtggtaccaaccgggactaaagatcttaactttatgccccggtggtgattcccacccggacttatggtccccgggatcctttgcccacgatggtgctaccaaccgggactaaagtcccacccctatatatatgtcttcttcctcctccagctgcccgagcaagcttcaaaattacttcaaaaaagaggggaggtcatgccaaaatttctattgaatttattttggtgattacatacaaatcggaggtgcctaaaaggtttgcaacttcatcctccaatgttttttttttgtcatactacatttgcacctatgttttgcacactttttttgtctccaaaatttagttgtaagttgatgagagagaaaatgtgtgtggggaagaaagaatatatagaaatttagttcatttgctaaacaaggttttataaaatagttgagaaggaaaactctagtgaaagttaatcttaaataatagaaaacaaactaaaatgaaaattaaaagaagtaaaacacattaaaattagtttaaaactttacaaatagtttttaagaattatttggtgtaatattttatgatttttgtatgaataaagatatcttataattattgtatgactgtcattattgtaagaataattatttgtgtgcggtttttttgactcatgtagatggatcggcaatggatgtacgctgaccggcggtccaaagagtttattgacggcgtgcactattttttgagagtggccgaagctaacaggcaaaggggttttatttgttgtccatgcaataagtgtaagaatcagaaggagtattctgcatccaggactattcatttccacttgtttgagtcggggttcatgccaagctataattgttggacatcccacggagagcaaggtgttgaaatggaagaagatgaagtggaagacgacaatattccggactttgctcagtatgttggatttgaaggaaatcaaacgggcgaggaggaaatagctgctgatggtaacgacgttgcggatgatcttggtcagatgttgcaggacgccagggaggactgcgaaagtgaaaaggaggcccataaattggacaagatgttggaggaccacagaacttcgttgtacccaggttgcgagcaggggcaca

SEQ ID NO: 27686 - DNA, 2484 bp, Oryza sativa
agatcttgtctttgccacgttggttaaaaagttaacggcgtcatacattaaaatacggagggagtagaataagtagatcttggctttgccaccatcgttgaactataaatattacattcaactcttgtttcctcttctgttcacatacatcttatgctaacaaacaaattgtatattttaaaatagacgaagtattaactagcagcatttcagtgtacaccaaccaattacaatggatatttatctcgtggagacaaacaaccaatgcacggagcagtggacgatcggttaattttgggctatccactaaaaggttggaacaataagttgttgctgggctaggtcgactcagcaagcttgaccgactgcaaactgcagagttagcccactgcaatggaaaagccggaaggcccgatgcatccgattcccaggagtggtaggccattttaattattcgtcttatttaaaaaaataagttaatatctttttttcatcattatttattactaaaagaactttagcattacttatatttttaagatttgcaaaaaaaatgaatatgacgaatagttaaagattgtaaccaaagtcaacgctgaagtatattaaaaaacggagggagccgtgatcttttgctctgtcgcgatacgatattcacctcagaaatgtcctagaagcccttatgttaacgcacaaggcacaacattgctcctgcgctaccctgccagctgatttgcttcccacttgtattgagtacagagtactcattgttagaaataaaatatgtgtggttagagttaatagtcaaatgcaaccatagagataacatacaaatatacaatcctaaagttaaaatataattctagatatagaatcttaaatataaatctgctataacttcttaggtagtctagtggttgtagtgacctgagtagtaccccaaggttttgagttcaaatctctttaggaacgaattttagattgggttgttcgcggggctaagttccctatttcatatatatccaataggatgtagaggccgggtaaaaaaatacccttctctaaaaaaaaataaaaaataatctgctataacttgtctaacttgttttgtacttcaactattttacctcatctgtactatacatatatacctcacgctcgtgatgtaaagttggaagcgttctcacctcccggaggaggccgcgtgattgtatttatattgtcaagaacagcccttgacgtggcacttacagagaatatgatcaagttgttacaacggatgttatccatctcaactaccctattatctagccagcaactcaactaactagaagataaaacgtacattgttttacactcctcctcaatcataacttggacaagttaagattgtacatgaaatatctaagactctgtatagacaaagcctttgtaaacccatcggctatttgatcttttgatccaataaacctaatatcaagcatcttatttgctactctttctcttacaaagtgataatcaatctcaatgtgctttgttcgtgcatgaaagactggatttgaggacaaatatgttgctcctaaattgtcacaccataacacaggtggttgagcaatctttactcccaattcttcaagaactgactgaacccaaattaactcagcagtagcattggccatagctttatattctgcttcggtactagacctaaacactgttggttgtttcctagcactccatgacacaatattaggtccaaagtaaattacaaaacctccagtagaccttctgtcatttagactaccagcccaatcagcatcagaaaggcactgactagagtagaactagacctcttaaagtgcaaaccaacatcaacagttcctttgatatatctcagtatacgtttcacagccaaccaatgttttgaagtaggagcatgaagatattgacataccttattaacagcaaaagccaaatccggtttggtgagtgttaagtattgtagtcctcctacaatactcctgtactgagtgctatcctcagtaccaagaggatttcctttgtgtgccatcaacttctctgtcacagctagcggcgtggaagctgatttgcaatctttcataccaactttagttagaaagtccaaggcatactttgcttgattcaatagtatatcatcagatactttcttcacctctattccgagaaaataatgtagctcacccaagtcctttaaggcaaaatcagaccttaggttcttaagcaaggctgcgactgcatcactagaggaacttgtgacaataatgtcatccacataaattaacatatacatggttattccatttttattataaatgaacagggaagtatccgcctttgacgaggtaaaacctagttcaaataacttgtgactcaacctagagtaccatgctctaggtgcttgttttaatccatagatagccttatcaagtttacaaactaggg

SEQ ID NO: 27687 - DNA, 7260 bp, Oryza sativa
gtggggcggccgccgcctccgtagcaccgctggatgcacatggggggtgcccgccgccgccggatccgcgcgtggggcggccgccgtcgccggatccgtggggccgagggccgccgccactgtcgcgtcgccagatccgtgcggggggcggccgctgccgccatcacgcagccggatccgcgcgggggtggccgccgctgccggatccgcgcgtggggtggccgccgctggatccggcgcaatcgtcgcgcgccacctcgtggtagccgccgcccaccatatcccgtgcttccacggccgccgtgcactgccgacgctgtcgccgtgggccgtcgtcgtcgcctacacccgccgcacgctgccgtcgctgtcaccgagggaggagaggataggaggcgtgacgcgtgagagaataaaggagagggagggtaccgaggaaatttcgaagtggataggagggaaaagaggatagaaccgaacgggaaatcagtttattttcccgtgcgggcgatagcctggcgccggttttctatttttccatacggtttcacttacgaaccgtatagaaccaaaagggggcagcgtccaggaaaatcaatcgtgtactagtgttacatatgtaaatacttacactaggtttatattataattacatttgatatacttttacctaaaaatatgtcgctatatttttagattaacccgtacttatatactaatcgtgaatacgcctcctaatataactcaaaaaggtaaagttcaggtatgatcatgatatacaagtgacctaatatttcgtagataccatgatataaacccataaatcctttcgactatgaaaaccaacataaatagttaaccggtactaattcaacaatagcttacttattagtgatgttcctattattatggcttggagcgtttggctcataaattaacaaatcatatggcttgaagcatttctcaatagaaggatttagaactgagttttgccttttttatgcatagagcaaaagatttttataaactgcatatccaacaatggctagaaaacattacacaagcaattttgctatatatttgttaacattttttctcctaaaaagttgatatacatggattgtaccgcagtataattatactataatttgcatgtaactttcatgtaattttgaatcgttagatttgtttcaaaatttgtgcaagtgaggaaggaaaagattcacagcgcgcgcacatgtgagatgattcattcccacgacctcagcttcaccgaaatagcatcttatggagatatttttgaaagttacattatagttacagtataatcatatcacgattgtactataattgtatctgtcaaatttttgaaaaaaaaaattatcgacaaatgtataagtgatcccttacacaagtatatactttacagttattatattgaatctagaatgagtttggagggagttctttctcttcaaaccctctactattaattcttcctcttcgtacgtcttattccccctcccctctgtttcttttcatggggatccaaggaggatgctcgagcccccgatacaaacgttggatccgcctctgctgttcgattctttcatactaccatgcataattttctaaaagaacaacttcgtgcaacggtgcacttaatcaaattaagtaattagtacccttggtgactaacagtttaattagtactaccgcgctatataaaatagagattacactctcatacgtgcactacacgtcggtcacgtacgaacccatagagttcgctggccttagtaccaacgcatgccccgcgcatgacgtcggcgatgacgattgcgaaacgagcgccgcgcgcgtacccccgacgtgaagatcccgaacaattcctattctaatatccaagctatctcctctaccccctggtggtatattcggcgcgatatgtctcgtgccgccagccgagaaaggaaaacgggatcacgcattcaacggctcgcgttcacattacgtatgtgcaaatccggccaagtggaacggacgcgcgtcgcgcatatgcacatgcaacaggttcagcgtatctcgcgttttcgcgtggtttgcacacgccatgcctgcctgcccctccaccgaggcgtatcatatatggatgtgttgaacaaactacaaatttcaaattcttatcttgtcggtcaagtattaattcaaggaagacattgctttctctaactagctaggtcaagagaggtgcagagcacatggccatgtatagtttccaatggcgcagtcaacctagcttgttgttatagatataaatatagtcaatataggagtatatgctggtgttacaacggtatatatgaataaccattggcagtgatgtcaaaggggttgatgtggccaccactcttcccgccttgaactgctaaatttgtttccaagagctagcatgctttacatgcacgttagttttaatatgtcaattagcttgtggaggtgtttgtatgggactatttttttagatccggcaaaattttttactatgtcacattaaatgtttgaatacatgtatgaattattaaatataaataaaaaaataactaattacacagattgtgtgtaaattgcgagatgaatcttttaagcctaactgctccatgatttgacaatgtggtgctatagtaaatatttgctaatgacagattaattgggcttaataaattcgtctcgcagtttacatacggaatatgtaatttgttttattattagtctacgtttaatacttcaaatgtgtgtccgtatatccgatgtgacacgccaaaacctttcacccctcgatctaaacacaacctatgttttcaaagacacacaatctcgcttgttcggtccatccatactttatgttttctcatccttatcgaacattcttcctttttatctagagcatgtactctattttatatgcgcacaattgctctgtaatatggtatttcgtgatgagaatggaatagctagaccaattctatctcggccactactttgttgacttggcagtaactgagtaatctatgggcgtaagctcttggtctcccttaatgcttttttgtcacttttttgcgagttgtatgaagtagtttatcaattctaagtttttgttaggtcagttagtttggtctcaaaatctttgagcaagttatataattcttgcaacatttaatactcccaacgtcatataatattgtccagaggccggagtacctacttaattaaaccccatcgaacaacacatacagtgaattactaccaagaaaaccttgatttgtaataacatatattgtgatttactttatatctgtttataataatcaattcaaattcaattatgttcaacaaaaaaattccaagacaattgttcagagagacttcaataaaatttttaattgcttttatcaacatgacatagcatgtattttaaggctaaaaattcttttgaatttaaatatgtaaatgacttaaaaaatatcatttatcccatatggtatgtaaaacatctaatacattttgtaagcaataaaaacaatatttggtgcacggaaaatagtattataatttgtatgaatacatttttttttcttggaacatcctccgttttacaatggctccaattgatttaggttaaataatgctaatatgcaactgaaagttttttatagattcttttgaagtaaaatataaatttggaaaatacaaattaaattgcatccatggtttatgtacttgaattttaaaaattagtaacataattagaaaattcataaagaaatacttgttacaaattggaaaaaaataatttacataaatttgatccaaccaaaataatgtttaattctctcttaaattttgattttattcagattcaagcactatttttaagtagtcaaattatattttatgttcctttcaaaaaaaaatttgtttttaatgatccataagagaggtgataagtttttgattattttttatggggacatgtactaatatttgttgaaataatatatgtactcgggactaaataacattgccacatcagcaccttgtcattaatactacttcaaatttagtcaaaagatgaaaaataaacattatagaaagtttaggaatatacatagcatccaattaaagtttatgggtggattttttaccttaagggatacaaaatggaccatttgcttaaaacaatatgttactgatcagaaagttctttcctcgtgtcctagatgcacatgaacatgtagggaaatggaaacagtccactctgccttcattaaccataagcatagtttgattcacgtacttcaaccataaaaccaggtataaagaccccctcaattgttaaaccgaatcaatttacctcgctggatagttttaatgatgattggtcttatatcgcatttacatggcgcttatattgatatttcttaacgacattagtataaatataaatttccagcaatggcgctagaaatggtcctggtatatatatggttacaaaagaaatccgcaagcacacggatataccattaattataccatttcactcgagagtattccaagatatcgtatttatttaatcccaaggaagattgtaagagagaactgtgctaataatatatacatgccacttgtataatcaaagtctaagcatgggttaaaatagttataccggtagggtgacacaaagctaagcactcatatatctcatttaatcattcctaaactaagtgaaagaagaaatagaaaagcaatcaatttatataattctaatatacgctcaactttagtccacatctggtagtatacaaccatataaccaataccccgtaacaatgccctcctggtgcttcgagagaccactccgggttaccgagtttcttacgaaaacctgtcatggccgtccaaccgggggctaaatatggaggagtaccctccctaggaaagttttttaggaatatatactatcatagaggaatacccgtactgagctgtcactatcagcggcccacctcgactgacccgtagcatatatgcccagataatgctacttaataatctagacaccatgtccacattattaaatactactctacatccctcgagatgacatagagtaaccgagtaatcggacattaaacccacaccactgcactggtaggctaactatacgactgtaccgatacagatataaaacaaagttaatacttagatatactaaagtaccgagagcatatagagaatagtatttcattaattccgaaagtcttacaaaagaaagaaggaaaactactgtcataccgaaattcctccgaagattccgaggactccgagagctattctattctacttcacttagcactagaatactaaactaaagtgtagaagagatatttgagcttgcttgagtgtgttgtgaagtgaaatgagctcctccttttatagggtcggtatgacggttgtagaaaaggcgaaatgaccattctaccccgcaaccatcattgagagtgcatccggagtgtacatgtggaggtccaggctgattgggcgccgctagggttcggccgaacctaggctggcccaacaggcctccagcttcggcagggtcactgataggttggtccttataacggttgtggcaattaatgcagtttccaggacggttacacctgtcttgtgggcctatcttatccatatgcttgcttaggagtgacttttcctcatttctctttattttatttgctcaattcctgcaacaaattattctccaagcacaagtggaactatattattctaaaacaaatatgcattataagcatagctaattctcctttattggtctataacgaccgtcaacagcttacactaggttttttttatgtgacatggtgacggagtcccttcaacatttcccgagtgggcctctacgcttgctcgatgtgcactgttgccacatgcttgatccatcggaccagaccactcatgggggaagcgaggacggtgccaatctctctttctcgctccttcctcctccacctccttgctaggccacctcctccctcttgcttcctcaacttagtggctagcacaagctcgagcacgcagaagagctcaaaactctcccgcttgatgacctcgccgaccaccatgagcattgcatgtgcccctcccttcatcccctcccaggcttgattgtctgataggagagaggagattgagctcgagctctcctacacctagctgcagtggtcagtattggcggcacggtgtttaggggaatagtggagcccaatggcactagggttgggttgcaaaaggtgcatgtaccttcttcactgcgaccgatactgagttctttgatagcgagccctcgagctttttcatcgcgaccctccaagtcctcccagttcagttaatctctcccagtacctccgcttccactggtggcgaggttgccgctgcctctggctcttcttccatcgagcatcgcccttgaaggtcgccaagagagaggggagaagtgtagagagatggggaagagatgagagagaagggagggcagaagaaaaatatagcggtcacttactgacatctgggtccactattatatttatttatttgctaatcaactttaggtcaacttgtcacgtaggataaaaccaacgtccaaactgtttggaaaagtaaaggggcaattatgtttctacccttgctttacaattcaattgtgattttacccctactttttagggtttatgattttgcccctgctttttaaaaatgaagcagccgtctacctctgattttgacagaagtttggtgggcccataatttcctaattaaatgaagaaagataatattattatcatttgtgaatgaccattctacccttggttcaatgagcaaaatccccaatcccttttactgtcccggttgcaagtggcggcggcggcgcacgcgacaagcggcggcggcgacgcgcggccagcacgcggcagggaggagcggtggcgcgggccagcacacggcggagtcgggcgcgggcagggaggcgcggcgggcgctcgcgcagggaggcacggcggccccgcggctgcatgcgaagggacggcctctggaggcgccgcgacgaggatgacggtgaggaagacgactttgccgtcgacgagagggactcgctcgggctgccgtcgccagtggtgagca

SEQ ID NO: 27688 - DNA, 5148 bp, Oryza sativa
catgcaactgttcggttatcaagtctaaatctctatcacgagcaaaaatgcaaatatctgtcactttttacctccttttttctaatcatcagacattagtgttcgttttgctctagaaattatcattgaatggcaaaacatgtccaggggtatatttgtccattcaccacaaatttaacaccgttaccattagttaacagagtaggggcacgtggctgcttcgtttttaaaaagcaggggcaaaatcacaaaccctaaaaagtaggagtaaaatcacaattgaatcgtaaagcaagagtagaaacacaattactccaaaaataaaacgaacctttttatagttaagagttactccctccttctcaaattgtttatcatataacaaaaaccaaaatttctcaacttgatcatcatataaccgcatggacacggattttatcagagtacaattaatgcagcacaggagaatttttgcatgtcaagagtgcaattgtgcattatgttttaatagatgcatgcattgtgggagaatgtgtgcataatattgtgcatgacgtcttgatccatgcagtttaaattatccttggtcttggtatataaatattatatgatgattaatttgagatggagggagtatttggttttgtggttgagtgcacaaaatgagactggggtcgtagttgagggaagacaaaagaacatctcctagggaaattgtgtttcttgtgaaaattttgggcccaaggcctcattttgcaggaaggggtggaaccgtaaaatcatctcatttcttctgctggttccctactctagctcgctagtgtcaatcaatgaatcaagcggccaccaacctacctaccccgaccatctcccaccatcggaggagacgctcaaactaccgagctgcccaatccatggcggcggcggaggcggaggcggccggtcctctccggcgggctctcttcgtcctcgccgtgctcgccttgctgctggtagcggccccggcggccgaggcgtggacgggggagatccgcggccacgtcgtctgcgacgtctgcggggacgccgccatcggccccgaggaccacgtcctcgaaggtatccttccttatccgacagccttgcgtgctcgtagctcggtccttgatgtcgatttcgtgcgtgcggttcctagagtggatctcgagttaagagtcggctgccccgcttcccctgttctggatcttgccttgcgttggcgctcatgattgacctagtggaggaattggagccgttcggtagagctggaggttgcgttgcatttgagaggggcggggcgcggttcgtcgatggagagcgtagttgcttgctgccgttctaacgaattcgaagttttactttgaactggtagaaggaactgtaatttgtattcccagtattagaaggacataggttggggatggatttgatatctgatcacgtgaagcacggtgaatcgacccttttcatttgtcttgaaatgaaatgaattgctgccttgatggtgaaatttgcaatcttggccttttgcccaattcaccaatttgtgttcccatttcccaaatttgtttatgtactctacccacgtcctgttctgggaatttggaaaagtttaaccatattgccagattcacccatacatgacagttgattcagagaaataaaaactgaaaaacggttgtcaatgttttatttccctgttatatattcttctttgaggggtcaaataggggttatgtcctactcgaccttgcaacttgcaggaacttgtttttactaagatggaagaactgaagtcgaattggccgatcatatgttcaaggagtttaccctgtaaaattgttgggtccatttttggtgtccagtacttccattctcttgcttttgactttcgctccccagtaataatcacataagcatggtactatagtatttggctcctgagctaatcaaagtagcaaaaatattgagtattgctcgtgatgatgcctgtggtttgatataattagataataccaaatgctaactgcaaagaaatgcagtgaagccatagatccttcatttggatggtaggattaaatgttgaaacatcaatatcaataaggttaaaaagtccatggatattgttagtggtctgcaggtcgatagctttcagatcaagtcaggtgtgtgttctgctcgttgtctggacctagccttttctttatacctggtcactattaagtattaagtagccggtttctatcctttgcctacaatattacccttggcactagagtctggcaagtggcaaggcggtagtctggcgcttagtacctaaccacagacaaggaaggctaaggtttggtgcgttgaggcttgcactgagtacctatgcactcctaggaggacttggtgattgccaaggagtgtactgcttgcacattgtaaactctcgaaattatcttctgtttgttagccgattcattctgctatggtttgaattgttcattgaaaaaagaaactctcagcaatgttgggatgctaaatgaaaacctatagatcattaatgttgttgtgcttgtgggttgctaaaaacttattaggtctggcagaaccattggtagcaatgacaaaaacaaagcgttggcaaagggcaagcaaaatggtcgaagcatgatgtggcgacaacccatttagccatttctttctttaggtctgaatatccagaatcggtctgatgggttttcacaattcgttcattcatatttcaataaaagagggttatcagtttgtttatactcatatattccagttttcaatgaacaatggaatcttatcccttgatctatttttagagtacattcacaaatgacaactgtaaaagtctataatgaaaccatacttttaagttatagtttcagcaaagcaaacttccatttgcactacgaatctacacttttacacattgccatcatcttcggcaggcctagtaggttagggtgacttcttggtctcaggatatgtttctgtttccatttatgtcatatggaggttgttgcaataccaaattaactcataggcgctctattgcttggtggggtgggattgggactacaactactaaaaatccctcctattcaaccccagatgccaagcaatcatgatgacatgctagcacttatccagtgttgcaagaacctccatgttagcaaaatttttgatgagtttgtgaaccgacgagtggagccagccagtaggatattacggcaatagaaaggctcatgtggttcagagattttgtgtaaaagtgtgattttgtgattcttttttccccaatggtagtgcagttttgtgaaatttacttcttcaataataaaagctgtaatggaggggcaagtgcaatggggcttgcttttggcgatagctagaaacctgttggtttgagtataaagtctgccggttgaacagatagacctgctagggtttttccttgtttccactttccacctagtcagcaaacactagtacaagtacaatggtagactggtagctgccttaccacaagctagctttgtttttttttggggggtgcgcaggcatatacatgtggtcctattgtttagtacttccactttgtgcatttcattttgttttcctcacttttcattcctcacttatgtttacctgtacactgtaatcaaagtactaaaagcttattactctcccattcctcttgcttgtctttgtaccttgtataggtgccgaggttgccgtcctctgcatcacgagatctggtgaagttatcaactaccaggccttcacaaactccaagggtgtctacattgttgcggagacgatgccagagagtgaccgttgggagtcatgcttggcaaggcccatcagcagctttcaccagcattgcactaagaggggtgatacacactctggggtcaagttcacatacagcaagccttcaggaaactctcacaccgtcaagacgttcctctacaagcctgccaacgcccctttgtactgtagctaaacgtgttttcatttgtttgcgaaagaaagaaaagaaatatatagaattgatatggcttcctgcctggacatggtacaaacaaactgtaaacaaggtgtaaccgtgtaaagtatggatagctggggtgcttgtaattctcatatggagctcttaccgaacatcagtaactggaagaaaggggattttgcatgtttttgtaactatggatctataagtatgtttatactttataatcttggaccatgttgcgtccgttcaaatcatttcgagcaaagacttgaattctgttaatacaaatgagccacaaggcccaagggaccaggccttgccttgaccaagtagctgatgttaataaaaatgtccagttgacccctagctgatgttctggtaataataataccttctatgtttggccgcaaaatgagaaggcaaacattactgagtctactatatgtgcatataattgttttttaataataaaaatatattatatccttggcctctgtttgtagcgcatttcgtttaagaaaacaacccccgctcagatgcgtctatttcgcaggtgtgaggtagtcgctttatgattctaccttacttttaaacagggtcgtagtgtcttctatcgagcgatataacagcggtaacctgttttagaacacacaaattgtgctacccttaagagtttatcagtaaaatcaagaactttatttatgccctgcaagttgcctcataaaaagtagatgttagtacccgactaaaaggagggaatcaaataaaaggtaaagctctcgttttaaaaagtaaagctatcgattaaaaggtaaagctatcatttaatttgttaaaggtatattgcccgtagcgaggttaaggtaaacctttgaccgagtgaagacgagctcgataaaagcacggcacaaccaataatggaaatgtgcatataactgttaagggcttgcgtggattaatgcccaaataaaccttagctaaatcctaaacgatagcaatactattggatttcagccatcatttaagttcgttaccaaaatattttatcgcgtacttgagaaaaggcgcccaaaacacagtcaattcagagttttggc

SEQ ID NO: 27689 - DNA, 24658 bp, Oryza sativa
cactactggcaggatcaaaccacttacccatcaaccggtagaagcgtagaaggaatcgctccttggttggctttgtccagttgtttccccctaatgtactcctcctatggtcctaccacttggttattcaaataaagtcagtttacttacgatgctcgatgatgctcttcttgtgtctagcatattgtgtcatcaccttgatttagcacatttggcccagaagccagattgcggtccaccatctacattctagtagctccataaaatccatcttgcagcctccgagctgcattgtatagaacaacaggcgagtaatcaaaatggcctctccttgtatcgaattagagatgcaaagcttttacctgtccagatatttgctataccgattgtgttgtgctccgactcgggctagccattgccccgccgctgccaaacctctttcttcaacccagtcgccgaacctcgctcagcctcaccgcaccatgtctacacctccctgcaacctcgttgactcgttgtaatggtgctgcaaccctagtcgcgacacctcgctgcgatttgggagaaaagagggcgacggaagcgagcggtggaggaagagagcaaatgagaaagaagataggggcctaaaagaaaaggttcacaatgcaggtggtgtcacacatgacacatggtgcacgcgagcgagaccgccagtctggatgtccacatgtcgtgttgcggtcaaatggtgctttggaccggggattgtacatttagcaagttcagtagtctaaatgtgtgatttacaagtttgtgaacttagaaacacttgtttacaagtttaagcgttgctagtatattttactcttaaccaacacacatccaatctgtattattataaaaattgaaagtgtcttcaccagtggtttgctatgtcgagtgtcatgattacatcggggtccgattcacatttcagtcgcgcggggtaatcgtgttcaattcagcagccatgcggggtgattacgcctgcgacgactgtggcacacgttttctgttgtccgactctcttccatcatgcgcgttgtgcatccatgtcccgtgtcataagtgaagtccaaatcggtcgctcccacgtgcgtgtttactgcatgaagatccacacccagatcgctaagacatgcagtcccacgcgcggtgaagtccttctcccgactcctcttccacgtgcgcgagacggtctcatgattgacttctaataatatgttcgttgagtaatttgcgatggccctggcaacctctttccaatttgtttccgtcctgttacttcatctttgttatggtaatcctcgtgtgcagtcatgcatgacaatagcaactagtaagcataacactggttgatgcgattgccgctatgggtaagtaaggtcagcttggaaggatcaattatcactagttaaggggagagcttgtgatgcctaaagtggtggtgcaggcatggaagaggttagcagcaacgtgaccgtagacaatatgatttagcaagaccatcactgtgtctccacgctccagcctcactgtctaaacttaggttctttattttgttccatgatcttattggtgtcagtttagcaagataattcacatatccttgcaaataatggaaggatatgtgaattgtttgcttggtagaatcaaacaattcgagcaactaaaatagaactatagtttaattttgctatcttaacatccaatatgctagacaacacgagatattgatccctgaagtcaaatgaccaccctctctcttcttctaagtgccacctctctatctaccgactatgatgttttagttttttttcttgtaatgtattagcatcttgctagtaatgttctattaaaatttgtaacgtgaaaataaaaaaaatagtaatattgtaaagttgtggtgtatacaatgttttaaatagcgggctaagacatttagcgttagcttctcaaacagctatagtgatagttatagcgggctaaatagagttatagcggttaatcgtatatgagagcaaatagtaagaacccttctcaaacagctatagcgggagatagtgcagctatagtgggagatttaaaaccttgggtgtatatgctcgcatattccaatagtgtcatataccgagacccggtaggattccttcggatagacagggttgtgttcttttggaggggttaggaacctctcccctccgcacgtaaaacggagcggtaaattaactcatgattaattactacactgtaaaaaaaaaaccaactctagctatgaacctcattggtaggattaggttttttataggacggaggggtaagcattacctaaaataaacttgaaaaatagattaatatggttttttaaaacaattttcatatgtgcgtgtgtgtgtgtgtgtgtgtatatatatatatatatatatctttatttttatctttatctttatctttacctatatctttacctattataaaagtttaagatgtttttgcccaaagttccgtacgtcacccacatatggaaatagcacccggtttttttcacacggtttttttaacgcccgttttttttgtctgagcggtttttttatccgactcccaaaaaatccgctcatcaccggtttttttaaagcccggtttttttgtccgaataccaaaaaaaatcgcccggttttttcacacggtttttttaacgcccggtttttttgtctgagcggtttttttatccaactcccagaaaatccgctcgtcaccggttttttttaagcccggtttgttttgtccgactaccaaaaaaaatcgctcgtcgcaacaattggaaataggacgcacagtttttttttcgcatgtttttttttccgactcccaatagcatacggtttttttagcgcaggtttttttctcgcaaagtttttttttctcagatcgcatccgtagcgattttgttttccaactccgattcccacccagatcgctcttccccgcacggtttttttctctttctcagatcgcatccgtagcaattttttttccgactccgattcccacccaaatcgctctccgaacaccaaaagaacccccaattttacatccgaacaccacaagaacgctgcatacatcctatcctcctatatatacaaacaaaactggtaccacaaataaaattcgttcttgtggtgtgatcaaaagacattctaagagctctgctccatcaccaaagaagccatcgtgccaagagcagctccgtgaacaacttcaattgtattgaggatcacaaattcacaatgcctgaacatacaaaatgcatttgtaagtattctcagggccataagttcatcagcaaccatcaacaaagacacaacatattttgatgcatttgtgtaatgatttggaaggacaatatcaaatattctaagcagttttcataaactcccaacaaaaaatatttagaggaatgcggcattactaaccattctagacatcttgatctcctgtcttggtagttgaagtttctgagttcctatcacaatataaatgcactacaacagaataagatattttcagtgttcaaaacaatgttagcgattcagtgctaaagaccgactcaatcaagaaaaaaaaatgcaataattcagtggctgatgtcataatttcgttttcagtttgaaaaataaatatggaagcaggttgaaaactttctgttcctagcatttttcatcctaatctctacagaaacttcagcaacctaaagcaaaacagtaataagtataaagtatgtgataagagaagatttgctatatgttttcttatgaaaataatataacacagacaagtctttaccaaacaatagcagattctcagatctatatttctcccaactcatgcatgttatgtgatagacaaattttgctatgccctaccttttatagcagtcaatgtcagattctcataccaatattttgtaattcttatacactttttattcttaccagctccatcacacatgcttgatgctggtaccacgccatctgcatcaccatccccactcttggatcctaatgtaagaagaagacagagataaggagcggtatgcgcggatgacagacaaagaaaagcaggaaactctagcaaagcgtcgtgaagcctataagctcaaaaaggagtcaatggcccgtgcaaatgctgatgaactacattgcatcacttttcggggtgatcaaccagggtcattgcatactgcacattccgaacaagaagacccagcagtagacccaaaagttatccaagaaaaacacacacgtgaaaggatgagatatagaaatatggaactgaacaaaaaacaagttgtgatagaacggatcaaagataagcgtgcatcacggcgcaacaatccaagtaaatattccatagcaatggagaaccctgggtatatcacgacggatatgtcaccccctgtcccaacaagatcaccaaaaaaaatgtgtaacgcatggagaaagacatgcattgatggcacgtcgcaacgaaagcttcatggttagacgagacaaaagtacttctgccttgttagaattagaagatccttccataagcgcccaaccagtcagtggcgtagacccttctaatcaaccaagcgtaatgaacattggtgaggatcctagctatatacacttactttatgttgtactgcaatgtatcctggtgtactactaaccatcttctttcaatagacaataacatgtctacaatatctaaaggaaccaatggtgtagagcctccatcacagtcacatcaatgatgatggtaacattgtcatctctatttgattttattttgatttgatacagttagggccttaatctacatatgcacgtactgattttttatgcagccgatggtgaggtcatatttgacgatgatactgatgaggaaagcgacatgcttgatgatcaaggtaattttgtcgctgttcgccaccatcatgtcaaacgtaaacttatatcttggcactaaaactttccaggttgggaggaagatcaggacatacaaatcatagatgttgtcgatgccatcactgagagccctagcatccctgatctagacaagatcgtgtacagcaacttaccacaaagcactcatatgctgaaacccgtagaaaattgtggattttgtggtgcaaaaagaagtttgagtatgagtcaaagggcttctgttgccgaagtggacaaatcaaactagccaatcaagacacacctcctgaactcacgagactgtggacgagcgaagattcagatgcccaacatttccgcaacaacataagatttttcaatggacatttctcattcacatctctttactgtcaccttgacagagagataactgacatcaggaatagtggtatttacacgttttgagctcatggccagatgtatcacaatatacgttcattcggtactgatggttcaaaccctaagcgtctggaattgtacttttacgatgatgatcctaccctagagcatcggtaccgtcattgtcggccagatctatacgaacaagatcaaaaagtaatcagcactataactaacattctacgtggtaatccatactctgagcagtttaggagtttggggcaagccgagaatctcgaggactaccgtgtgatattgaaccttgaccaatggttggatcagaggacgtataacgcgccaataacttcagaggtggctgcagtttgggtcgagggaaatgagcgacgaaagacatttgacaagagtgtaatcctacaagggaacaacaatgaaacaatgaaatagaaggcatccggtcgtactatggatgctatgatccattgtcttatccactattctttcctagaggtgaattgggttggcataccgatataccaaagtttggtgttaacctggaagatgtgctgaaggctcgtcgtaatcgcaaaaacaacgacaacaatgacaataacccaggttagtatttcatatatttttgccttcaacatcatgttttgttaccatacatgtttacatatgtcgctctcttctaatgtgatgttattcacagattcatgtatacgacgacatccaaatggtgaaaaagataaagggaacaatatcaaaacactatctagacatgcaattttgggtatgtttttacaatcacgtgtattattccgttttgcaattttgagtatgcctttataatcacatgtattatcccctttgtctcatgttgtatatcatttttgcacaattatatacaaagatgactaccaattttggacaacacccaaactttcgtcaaaagctcgacactgaacggctagcaaagtcagtttgtaattggcctgggattgactacaatatttcaaaatgcagattggtaagttctcttccatttgctcatcatggccatgatttttttctatcctaacagttagcttttacagattcttatgccaatagaattctataaatttttcattttgatcgtattggaccaagataccagaatcgtctatatattagacccgactccgcttgaaccaatttatgagaacaacccaaatgcaagatatgtcaaaaaactactatggattgccaaacacttgccaaaagcaatggcaaaagcatgccttgggtcaagatggaacgaggatatcaacctatggcgtcaaataattctaccaaatgttccaattaacaacgggtaaactttcttttaaactccattgtacaaccagttaatttatttccctaaaacaaaattaattaacaattaaatttttcttagcgaactatctggttatcttgtgtccctcttcatgcgcaaatggaatgatgaagaattgcagttaccaattataaaggcaagtatcgtgacacttagcattgactatttaaatgctactacctttttacacatacagtgctaaccttgttcgcttacataaataaatgcatatacaggatggatatgagctaaggaagcatttcttagtagaactattggcgtaccaagagaatgaatgtgagagcagtatgcctcaaggtgtaagagacatgcttctatgtatcacctcaaagaaatagataattgactacctgattaatcagacatgtatcttttcatgattatctaaataacttatagtagttcaagagtccgtagagcttaccaatttcgcgcggtgaaaacacataatcagcttctggtccacgcccactatccacaacacaaagcaccccacagcaggcctacaaaaggatgtggttcagtaccttgacagaatacattgtgtcaattcaaaagtctacagggaaaaacaagttgcttcttctgctcacaaaaagttccatcgctgtgcatgctttacatgagcttaattagttaatgtgttttataagcagaataagaattgagttcaagtattctcaattaagtagtggaaaggacgaccttaattagttcgaacttaatttgacaagattactaatagttagtacaaacttacaacgaacaccacgaagctgccgtagctgaaccccaacactgtgcaccctccatgccgagacgccgcgatgcatgttgcctggaaccccgtggaccggtcgggcgatggggacgagtcagcagacgaggggtgattattctcaaacacacctccatcctcgctccaaaactcccatcaaccgaatccaggcgcagaggccccagatctggtgattgccaccgcaacgacgaagcaggagagggcatccagccgcggagaccccagatccagtgattaccgctgcaaggccctagatccggacgagaggcttgtcggaagtagatccggacgagagactgaccggaagtataccaccgtcgccgagtccaatccgtgccgctgccgaggccactccaccccgtcgactgctcgagctgcgctgtggccgaggtgcatgaccagatgccgccacgaggtgaagatggggagccagcagggagagaaagagcttggagatggggggttgggggaccagcaggcatggcatggaaggaccaggcgatacgctagaggtggccggtggtgggaaggaattgggggaaacaggagtacatgagtacaggacattgggggagaggtggtggggaaagtgaaggagaaagtgcttttgggacttatctggtggtgccgtggtgctctggttttctttctctttcttttttcctctcggtactctctgccttgtctgtttttttttctcactcaatttgagatgaaaagtagtactatttgtagaacggtgtgttcgccgattccacttgggaaccatgtgtcatgcatgacggaacagtctattagaatgtgaataattaaatattattaaaaaataaaaaatagattaatttgatttttaaatcaactttcatatatttttttttgcaaaaaaacgcaccgtttagcagtttaaaatgtgtgcacgtggaaaacgagaaaggggagtagagaacatggggaaataacacagcctaactaatagtagatttaacttatatacttattggaagtgatgaatcgatgagaacatttttgaaggtttcacttaaaaacccatttacctgtctaaatttatatacttctttgtcttcttccttctctctttgcatcatcttgctttgctatggcggtgatagcagtcagagcaccgctggtgctgcagaggaggtcagggtgcgatgatgtcgacggtgggcggtcctgctagccaccccctccttccctgtgccctaccttgcgatgcggttgtgtcggtgtaatcaatgacactctccacgaaccgtcgagacctcggcaatgcacgcgagcgtctccattgcatccactccgacgctccattggagctggtgcgacgcaggctagcggcttgatgcgatgctctactatcctttttaattatttattttaaaaattctctagttcaaatatgctaccatcatcaaatggccgatattcaactattttttctcaacaacaaaaattttaaataatcagaaaaatatcaacaaaattttttttctcaataacaaatatttaaattaacggtgtcactcttagatggtgtcaggacaaggcgtgtgacaagttagccctcaaccgctatggtgatgtgcagtttaccatcatcccacaaaggataaaaaaatatgtactgttgaggacaaatgcattttccctttttcccattacaagaattaaaattgtgttcacccgttgtaacacacgggtatttttgctagtatacatatacatatacatatacatatatatatatatatatatatatatatatatatatatatatatatatatatatatatatatatatatatatatatatatatattacaaaatacgtaacgtttagtagattgggaagtgtacgtgtggaaaaaatacggaaaggctaaaaaactgtcgacgcatttttctttagaaatatgtcgatttctgatccattagatcaactgtaagattcgtgctattttggttgacgaaaataaaattgtactgcaaagaatcgaacctatgatctccggtggcttatccagcggtcctaaccaactgatcgagcaaagatgttggcttaaattgaaattacatactaattacacttaaattatatactatttacatatgtaatttaaagacttacattgtaaatacactaaaattacatatgtaatttataaacttacaatataaatacatgctgtagctcctcctaaaaattatgagtcgggaaaggtggtgtaagattgtaagaacactagcagtcatcaaacggacgaaaaccatcggacgtcgtcatcggacgggtcttgactcttgacccttcacatttcggtcagctcgtgtcccaacaacgttcaacgcgttctgccacaacccacaaagccacaagtgaagcggccgcaccgatctctccgtgagagggacgcgtagcaccctccgcctccgcgcctaaacggcttcgctctctctctctctctctctcggcgtccccgcctttacgcgagaataaccctcccgaaaccctccttccccgatcgatgccgccgccgccgcctcctccgccggagtgggccgacctcccggtggacgcggtcctggcggtgttcgagcggctgggcgcggcggaagtgctgatgggcgccggggtggtgtgccgcacctggctccgcgcggccacccgcgagccgcggctctggcgccgggtggacctcaccgcctgcttcgaccccaccgtcgacatggaggccatggcgcgcgcggccgtcgaccgcgccggcggacgcctcgagcacttcgccgccgagcgctttgtcaccgatgagctcctcctctacgtcgccaagaggttatggtctttcattttttaccccttctttttctttttgtttctataaagcctggggtttggaatctggacgatattgggttgtgaaaattcgggagatttagggtttaatctacagtgttatttggtcgctctgattgtgtttttcttattagagattagcggggttttgtatgattttacggtatgatgatttaagtagagcaaggagtatatatagattggagtttttatgcatactgcatcattataaagttgcagcaaaacgctgcaatgtgccacaacgacacaaacaaagcataagaaaatatactgtagtggattagtggctctaagtacacatgttgttgatgccttatgggttggccatgttaagggttagcagggatttgagcatacataacaccttgcagacttttttgaagcacggttctgtctccccaggtattgatgctgggttgatttgtttttgttttcggcgtcaccagtccattttattaaatttggatcttgtgttgcattcatgctcgacaactgcattgtcgtcttctccattgatactacatataccagttaggtttctgtttcactagttctggactgaaccgaggccatcatattgctatcaaatttattccaggcacaaaagaataatcaaacattgttatatgatcaattaatagtaataataaaagaagttttatgcctttatgcaaatcattagatgtctcgatgctaattcttttaacctttcgatagcttgattgtttggttatttcttcttttctttttgggtttcatttccttaatgaacattttttgtcaccttattatcaatacttctggctaactttttttagaatgcctgaactattgcattatatgcctcagatctctatattgtactcagtcaaacaaagtaaagtataattgaaaagcaaataccagtttcttagatgattatattgatatgacatgacttagatttggtagttgtcttgtaaagattacagatatggagctgtggagtcttttattggtatagagccagaaaatttccggaatgcacactcctgtctcacaaaagtgaccactaataatcccatggtgtatatgatacttgctacgaaaattctctcttgagatctctagtataattccatggctaaccctaactttgagctaacatctctggcaaatattatgggtgatgaaacttgagattgatcctgatatctataatttataatttaccccactgaacagaaaatattatttaactatgctagctttttatatgacctgatattatgttgtctgtaatcatttccaatggaccccaatttgtagggtcctgcttgatatcatcagttgtttttatatttcatttgtttatttttaaatcatttttttatgaacttcctttcttccaaggtgccatggcatcaaggttttcactttcggtttgaaccggaatttcagtgcaaccaaaattttcggatgatttggaacttcttttcccgaaattatttgaagatttaacaaaatgactgaacttgaagaaattttgaccaaattcacaaaaatttggaaaaagaaaaacaatttgggtgagatatttgcttgccggagggaagtgaaattaccaaaatttaggaaatttcgaacagaaattggaatccctgcatggcatatgcataagatgagaattgatggcgaaattcctcctaggccattgaatgctatctagttcccttgtttgccataaaaagtttgtaattcttccgtttctcaattagttcatttttatctttcctttcttgcctatatcttggttttaacctaggtcagatggcaagacatcttttctcttctcctttctccactcctttctcctctcttcctctttctgttcaatgcacagtagactatttctgttcgttcgcagcctgtcaagtcagttaaggccaaccctggcagggaagctgacaatcctgctgcttctgtgccagcactggtaccttgatgaccgacttcaagtccatcagagctggacaatgcggacgaagcagtatttggagttagctgtggctgtccttgcatcctcatcttctggcgacatgatgattccaatgtgaaaaggttgggcatgacacgggatgtcttctaatggtacctagagctaatggtgttgacttgagtggcaaataagggaacaacgttggaaatgtttagcataggatgggcacaatttttgtagtgccatataagggaagctaattcaatgggataggaggaattctctttcagataaagacttttatgcaaatttgactatattgtttcagtggaaaacataagtggaatttatttcttctagtaagactcagctaggctgtcatagagtgtaaggccaaaggaagaatctaaactattcagcataggtgtgtgcaatccttcagataaaatgtatgtactttaaccttatgggggttagaggtgatatcgtatatgtaagcaggtctttaacatgagttttgtgtaactaggcttttttggtgtcaaagaagagaggttagtctgcatatattcagacttaacgaccagcttagtgtactgatcaaagtgtgcattgggaatctgtagaatcaactagattgtttttctccaacccagcccttatgtttctaaatattctctaggagccttgcttgctgtttttcttccaaaaaaaaacttaatacttggtttcagatgttgtttacaattttcaacactgatttactattatttattggatctaacctgccaattgcgttgctcatagatagatgccaatcgtttcatgatcatacatggatttaggatagagggaactcgagcattatattgaactaatgaacatgcttgagttcatgagttctgttagcaatttagcattactgaatgcttctatatttgacataggatcactttgttctgtgattttatttcacaaccacaaatattgacagtctctacttacaagttgtgcctttatttttttgttagggaactagcctattgttcttactgtcaggttgttgattaatgtcgatttctctaacttatgttttaatatgtgcagaactagctgcttgaaaagtcttcggctacgtgattgcataaaaatctcagagaaaggcttggttgctgttggcaagacatctccctgtcttgaggaacttgagctcactacctgcaccatcagtattttgctgaaggctgttggcgaagcatttccgaacctgaagtgtctgcgactgaaccatcgttggtttgatgttcagtttgatgagttcagagataacttccatgcccttggaatagcctgcagcatgcacaggctacgccatcttcagatctttgccaatcggctccgcaacaatgcacttgctgccatccttgacaactgcccgcaccttgagtcccttgacttgcgtcagtgcttcaacgtcgatgtggatgcagaagtgagagcaaagtgtgcaaggctgaaggatgtgaggttcccaaacgactcaaccaaggactatgagtatgagacttttattgagacaccatcactagattcgctcccacttccatttcccgcagcagttcctcaatggcccttccatgggaatgacgaggatgacgacaatgatggtgatcaggacgatgacgatgatggtgatcaggacgatgatgacttgggcggtcacagggtgacagagtatggttttatcatcggtgactaccatgtccgcggtcggatcatccaccatgagtaactcgacatctacatgccgtaattagcaggttttgatgtcccagcgtctgagtctcaggaaatggaaggtaggtgttcagaagtaaggtaattcgctgagcgctgtaagttatttctgttgtagtagcttactacaacagaagggcgcatttagaacggttctgtatccaactgcaagtctgcaaccggtctagtgacctcatgtgtagtggtaaaacctttgttcctattctgcgtgttgccatagcgcttgtggaagtttcttggtttgtgtacgattgtgatggtgaaatatgtttatgtcagcggaaaggctcccgcgaactggtttccagcccacgtgcgtggtgcgtcgggctcatcgcttgctttctttcctttattatccggcgtccagcgacaagcttaattgcaagttgcaaaccttccggcgttttgcgcacttgtggacttgcgatgaatgaattacatcgtatgtcagattttcgttgtgaaaactttgtacaattaaacttcctttgtagagatcttcaacattggaacccttgaaactttgtacaattaaacttcctttgtagagatcttcaacattggaaccctttcaatataggtactttccgcactgaaaattttggtggaaactcaaaacgagttcaaaaaataagttgaaaaaggaaatggtatcctaaatactctctgttagtgaattttaaggaacacaaatgttagcctatttttctgtgaactttgttaaagtcagaaatttgacatacgacagaactaaaacaccagacaatataaatatagaacggagggaatacaaaccattctactcttcattttctactccctccgtcccgaaaaaaaacgaatctaagacaggatgtgacacattctagtataatgaatctggacaaaggtatatctagattcgtaatagtaagatgtgttacatctagtactaggacggagggagggagtataacacttggggagaaattgcaacgcagaagcaatcatggaaactatcattagcacttgatgagataaatctgagtacaagtattatatcatattcaactattttttccgtcacaattacactttattatgagtaaaaggtaacaattacatgcttcaacgtacactcgcccaatcctcaacgcagagaagttttaaggagtcaaaagataaatgatttacttgagcagagatcttgcaaggtgctccctagcagtggctaaagcctgagatatcgtctgcagagaataggccatgaaaattaatgagattatggaactagaaaagcaaattttctccgaatgataaagaaatacctgctcagagaagggggcagaaccatcaacagcattggttgcaaccttcccggcaatggtatttgcatctgtttccagaattatgctgcaggaggactaatggtttcagtttatatttacaaacaggatggcatgtgaaactacagcttcacaagagagctgcggccttaatacatgaaattggcagcgatcatgctttttcccaacaccccatgtatgcttttaaacggttttgtccacaagagtaagttgtgaaagaacttcagggaatgtacagcagtacaaggatgagaaagtagttgtttctactgtcctccacatcagaagacaatttatgagagatgagagactactcatacaaagagttctgtctataagcaataggtacaaaataaatactacggcgtcctctcattcgtggatggaggtagtactcagtgctcaaaattttacatgtttttggcactagtttcctcgaagcaatacaagctctcgctctgatatcatatcttttgccccaagtcgtttgtttagtaaatagatgatcttaatctctctcctccacatcagcaaaaaatctatgtggcagtgctaatcatttactactcctattaaatatccaactttcttatatgcatttattgaatataatgcaatatttttttatctctccttagtctagaagtatgttcttggaagacaaaaggattatactgcaacgatgctcacagaacatttaaagttatcaccatgaactagttaagcataaaatggtttttcgggcagaaacttcccaatagcttcagacatcagcgtttgtcattatgcaaaaggttgtcaacttgacatcaaatgacaacacctatctaaaatattatgcttctcttgtatctgcccacatttgtcaagagttacagttccatcggttattctgacctaatagctacaaccatagtacattcatgtgcaatttaggcttactaatggcatgtcaaactaagtctctacagacaatctgttgtgctgtttttatgcatcaaaagaacacaatgaacagtttcttccttcttttccatcttaaaaaaattgatattacacaacagatattgatgtttgcctttatgagcataacatattttatgacagtatatttacatgtttaaaaaaagttcaaacaaataaataaaatggaatatcagatactacttaattaaaaaacatgcaacagcgtgtgtacgaaaaaaaaaagtataatagtcaggaatgcttgcatgtgattttttagaagaaacaggtggtacaaatgtagcatagatcacaagaaaccattacccgccatctacaatttcatcgatgcagagaagtatcaagtccagattctcgagtgcagtcctcttctcaacatcacccctaaagcacagtaagctgactttaaagaaacagccttaccaacattaacaaaatacaagttcatgtggaatactggaagaagtacaatacctgagtaaaagaccaacagaatcagagaagccctgtagtacatttgctataatgagctcattctcatcatcaccagcggtgacaaaaaaatgaaggtcttgtacaaacttataaacgacaatatagccatcaaacaatgttatctcagctggagagaaccaaaaacaggtatcaaaggaaaattccaaattcaactaaagaataaagatcagaaaagtggatatatcgagacataattataacattgagcataaatatgaagatttttgttcataaaaatgagttgctagcaacagcaaactaacataatcataacagactgctggatgatttcaaaccattgaaacagtatcattttatatgaaggatatctttccttgaaagcttggaaagggaatccaaggtattttgctttagttatccttgggagtaaatgctaggtgtgttttttttttaacaagcatggctgagtagtctatattttgctctttgtatattctttcttctcccttgtacatacatccttttattaatatattttcagtagggaagggatcttccctcctgtttatgtcgaaagacagaaaactgacatgtatcttgtactacatttggttaacctgaccgatccattacattcaacggataaaacaatttgagtttcctactaaaatgttttggagtgagacttaaagcacatccagttctaatgaacatccaaggagatgcaagcgtcttacagagtaatataagcagtataatgattgatgggctcaacttaagactggatctagatgtgtgtgaaatttcagttaaaggtgtcaaatatgaatccactctatataatgacagtacgacatattaggctatattcatgaagcagaatgtgtgatgtgccaaattgtcaaagtggcaaaagcatgtgccatggtatggagggataacacatgcaacaaagctaagaatgaaataccttctgagcgtgcatttgtcttcagagttttagtaaagacagacttttcaaaggccaactttgacgcattactagaccaatcatccgagaagtatttcacggcaacacgtttcccttcagaatccagaagcaaaatgttcttcacagaagggcaagattcctgtgtaacgaaaatggacaatcatgaatcattacatgagcttgtgcaaaggacagaaaaagttacttaatgctgcatttcatgttcatcaacaaaagcatcattgcatggaaaaacaaagttaaacattgatagaatgaatcaaataagaatgctgattcagtaaagagtacaaaaataaaaataaatgatatgtattttttttttaaaaaaaacaataaactggatcgataagggccacttgaacacccaagcaaatggattgaatatatcatatctaatagcaatcctactgggttccatttctcatataatagtgtttcttaacaaaaagcttcgattaccacattttagtttcgacatgtaaatatgtaatacaggattaacgagcattctaacatgtactcaagctccttagctccatacaagagagatttaacattgccattcaatattaaggttgatcttcacacaaaacattacaaccatactctggcatgtttggcattgccgcagtaataatagtttcactcattcatgatgaccagatctccaccgctagtaattaacacccagtacattttgcaaaaaccggttaccaagcaactacatattaacaaatgataatccacttaccttggagaattctcccatggcctcctctagatccccggtgccttccttcctgtggaggagacacggccaccgaaagcagtaagatcaaccacttgtttggcaagatccaggctcaaaactgcaaccagcaaaatattttttttaatttcttggaaacaaactgctgctgctagtcagggtcgatctagagaaggttaaggcgaattaagagaaaaactgccagatccaggggagaagacaaggtgaaggcaaagagaaaatggtatgggcagagagggttgagagaggatgcgtgtcgggggctgatccaacatttgggttgaacaaacagactgttacttgtattaaggttaacacaagcaaattcgagacaaaagtacttccggttggggagagcgatggatcagaaagaggatgtggatgctcaccaggatgcagcgggacgatggcgcacctcctccgctctgctctgctcgccggatggagatgggcgcccctaccaaccctgctctgctcgcgagtcgcgagatggagatcggcgcaggcgctggagcggaacgggacgggagattttcaatgacgcagaggggacgggggaaatactccagtactccagatttatgtgtttttcaatttttatcatttgaaacatatttttcaaatatacctcaataaaacttattttaaaaatggatcccctagcctcctgggatatttaaccttttacctttttaagatgtagcaattaattatttgctactcactatctatgatatgtggggcctcatgtgtttatgatatgtgggtccagtggtaaaatcttttatcaccactcataagattagcaaataattaattattccttgggtagatcttattttgcacatcttcgtgataaaacttatttcaaaaatggatcccatggcatcccctagcctcccatgaaagccaagatcttgtttggcacggcttcggatctcatatccacgatagatttgaagtttatatattaaattacaatggtttaaaattttaaacttcatctgaaatgtgcgcaaaataatttatctaaatattatcaacataattgtagatcttttgtggagctagaaatacccagctctaagaaatcttggatccagaattgtcccaaagagagcctaagccacgccaatatcattagcgctgatgacctatttgtaaaaaaaaaatacttatttgtgataaaaaatatatttataaataggtcatcgatgtaagtgtcagtgacactgataaaagaacctatttgtaataaaagtattaacaaataggtcatcggtactaatgtccaacgatattggcaaagtccccctccatataagtgacttagcatccatggggaagccgggggattgcgccaatgtcattggcgttgtcatgttggaccacgacgccaatgatgttggtgctataaaaatgatctattgttggaataaatttttttagtttgtttgtaaaataagtttttaaagatctaaaatgtacggcctaagatttcccttctctctcgcttaattaaccaagtgttactttgaaccgccttgttcacttaaagccaactatattatacattatttacgatgacggctgacccacatgtcaatagtacttgggaagaaaaatataaggaactaagttagggatgttggcaacaacgggacatttaactccttgccacttttaagatgtggcaattaattatttgccactcgttgtctatgacatgtgggccctcatatgtctatgacatgtgggtccagtggcaaataatttagcaccattcgtaagagtggcaaatagttaattattcccaacaacaaactcaagccatcggcaaccactaacttaacattgtttaggaacagcgttaaaagtgatagctccccggagatggtccgctttatgattctcatgtcgccgaaccatgccaccatgctggatgtcagatccacgtcgatctgcgccagcttgacggcgttgttgggccgcaacaatgagatgcagtcgtcataccagtacagaagacataagacatgaagaattaaaatgcaaagccaccaagcattattatgcatgctggaattaaaggaaataactcaatattccatgtcaaagtgtcatatacttgagcatctccattgcgggactacaacacgtcaccacctcttactctgtcgtctccgtggaccatagagcggatgcgctgtgccaaaatgggggcgaattgggtaaaggcagaaggggaaagtgaaaaagagaggggtcgctacaggtggaaaagtgaaaaagagggagcttgaggtggacaatacatatggctacaggtaggtctcattgtattctaggtgatcgtctagaaatagacaatacattcgatattcgttgatatacttttgggctaattacttgtaggcatgaatcttggagtgatctaaacttttctaaacctaggtgtgcctgcacctaggtttagaaaagactttctcagctgcccatcctcgtaggcctcgagagaaccagtggatcttcatgctctaccccgatgacgacgatgaactggtcagcctctacagcttggtcatcctctctctcatagtctcatcgcttgcaaagtttcacgatgttcttctgggatgccatggccgacacgtactcctattgcgtcagctatggtggtagcaagtattgttgctcacaaattaagtgtgcataggttttactcctaggtcgatggttttagtttgttaagttgttaggaaggattatccattaaatctagggagtcatttatctagagaagtagttaatccccctttgagttataaagggggcactcgattgtattcttcggcaagcaagattaatccagtcaagttattcgcacgttattaagagcctctcactggccaggaagagccctgctttcggccatagggtgattgtgagcattgtcgctatcccctctgaaaccgtccactcgagcacttgttgcttcggcagccgctacaatatgatcttcaccgtgcgcgtatcacttttattcagacctaggcaacatctaaatagaaaacatacctactagattttgtaaaatgatatctggacaccacattcagaggccacatattaattcttgtagaatacaagaccatatctaatcctttatattgggttaaacataccataactgatgtcttacacaccgaaatttttagaagatgagtggaaacaaaaaggaataaagcagcaacatattgtcctgtcattcctcctgcatcctgagatactgagcaatatacctgacctctgcatcttccacatgtgcgttttgttgacctctacatggtgatacatgtgtaaacagagggcgatgacggaaccatagaggcagagtgaccatagcaagccatcaaagaggcattcggagggacatggaaacaacatggtagtgaatagcccctgccagacagcaaacatctgttagaaattttcgattagagaaccaacataattcactgaaatgtccaaatgtaaattcattttaatattccaatggttttaataccttagaatggtccatattattggattgaagccgtaacacaatggatctgaattacctatcctcattcatgtttttttgctcagagatccatctctctagttcatcacctagggcgaagacatgtttgccaacttgtttagtcagcctaagggtgttgccacaaatttggctctgcttggtgctaagatcaatatagagggcgtggtctcccaggcttgcttctagcctgatgcctttatacactccgcctagctccataagctcgaccgcttcgtcgttgctctgtcacaaatggtgttgcacccggatctagagaagatatgagagaaggagaaggagaaaaaacatgtgcagattgcactaaatctatcaaactcacaaattgatatatgaccatataaatgggtaaaaaaaatcacatcaaatacggagtactgcaagggaaacgagaaccaattaccatcatcctccatggccatgcggggtgcttgatgagcactccacgtttgccatcaccacctctcctgagaaggtccctaactaactcgatggtgctctccctctcgctgcggttgcgactaccttctcgacaaggctgaaccctgggcggaggacaacacagtccatctccctgttctcgacgggttgctaggtctagtcacaggtgtgatagaggccatgagttccatggtctcaccgtcgatatagtagacatgacaaagccaagattccaagcacaagtcggtgatgagacaggcacatggattgatggtgatttggtaggagaggttccgcgaggcaacacggcacgtggtgggggcgatggttagggtttgattgggtagggggcacgagcgaagctgttggcgggttgaggggccgatggcagggagaagccgatggtagggtgcggtggagggagagccaatgtaggggagatctcgacgacaggttgggaagggagagcagctggtagcactctgctgttttgtgggagcagaagaggaacacaaggatttacgcatgtcttttcacggtggtaagacatggggcactcaagagagatggggtggatcatgggatgaatctcagttgctggatctaagatcctgagaaggatgtcagtgtttgaagggagaatcaccatcattattacggtctttttagagcaaggtcgataagagagccaactgatagctgcactggcttgctacgtcatctatagtaagcactatagcaagtctattcaatagaggttctgtatcacaaatattatttttactattttcatgggatccactatcttctctcattctttctctttcttcctcccacctcttctctttcgttcttccttgtcttctttgccttcggtgggtgctagttcaaaagacggtgatgtcgccgacggttgcgtcacggtgtatgatgacgggggcggcaggacatgatggacaagtgcaacgatggtagtgtatggaggtgacaagagcagttgaagcggacgagaacaaggatgacggcgacgcggcaaacaagggcgatggcctgtggaacacaatggtgatgactaggggcggcccctcgtccttgagccaagagtgcagctcgtccggttatctctatcatagatatcatttattattatacctacttttataataataaagattgtttttattttagaacctgaaataagtggcaatatttgggtgactaccaaacgggatttctgcacgtgactgtgatgtttttttttcccgaaactgttgatcattgccagaatgtcaccgcgcgagataggtgtgagtgtgaccgtgtgcgggtctgacgagagtgaacgaatgatttcttccaccacctaacccccaccgtctctccccctcccccccaatctcacaaaccctagcccccatgtcatcgccgccgccgccgccgccgacggaaatggcggagggcgaggtcgagagccgcgactgggcggagatgccgtcggacgcgctcgcggcggtgttcgggaagctggacgtgaccgacctcctggtcggggccggggtggtgtgccgcgcgtggcgccggctcgcggcgatcgaccccacgctgtggcgccgcgtggatatgagccaccagggagacatcatggaggtcgacgaggcggtggccatggcgcgcgccgcggtggaccgagc

SEQ ID NO: 27690 - DNA, 8401 bp, Oryza sativa
aacaccttaggaaaccctctagtacaagaaagaaactctacataaccaatcgtaccaaatttggactccttccaaattcgactccatatcccatacgcacacaatacctccatcatatgccatatggaatctccatcaaccacatgcatcaactctagcataagtatcccgcatgatctctgaccaccacggacgtcgtcttatccccaagccgactcccggtccatcaccgcaaatactctcccgaggcatcaagtcacctacacatgaaaaaaacaaagaaaccatattccaagaccaagctatctccaacttgactcattagtagcaaacaacaatattacacacgtatagtatccatctagaagccataatcatgaaataaactcagatatccaaacaaacaacccgaaaccaaaaccgatatagtgtcggccggtcagaccacgggctggccggtccgacggcacgatcaccgccggtctgaccggcacacactgcccgatctgaccggtcacataaactaacaaacctgcgattcacctgtaaatccaatcatctccaaaaccacttcgtgaataaattccaaataacaaaaccaataatctccgatgccaattgttcatcccagaataataatcaaaaacacctttgattttacagatggcatgcctcttgtctcacggcacttgaggaagctagatttatctagtctagaattaaaggagtgtttccttaacttctcgagctgccctgcattgaaatggctatctttctctgatcattgctgctttgattctgtaaagaagatcgtgttccaatcaatagaatatctttgcttctacttctgccagttcagtgagtatcaccacactcacatttatgcaccaagcctcgttggactccatcttgaaggtttctagggcaggacaccttttctggaaagcatgccatcattagttgcagcaattgttacacctcaccagaattgtgatgatcgttgtagtaatacttactctggttattgtgaggatgaaaactgtcatggttgtcatggtatgctaggtgagactggcaatgatagtgccaatgtgtgctcctgggaggattatcaaaagctaagagtttgaagttggtagctggacctgaaatggtaagcctacgttaacatcttatctcctttatgttatttgctgcgccttatttctgttcccttaactatattcatcattttgacattttaacaatctctcttttttaatgcattgctactatcttgacattcaaattgttgtattcacataaaaaaatagttgatcttctcgcctgcactttagctagcgaattttcagaagtggtttaagatggtgccctttgttaagcaggttgaaaactttgatacccaatgaggggtgtgttgccctgattggtggcctctaccttgtattctcaaacaatgtccagttctaaataagctcactcttcgaaattccaaggtatacgtttttacaattgctgcactagtgcccaggcaaagttattgtacatgattggttgaaagggaaaatgtttcccccttttcagaaagcttaatgtatgatagaaacataatgcattggtgaaatcagctgcaatatctgaacacctcaaggtgggaaaatcgtctgtaaagaagctgatgatggggtttacaaaattgtgaagtgctttaggacatggaagttattatcaaaaggaggaatcagtcggcaaaacgttaactattgaacctcttcattctttcattttttttctaaaatttagatttttttaatctgggaatggaagaaagaaataactaaaacaaaaatacagatagggaaaggagattaaagatccaatgtattttgttttctactatgattcatgaaagtatacagaatttattttcctgttgaacttaataatataaacagatgacagtatgcggacttctaaaatggatgagagtagttctagacaataacacaacatgttgatttcggaatatctcttaattgtacatgttatatgacctcatacggctacttaatctttgaaaattaataattgctccttctctttaaaagatctttcggtacctgatatttggatgccatgtaaaatttattgtgctctacatattggcgcgcaaaatctatttcgagaggcatctcgatttagacttaacgagcgatgcagacaattacctgagaagtaccagtagcggtatagacatgcatgcaagtagtttttctattaggttgtgtgttttttttttcttcttatgaaattttctcttaaactactcatccgatctatgatccgattacaccgttgtgttcgtaataattaaatctttacaacaagatctcacatgattatattttgatgaaaaatcacaaattacttttatgatatgtctaaattacttttatatttcactaagttacttcttagacatataaaagtaaattcagtaaaacctaaaagtaatttacatatattatagaagtaacttagaacaaaaagaaggtaacttcggcatgccatttgaagtaaatccgttgtagagataaaaacatgactctatctaaaaattaaattaatcagcacaaattatagaattaactaaaaacaataataaaagtaatcacctcagagcattataaatgtataggaagtattttaatcaaatctaaaagtaacttatatatatatgataattatatatatgataatttgttcaatgaaaaaaagtattaattaaagttactttctttttctttttgttataagttacttctataatatatgtaaattacttttaagctttactgaatttacttttgtatgtctaagaagtaacttagtgaaatctaaaaataatttagacatatcataaaagtaatttgtgatttttcattaaaatataatcatgtgagatcttgttgtaaagatttaattattacgaacacaacagtgtaatcggatcgtagattggatgagtagtttaagagaaaattgtatttgaagtataggtggatggtatcttttatagatgaagtggtagctgatttagataaaccagctaccactagctgtgtagtcacgtagatattggcgcagtcttcaggttcggggaagggaatttgggttggagtcttgatgatataacttttagatgaagtaactgtttcgactgtctgtgcacttcggtaatgtgataggaacatactgtaactgcgttgtatatgtcacttttactaattggacacctttcataccatggtgtccttttatttgaaagcaactgcagctgagcattttcttctcttttgttatggaactagtatggtagttggtgtagattacgcagctagcattgctgtatatatatatttataatagcatatatactttcatgttttattattaaaataatactaaaaacaacaatatgattttaaactgctgcataacttgaccaatatgattttatatgtctgatatctatggtaagtcttatgtccatcaagcaacgtgatggatcctctagtactgtctagtactgccttagtaatacaatatacttataaaccatggtagctggatgattatcgttaaatgctatagaaaaggtcattcttcttccctccatcttataaagttttaaattattagtgccatcttttcactatctgtagtgatatccttgtacctactaaagatgatatattgtatcttatgttcataatattttataaaccgtttcagataagtaaatgaacactttttcatttcattgtcacgttagtttagggttggaggatccaatctcatctgttagttagttgtaattttatacaacttagacaatcaagccatttttgcttctcttattaacatgtgaattcaaagaattttcaattaaaatgaaaacttctatgtatttttaccttctagaattaatgtgtcactcctagtaaatcctccaattaatataaataaaaatatagactctactcccaatattatttattattttcctagatttaaaatatttctaagttgtcctcatacatgaactcttttccttaatattacttgtttcaaatatgaattagatgaacttatttctccactttatttattagagtgaatttattttataattccaattttagatatttccaaattgtatttctatgtggactcttttccttaatactatatatttttaaactaaacttcagatataaatttgtacttatacactgattcttgtctcagtatcaattattttttagtttttaatacaaattttgtattttccataaattgtatttctacatggactcttatgtcaatatttattattatttgatccgaagtttaaatttttctaaattgtgtttctgcttgatttggctttctcaatacacacaatctgaatgaattattccatctgcccctatcaccacaagcagcacttgagtggcaagatcctcattacattccttaaaacacaactataacaaatctccatgatcaatggattggaacagtgtatgctacgaaacaaaaaaggtttattccctctttttcgctcatttccctcttggaagagcaaatgcacaatgaaactcaaggtcttccattggatactcttgatggaccgttcaaacacgagaccttctgcaaagaaagaatctccactctaaataaggaactaattgggtaatatgcaactcttttcatacagaagatgtgctgcacttattctttaattgtcctttggcagttcaatgctgaaattacgtcggaatacagtgggctacaaactggaattcatgaacatggtggtaacagcaaagcaaaattttagacatccgttcttcattgaagtttttgctatcgcgttatggaacacatggaaaagaaggaatgacctgattttcaacaatatcacaccttctttcaatctttgtaaactactttttggggatgattttactcttcttttgtttagagtaaaggatcaagaccgtcaaacctggcaaacatagattggcaatttgtaattttgattccttcccctttcccctgtacagtctcttgtaattaacattctttaatctaatttacagtagaagcctctcctactgtttcctcataaaaaaaactgatatagttcaggtggttggttgggcctgttcaacgtggtgtagctttattcagtggaaatttactgttttaaactacaactgtttacaaccgcctttatgcaaatagtcacaaacctccttttgtctccccttgcatgaatgcattattggtgtggtttgtggtttgctgagtacgctggttatactcagccttgctataattcctctctttcaaaagtttagtgtttctgttctgaagatggtgttagaggatcaaggattatacccagttgagttctgcttgtggagtggagctaaagcctgctaggtgtcgtgccccgaaaatacttttcccgaacgctacacttcaacaaccatgatacaaaagacacatctttattatatggttgagttttgcagtaaaacaatattttaaatcacttagttgcccaaggtaaatttgtaaatctaaccataagagtaattaagattattaattaaggccgtgaacccacacgaacctgccttaacccaagggcctacgatgagttagaccgaactggcagccttatagccaggccccagctcgtcccaagtcaacctaggccaaccattccaggtttttagttgattaaccaagttttaagagggaaaccactaacttgggtacattgctagccttggccatagccgagggcgcaactatttgaatagattatactctgattagatgtgtacatcttttacacagaagaaacacctttactctgcattctattgcaattggaacccatcataaaaacgtggcataacccttcacccatcctagttgtgaacaaaagtaccgacgcaactccgcctacggccggtatcccgggacaggtaggttagggttgagccccacaacatcagaacatccctcaggagtggccaccgagatgcccgtcctatgccacgacaccttgattatcgaaatactcgcccgataaccttcatttgtctcagagatatccatcacccgactttagccatctctattcgtgtccttttgttcatgactagactgagcaccgagttaagccttacccattttagacatgtggttagtatgatagtgctttgcaacagaggctcgagcttaatccttatagcacccaaggtacggctatcaaaaccaagccacgcacctcgagcccagcctaaaccattttgggagttttgaaaggggaagagtgtgtccagagcttgtcattaaacctcagtccaatgtatccaatgatgtttgtgaaacaactcccaaagtctaatgctgtaaaacatctaagggtttctaattaagcagggctaaacaaaagtctagcaagtactagtgagtgccgatctatagagttctcactagtagggttttatttacctaggattgtcaaagtgataatcttaacaataacgagtaataaggtcataacaaggaataataggcatggataagtaaaacaattatttgtaagaatttaataaagaaaaatgcaataatttaaatcaaaataattttataaactgggaatcaatatgctcaaagatgatacgacttgccttgcttagagggaacggtcttccgaacacgaaccgcgcttcggaacctctagaatgacaggagctacgtgaagcacccaagcaaagctaaaccctataaagaagcaataataatacataaaaataaaagcacagggttctttagattatagcaaaaattaagagacttgaacggattgattcggagttcgtatgaccaagatatgatcatccgaagtttaatgctgttatatggagcttaattaagttttgtaactataaaacatgtgtaactccagcccggaaaagaaaggaaggttgcgctattgacctgtggaccccacatgtcaatctaaaggaacacggtggactgagtacacagagacggtccacgggccaacggaagcggaccctgtgtgtcaaccgaagcgagtggtcgataaacagaacccactagacaccacacgggctgcacacgtggacaacacgtggctaccgagcgggcacacaaacacggtcatcacacgtgcatgcgaaggctgtgcgaatgattgccgataatggtacccaggtatcgatttggagttcgtatgaccaagatatgatcatccaaagtttaatgctattatatggagatttacgggctattgtaattaagttttgtgactataaaacatgtgtaactctagtccagaaaagaaaggaaaggttgcactgttgacctatggaccccacatatcaacctaaaggaccatggtggactgattacacagagacggtccattggccgacgaaagcggaccacgtgtcaaccgaagcgagtagccgataaacggaccccactagacactatgcgggctgcacacgtgaacaccacgcagctatcgagcgggcacacggacacggtcaccacacatgcacgcgaagcttgtgcaaacgattgctgatactggtaccccagtaccgggaccgacaactgcatgacgggcacgggggtgacaccgaggggatgaggacgggtgagtgaaggagggatcctcaccacaattggaagaggcgtagaacgaggacgacgaacgggcacagcggatgcggctcagggtagactgacgacgatgaggagacgactctgggcggcgaccctaggacgaaggtgagacgagaccggcacaacgcggagccaaggacgaagacgacaacggggctgcagcacccttgacggaacgaggacgacgaacgggatttgcttgacggagggatgccacgacgataaggacgacaaccgggaatgacttggaggaggacaatgttagccgtaggcgaggccaaggtggaatgtgttgcggcgatgctgacgatgatggcggcacagcggggggacgagccggtgagaagaaacggccggccgatgggacgtgggcgaggacgaacgttgacgacgacaatggctagcaagattcgtcccatgtggaggcgaggttggggatggccttgccactgcgatgataggggtggtgatggtgtggtcgatcggcacacgggcaaggaggaagggccgatcgaagaagctcaagtgaggaggatggaccaggcacgtggcggtctctgggccaaaccgacggcagggtctggggagaggaaag

SEQ ID NO: 27691 - DNA, 29156 bp, Oryza sativa
atcaaaaaatacccttaagtttttaaaccgggactaaagatgctttttagtcccggattttattggaaccgggactattgtggaattggaccgaccgaccaaagatggtttctccaccagtggcgggtgaccacccaggcagggttgcctacttgcgtgcggagctgctggtgcctgcttccttgtcatcgaaaaggaatactccaagtgttccgaatcttttcaccttgttgaggacgttccaagtgttccgacgttgtgcttagaattgtcatcactgacgtcagcaatatattcaagagtttcgatatatccaagcttatggagcatgttgtgtagttacacacgtgctacgtactacatgcatgcatgtatccgatattagtatatctgaacatttttttctatttatggccacagagaaaaaccacatcataaaacatatcgttcagaacaatcgcatcgagaatacatgtatgtacacttgtagacaaattgtcttaattttgaaaataatacattttctcgatcggtgcatagtttcgtgctttcgatatagaaatggagatggctcaaaaaataataactaattgtgaagacgacttgttcgttcaaaaaataaaattgtgagatgacccgcgttgaatttctatgatattcatccattttaaatttctctgactatttatatttcataggaaaatgtgtacacacagtagctaggtatagaccataataattaatattacacatgatttgaattctctgggtccatccggaaacggaaagctttcttttccaacaaggattcgtgctggtaattaactcatcgttcgtaaggaatgcaacactgtcattcctatgggcgcaatgttcccgaccggaataacacagtaattcttgacagttgaaatacgagaaattcgataatatctacatgcatctctcaatcaactaagtgtacgttgatgtacgctacctgtatatatgaagaccacttctatagttaatatagcatcagataaacattttttacttaacacataaaataaacatttatatatgcagtccataatccatttacacaggtattttttccaagctgccctataaaagtgcccgtatataaatcaaggatttgtgcgggcggattccacaaccgctgactcccttaaggaactggccataaaaataaattttcagtttaattttgtaggcgcaaaaagaatcctaaaaaatattttatattttagtagacatgtagtggaaatgttcatttgacgaggtaaataatctgaaaagaaactaatccttagctggtgagaaaatcttagtggaaatgttcatgagattatctggcatagcttcaactactgtgctgtgaggaaacaaaagtatagacactactgtgaattcgtgatcacaattcacaataaggttagggtccttccactttccaattcccagttgccaacttgttggcaaattacacagacagagcgaagcacggaaagatgcaacttgccctctaactacacaacgtctgtctccacctatatataaacccttccatctctcccccacacatgcatagcagtgctagagagagaaacaaattaaccaagaaatcctcttaagaaggatactgacagtgcacgccagctagctaatcactccaccagtttcggggaaaaaatatcaaggatttcgagatcctagctcgctagcaggtgatcgatcgatcgatcaatggccctggtgcagtcggcgcggcgtgccgcggggccggcggcgagccggctcttctcgacagcgtcggtggcggcggccgggcgctcccccgtggctggcctgccgaaggcgctgccgcggccggccatatcgtcgctgtggatggtcggcgccgccgctccgccccgccgctttgccggcacggcggcggtgggcggtgtcgacgtgaccgcgccgacggcgacgccaccgccggcgaaaaagaggaatcggagaaggaggcggcgagctactggggcgtggcgccgaggaggctcgtcaaggaagacggcacggtgtggaagtggtcctgcttccgggtacgcatgcactggcacagcacgttgattaattaattaatcagttaacaaagctccgttaatcaccgtcgttaaagctcgctggttaactcactctactgttgaacagccgtgggacacgtacgaagctgacgtggcgatcgatctgacgaaacaccacaacccggcgacgctcggtgacaaggttgccaggtggacggtcaaatcgttgcgctggccggttgacctcttcttccaggtaacccttcgctttcctcatttctgtatcgtttctgaaatgaaatgatgtagtacaatctaatacaaatcacatgcaattcctgaatctttaactatgctgctgcctactctacatgcttgcgagtcgtctacatatgcttggaattttttttcttagcatagagatcattgatttgtttaactgaaaaattaatcaaggatcattttcgaatcggcgaactttacagccgaagatctggaccgtccagtgaattcagttcagctggatgagttcggaccatacggctgagcagcttcgaaagaattgaatttgaatgaactctcatacactcgatcttcggaacagtgatctccgggcccattgatccactacaagcccaagctcaaatacggtcctgttggacttgggccgaaccgtgaataccggtgaactcttttgggtaatcctgttgttgggttctatgggccctggcacgaaacaatggccgggccgggccgggcttggtagtcttggactgggcttcgggttccatttgatatttttcaacctgcaagaaagaacatgcttgactgactgacagacaggtaaccatactctgttttcccctgttctttcgagctagtactaactgctatcgtcatgacccgggtgagattgtaaatggaacgaacgattactctaatgagattttatcgtgacgaagcgattaattcgtatcgagagttgataattgatcagattgctaatcaactagtagcagcaatgatgaatgaattctgatggtcaatttggttcgcagaggaagtacgggtgcccggcgatgatgctggagaccgtggccgcagctgccgggaatgtggccggcgcggtgctgcatctgcgttcgctgcggcggttccagcacagcggcgggtggatccgggcgctgctggaggaggccgagaacgagcggatgcacctgatgacgttcatggaggtgtcgcagccgcggtggtacgagcgggcgctggtggtcgccgtccagggcgccttcttcaacgcctacctcgcctcctacctcctctcccctcgcttcgcccaccgcatcgtcggctacctcgaggaggaggccgtccactcctacaccgagttcctccgcgacctcgacgccggcaagatcgacgacgtccccgcccccgccatcgccatcgactactggcgcctccccgccgacgccaccctcagggacgtcgtcatggtcgtccgcgccgacgaggcccaccaccgcgacgtcaaccactacgcctccgtacgcttccctcactccctcaccttgtgttggacgatgcatcatgtctcgcaatttcgaagcaaaacaaaaaggagaagaaatttgaacgaattttgctaactttgtccatggctgtggatgtgcaggacatacattaccagggtcacgcgctgagggaggtggccgcgccgctcggctaccactgatcggacggacggacacgatctatcgccattaagggatcaataaatatccggagacaataattgtagtattatttggacgcatgcaatgatcgttgcagttcctctcaacacttttgtgatatttcagaattcagaattttttactccttgtgctgtgttcgttgtggttgtatatacagctggtttgttagtttactgtggtgtcggtctcaattaagggatgtgaaaattgattggaactgtgaaccaatttattttacatatatgatactatatgtcttcttgttggtttcgttagcactgatgcaattgcagtctggtcgtttttcggaatttcttcccgcttatggtggtatccgtgtataatggatatttagggtgtgtttgaggagaagggattggggagattgggaagatacgcaaaacgaggtgagccattagcacatgattaattgagtattaactattttaaacttcaaaaatggattaatatgattttttaaagcaacttttctatagaaattttttttaaaaaaacgcactgttcagtagtttgggaagcgtgcgcgcggaaaacgagatgattttctctctcaattccccagattgcccaggaacgaacgaagccttagaaattttagaaattgggatttgagatacagatgatgccttctatgaacggcatattttttttcaaatcaaaacaaatggatgaggtattttcggcgcgtcccacttcagcatcagcgtccagtagttcatgcatgggcgccagaacgcgatgttgggcttgccagacactatggcggcggcgcaatacgggtttctgttttattcttttacaacattatacagctctacaatgtactgctgccccacatttctcaacacttgtacagttcactgatttgaaagattcagaacaggaatgttccatcttctttttttttttcgaataaggaatgttccatcttttttttttcgaacaagaaggaatgttccatacttccatctacatttccatggtatatcagtacaccctgtcactgcttctgatggtataaacaggaatttgagatgcaaataatggcttatgctgtcatgcaacagatgaacgaaaatttttgtctccagaaatggatgacatatactgaaactatctaagaatagtttaaagaccgatgggaacaatgagaagcataacatggacatattcagacggttttaggtagcctgacaagagaggcgtccggtccaacaaggttcaggtttacacaagttaataagagataccaactttaataagagaaatcaacttcttcctgggcacggtagcacgtcgtcgatgttagacaatctcaatgtttcatcactcaatggtcattcatgtctcaaattagacatttctaacctgacacttatgactcacactatgagttgaaagctccaaatttttcacacagaaaatgtcagtataaagcatccgaattcagaaggaccatgacatccacagtttatacctaacaaactgttcaaaacaaatccatcgttgtccagaacaacctgaactgctgatttatgtttcattttagcactgcaaatacgaaccagcttcacatttctagttcataaaaacattggaaacaatctttgagaaaagaagaaaaatcagaatgaacatggaagtcttaagttattaatcagctgtcagaagtgagctagaaaacttacagggtgcatcattcagtaactaagctacgcagagatcagacgttctcaaagaatgttaaaatgattaacgtcacaacaaaggaatcaagcattgaaacagaggcatcatgcatcaatagaagaaatagtaacagaggtcacaaactcagtaatcagcacgattgccatgggtcaggaaaacttttaccaaaacctcctaaccgcgagtctgaaatattgccagagataagcatcagtaccaaaattttcattcatgtcatgatgtagtaacaatgattcatgtctcatttcaccagagtactgaaaaatctgcacaatattgctgtgtcataagaacatgtgaaacagtcgtgcagaaatgatgaaagaatcaacatgaaaatagcagtattaagttactaatcaattttcagaagtgaactaggaaattgtagcaaggcatcattcagtaattagaaaaatgcagagatcaaagtttctcacagtagaatgataaaatgatttaacagcacagctgaggcatcaggcatcatatcaatggaagaaacagcaagacagatcacaaccttactgcatcatcactcatcagtatctaatcattcatgtctcaaacctcactcaaaacacattgcaaatttttgaaggattaccagatctgaattaccagaataccgaaccaacctgcacaaaattctacccatcctgatgttcctgcagtctcagctgttccccttgtttgattagttgctccataaaccacttacgactaagggcctcgtatgggggcagatagaaccaagtccacggcgaggagtctgatggcggctctcgcggcaggcagcggactatgccctgctcgcagcatctgccggtgtcgccgcaggggaacgggccctcaacctgctgcacctgcgaggtcgagctccctgcgccgttgaacctcgcggagtcatccaggaagtagatgttgggagggcactggctagatttcctcatctcgacggcgcaggagcagcctcgcacgaggaagatcgtccggtctgcgagggtgtccaaggtgagtttcttccaggacggtggcttcagctccagcttgaagacgtcgaacgccaccgtggccttctccgtggagacgaacctgacgaccatgagcagctgcccgcgggattccacgaggtagcggccgagcacctcccctggccctggcatggtgggtcggggatttcggcggagctggtacttgttcacggatgacatcgtgagctcgccgtgcctgtcgttggccttgggggtgtacaccaggaggtcctccttgttgttgagaacatagaatcccccaccgagcgggccgaagaagatgtagttggcgtcctcgattgggtccttggatagctgcttctgccacattttgaaccccgagtcccacttcagcatcggcggcacccaatcgctcatgccggggcgccagaacatgatattgggcttgccggaaactatggcggcggcgtagtacggatgagcctgacatggggtataggagaggatgacggcttggatgtggttgatgaaggtggtatcagggttgttgttgcggagggatctcgggaggaggacgcgctcgccggtgcagaggttgagcagagcgggggcacgattccccgggacagagcggtcatcatgcggaatctcggcggcggcgacccaaccttcaaggtgggcgccgcagaagcgcgcgccgcgggcgttgtccggcaggcagggcccctggtgggtgcgctcgcaggcgacgcagaagaaggaggtcgcgttggtggacggcatgaacaaccacggttgcataggcggcagatgccgcatggcgatggtgcgccaccttgtgcagacaccggagaacatggagtggtcagggaggcaaaggaggtggtggaggatgccggcgacgcactcttcggggagctccgcccacgccatgtttgcgtcggccatgggagggggaggaggaggaggaggatgagtttctggaaacttttggatgggattgggaatggtgggaagaagaagaagagggcaagtgggaagattcgttgggaagggaattgctgtgattttataggctcctcgtctgaagccacgcgaatgctaatcattttcttcttgcttgccaagttttcctattgttctgcatttccattgttctacactgatctccaagcattactctgttacggtatctgcttgttctgcattaatttcagtttattgtagaagattatctttgtttatactatagtgctttctatattcaaagtaaaaaaaattcttctgttctgatctttcacaaaatttacacagctctaagatgcgttgctgtgttacgaacccactccatgtgatttagtgaatttatgcacaagcaaacaattcttcctccaacacttgatacatgagtatttggggatacaaatagaggaaatggaatcaagactgggaatcagctgtaggttgaagaagaagacatagatagagattggagaagagaagagaggtacagaggttgaagaagagagagcattagaaggaagaagtcaagttttatctgttctattctgtactgttttggctctgctccttttgtagtggctggagtggtcggcttagcgcagcggattgggcctagccagccctgagctcaatatgcataccaatccgacccaattacataacattctccccgccttgaaaatcagcttgtccccaagctgatgcaattgaagctcaagatcagtgcctccaggatcccagggtagctgcaagtgatcatcaagagctaatccgtaagcaccagctgatccataaaatgcaaccacaagagacgactccatgccaatagaagtgacaaaacttgcactctggtggatgcattgcacctccatttgtccagaattatagttagggatcttgatactagtcccaagctttctatatggaaggacaacaaatatggtcaatgatagagaaatgctagatactgtgcccacttggatactatcatgagcattcttgtacttgcaaactgagctgagatcaagagtatcactccctcccttcttcacttctgtagaaatttggcaagctattatagtaactaaattgacaatacctggatcccaagatcttattcttgtcatctcagcaatcttgacatgcacaagcttcactgccaattgcacagtcccagcatctaggaaatttatcagggcaaaagcagataatagccatgtcctcccaactgctacaacatggatccatttgcttggcatgacaggagtccctgtcacatcatacactatattttcagaaacactgcaatatacaatgctgatttgatgacagtatagcaacatcttatcaacaccatcaatttgttgctttatcattccttgaaaaggaaacccttggtaagctggagcatccaccatatattttctccattgataaggcttgctcaagaaataattagctgagaatttgaaccgacaccaactcataacttgttgaaccagtaaattttcattctcaaatcgagttagattgtagcttgaaactagctgtcccaatgactgcataggcagagcagtatcaatcatatctccaactaaaagatttgaaaaactgtaccaactggacttgacaacctcacacttcagttgctcttccagtaacatccgttcacccaacaattgtagaccttctatggtagccttggggaccgaatagactgttacgataatctgaatctttagtttctgaccatgtagattcagtttttccactttagctttaacttctgcttgaataggtggtggccagggctgtaagagcttcaccaccacgcctccgctgccttgattaaatatatctggccatggcaagaatcgaaaatccagtgggactgccagtctccagggaggtactacttgcggtctagctgtgaaatctgcccctgagacaaaatcatcgcagcagacctcacattcagaagagacaacaggaaggttggtgacaacaatgtgattgctccggcacaaagtcaaacacacatctgtaaatggtctgaacacaaaaatgagcttggtatccaccttggtaaacttgacacaattatcagtgaccataccaccgacatcaccatcaaccttttcctttttgctttttgtcaaacccttggttggtttcactgtcaccatactaagcttgttagtgttgacaagatgagttgagttagcctcattactgacctctgataagatgggtactggatcaatgttaacgcttagtgccgtggcatctccattgcaatccacactcacggtataatcctccttggtgttacggcatgtctccaacattttattgatcatggccatcatcttagtgttcaagtcctgagtggttttctctgatttcaacacctccttgtccatgccagccccaacatccttggtctcggtggaaggtgccggagtcgtcatggttgttgatgaagttgaggatgccaatgaagctttagtggctgggaacacgcgttctgttgcagctggtatgctcttggcccctgacgtggtggtggcataacttggtcccaacgtcgaacacttggtgggcatcacgttagcaccatttccagggaaagacgcgtgtgctggacatcaagcaggcaacacccatcgtaaatgttgcgttcattggtgtcagatcgagccctttatgcgtcatagcttgaccggaaccagactagcgcctcaatgccccaacaactcgtggcgagcacttgcaccgccactgctccatagccgttgtagacttgatgtagtacctcgctagtcatcgggtaaaggacttggctcacttggacacgaagaacagcgccagcaccagctcccagccagctcggcatttctccgaacacctggcaggcgcctccagtgaaaccacctccaatgcttggatctagcctctggacgtcactgctgccactgtgtgtcatccaccttgccttctggtatggaatcccacggattgttggctctgataccttattgttacgaacccactccatgtgatttagtgaatttttgcacaagcaaacaattcttcctccaatacttgatacataagtatttttttttttgcagggtgatacataagtatttggggatacaaatggaggaaatggaatcaagactgagaatcagcagtaggttggagaagaagacatagctagagattggagaagagaagagaggtacagaggttgaagaagagagagcattagaaggaagaagtcaagttttatctgttctgttctattctgttttcttccccatttgttggctctgctccttttgtagtggctggagtggtcggcttatcgcagcagattgggcctagccagccctgagctcaatatgcataccaatccgacccagttacatgacatgctgccccacattcctacttgttctgttctttcacaaaatttacacagctgtaagatgggttgctgccccacattcctactgatttggaagattcagaacagggaatgccccttcaatctaatacgtagttaatttctataggcagacatcactgtcacaattttcatttccattctgctgattcaagtaactaaactggtttcatttcccacttcagtgcaaaaattgaagaatatgatattcgttcctgggcaatgcatactgtacttatttcaatttcagctgagattaatgaactcacatactcctattgtaagtaaaaacttgccacagtattatccagagaatgccagctaaaattaatgtaactccgtagccttgtgattgaagtactgaaccattaactttcttcagttgcttaagtttagggatggcaggcaagaggcaactttcataagtcctatgtcattctgaacaaaacactgaaaatatacagcagttcagacaagcaactaaaagccagtcatcaacaattgatcaatcagtcaacctgtagcagtcttcagttgcaactcaatcaagggtcacacaagttaacgtgccagtagaattctaatctgcaatattacaggatatcaacttcttcctgttgatggcagcacgtcgtcaaattcaggcaactcagtgcttcatcatgcagcaacagccactcatttgaaaccagacatcgagtcacttacaacacattgtgaatttgcaaggtcaaagttaaaagaagtgttcaaaaatgccattcatggttaatacacatgtacactgacatgccaaatgtcagtttcaaacatccgaattcaaaaacataatgacatgtaacagttgtactacttgacaaactagggaaaacaaatgtaagaaactgaagttgccatggcccatggagaaccaaatccatcgatgttctgcacaaaactaaacagttgaattatattttgctttaccactgaaaattccaaccaggttcatacttcaatttcgtgagaacattcgaaataatctttcagaaaagagaggggggggggggggggatatcaacaagagagcagctgccataactcataagctcaatcagttgtcagaaatggaactaggaaaacttgcatcattcagtcattaaacaaatgcagagatcagaattcatgtagaacattaaaatgattaacatcaaaacagatgcatcaaaaatcaatggaagcaatggtaaaagaggccgcaacctcagtaataaacagttaaacaccatattcaggtcaggataactccgaactgcaagtctgaaatattgtcagagataaagtatcagtaccaaatacttcatttatctcatgagatagtaacaacgattcattaattcttcatttctcactcaaaacaaattgggaaatctaaaagcgttaccatccctgaattaacagattactgaacgtgtccacaaaattatatcctgatacaggtgcagctctgtgagttttctcatcacttggaatctttggatcagagctctgtgagttttctcatcacttggaatctttggatcagagaccatctatgcatgttctagccgatggaaaaaacccaagtccatcgccaggtgccaggtccccgcaccaagcaccatggaagctcgcggcggcgtcgcagaagtagatgtggagcgggcaggggttgcacaaatcgacggagaagtagcagcctcgtctgaggaagatcctccggccgctcaggggcgccgattgcgagcttcttctagtgaggcggctgctgcccgtcgccgtgctccagcctgaagcgcatcaaacgccgtctccctcgttgagacgaacctgatgaccatgagcacgaggttgcgggcgagcaccaggaagtacatgcatagcgggcaggggggacctcttcctgatgtcgtcgacggtgacgaagcagaatcggcggaggaagattctccggcctcacagcctctcgggagggcgacacactcgccggtgcataggtcgagcagcacggggccgcggccgcgcgactcggggagctccgcggcgagccaggcacccgggaaggagccgcagaatctcgcgcagcgcgcgtcgccgaggagcccggggcggtgggtgtcctcggagacgacgcagaacaatgaggtcgcggcggtggacggcatgagcagccatgggaggttacacggcgggtgctgctgctgctgctgctgcgcgatggatcgccacggtttgcaaacaccggagaacatggcgtgatcgaggatgcaagggaggtggcggaggatgctgatgaggccatgggagaaggagaagttttgagtctgcaaactttttggtggggatttgggggaaaaaaaaaagagtaccggagagattcgttcgggatacgagaaagcaaaaaaaaatgatatggttacacgttttttttcatgaaggtacaataacataacagagccagctgtaaatatattttaagaagataaataagaaggagaagcggggtacagatttatagccagcagtagtatgaactcccagacgcagtgtgaatgacaggtgggaccagatattaatagtatagtactccctccatctacttttgatagtcatagttcatcttgacacacagacaaaggataagtaattctacttatcatccatttaaacatggtactagtcattcctcgtaaccaagcgattcattaatatttacatttctcaatacctatgtagccaatcatgtgtggaaaaatggagagtcacgcaataaattcgagaaaatcattaagagaataggttgttggattgaaatatgcctatcaaaaataaaattttcaaatttagaaatatgactatcaaaattagatggagaaagtatataattattgtatgaatgagctactccctctattctataatgatcatttcgttgtggtatcgagaccaagaagaggcccactacctattttctatttaatccttgtaattaatctccatattaattggctttgagaaacgaaacggcattactgccgctgcatgattacacatgcaagggatgttccgtgctgcatgcagctcgaaaatcgcatggcctactcgatctccgtggtagtaactagttaggccctgtttagatcctctagttttgccattttatagtactttttgttattttggatctaaacactagtagtaaaagttgacaatttgtcatttagcatttgctagtatatagtagcaacttgtactaaaaagtgctttgggaccactccctctctctttctctctctcactttagtgctagaatgtcaaaactttaatatgcatctaaacaccaactaatacttttgcaatgccaaagcttttgccatttgccatttgctattccaaataaatctaaacaggcccttaatccatccaacatgcacatgctaccagtgttaatacgctgatcaaatcggaatatctctacttttgttatgcgctgattattatgaaatggagagagtattaaattggctatagttaaattagaaccagtagttgattatactattaaacttgctcttatgtagctggttttttttttttgaggggaaagatgcaggagaacagatatcttcagttaattagtggtatgcaatggtcagtgggagaagcggagtttcagtttctggtaatgtcgcagaacacctaagcattgctgctttttcttaattgggttggcataataattttcaagaaaatcattctcctgctggggatttatttttttttctggaaaatcattttcattggctgttggtataacacaagcaccagcaaaaattattttcactggctgccctcataaggcagccgctagcgaagacaattttcgctgcggctgtctttattcagctgccaatgaaaatatatttttgctggcgactgtcttaagacggccgccagcgaaaatatttcttcgcttatagttgataaccgctagcaaagatgttgatcttcactggcctttgctttgtggcggctctaaattctgccagcgaagacccaaaatggccgccacgaaagatggttttcgtagcagtcctattgcgtagttttgattgcctgtgctttgtgaaaagttgttgtggattgggaatcattaccagaatcagcctatgtggtagatggatgacttgcgtggtcagaaacggatgtgatccgagatgtatgcgggcatcatagactaggcttcccgagtggaaacagattgttgtgctgcggggcagcgggactcctggagtccgagaaaataaaaaaggctcagggagccgcttaatcaagtgaaatggctccgtgagccgagaagtaatgatccgacctaagaagtcggtgcattgccatttgagttgctgaaagcatctctcttaagtcgaatcgagatgcaagtctcttttcgacctaaacttaaagaataaaatcacttagtggtttcaaatcaagtatttgcaaaacaatcttgcctctctttcaagcttgcattaaacacctaagttcccgtgacttgctgagtacataagtactcacccttgctctctctctgtgtgtgtgtatatatatatatatatatatatatatatatatatatatatatatatatagttccttcaccctgaaaatgaagtgaagagaagattagggtttcgtcctggttcccagccgttgcctgtggtattgggtgttagtccattggttccgctgatgttgctgctgctgttgttgttggtgttgtttcgtccgtgtcgtaggttgcattctcgggctgtcctgagtaaataagtcctctatataatttaaggattgcaatgattcataattgtctgcatggttaccagcgctatgtccttggactggtactcagatcacggtctcgtaagaagcggttcgcgccgtttttcctacgacactattggtatttcttacgatcacagataagatccgcaagcgcacggatataccgatgtagcacttcccctacggagtattccaagagtatcgaatccaagggaacgtgtgtgattatctctttctccggttcattcaaggacacaaagctaatgtgggcagaggacagaggatttcctaatgagaaacagtgtctatggaaagcttaactttaatcctaacacaatacttcaggcactggcaacccgctgttcccagatgttgctctactatgtacccggacagggaggacttaagtgctcttgagggctgtcaccacctctacacccacctcaaacgtactgtgggatacgcagcaaccactggagattaattacccagacaccgcgtctacgcaattaataactacactagtgctgatcaaacaataaagcattcactataaataaatagactatagtgaacaatgatcccgtatgctaattaggaactaactaagaagtaattctcactaagcaaatcttaattattcagaatgatatttctattaaagcagagtaattaacaagatacaaaagtaagaggagattaccgacaactccgggatttctccgattccttctaccttactatatccctattataatatataataaagtacactagagcctcttgtaattcagctcatactttggtgtgtgtttacaagtgaggatgagaggggtatttataggtggagaagtgccttgggagtgtggagatgctcgaagcatccaaagagcatcttctctcttgtgttgccaagtgtccaagcttatgacggtttctaccggtgaaaacggccataaccatcattgggaggtggattgctaccgaactggacttgggctggggcgaacggcctctgccagggttcggccgaacccgggacggctctgttcgctccaattttcgtcctggacactcattttgggcccctcaattcattggtatgaatgtttggcccatttggaggtgtttaattgggtttatgggtccaaaactccttaagttcggatacgagtttgattctcatcctccttcatgtatatttcctctcaaccttagtagtttgtcacctgcatatgaatatacaccaacactcgtggaaattgttagaaataagccctaccactatgttggatgtttacaattatggtcttatgcagttattgacggcgttaatttggtacttaacagccgtcaataaacccccacacttagctctttactcgtcccgagtaaaggttaaggattaatgtggaataaaatttcccaagatataatacaagtatacaaattattctaagccatacctgtacgtgtgaacttttgaagtgtctaacttaccatcttggacaattgatgaatggaacggtcgtgactcaagtcctcctttatcctcctgtcaatctcttgggttttttatatatttttgcaaagtagctatactcctcgaataactctctcaaatcactcacgtggtttgatttgtggatcctcaccaaggcatggttgccgatttgtccctattctaaaaggctgtataggtggagctcggtagggatcaatcggggcatacctgcatcacatatattgcaaagccaaaataccggacccaaggagatagcaagtcatactctctgattaagaatgtgcatgtgtgtgatatgtgtatgggtatgtgtatagaaaattttgtggatggaaaaaggaaaataaaagataacaactcctttgtatacctcctcctccaattttctctctttggaattttgagagtgcatggctatctcttttcttctctttttttttcatcatgccccgtactttgtatgagcaagattcaagggaaggctgttatgttgcaatcggttttgttttcaagttttcaacaatctaattgtgtgcttttccacaaccaacagggtaaaatgtaaacaaattgattttcaagtttgcacaacttctagagttggcctcaaagttggttttcccaaaaccaaaccaaatttccaatcttttggagtttagttgtccaaaataaccattcacttctagggactccctatcatgttgtctccctgatagccacttgcttttccaaacatcaggtttcccaaaacacaacaccttttcacaaagcaaggtaaaacgaaaactacgctaaggaatcacctcatatccacccatgatcgtgggcacggctatttgaccagtttgttaacctctgcagagggggtacactttacctacacgatgtcactaacctaggtcacctagcccatgcagaataaccacgtctggtgactttgaggctttcacgacaaggcatttccaaagccgactcagggtcaccttatgccaacgggaggggtccaacgaaccaacaacattttagtttccagaccatgttgtgccggaagccaaggggacctccacaacaccaccctggcgaatccacttgtcccttggcatcaaagcttccctggcctagttagttactcagcctggggtgtcccacttcacctatgcggtcgcacttgttatatgcttagatgtaatcccaaaggaatcggtccttaaaagcgtgatcacttacccctacttggactatggttttaataatcatattatgatcgtgaatataatggcccattgtttaaaccgctgccttcctagtggtatccgtgcatttgcatatttatctatgatcgtaacaaataccaacaatattagcttgtcgttttgtgtaccttggcttgattcatgggaagggatttaaattttaatacataaaatagtttgaaaattggctaatttttgggcgtaacaattttctctaaagatgtgttttacgttacactttcctaaccttacatcttcgttttccacgcacatgcttcccgaagggctagacagtgtttttttaaaaaaatatgtacaaaagttgcttaaaaaatcatattaatctagtttccaaaatattttagctaataattaattagttatgtgctaatctgccactctattatgcgtgataggggttccaaaccttcacaaaggaacacaacctaaattgtgatactaactgtattaaagtttgtaactagacatgcagaaactgtactctctacactgaatgacctattgcaatcaaacaaacctacaatttatccgataaacctatacaattcatccttagtattgtagttaatattaatttactgcattgaagttgagacaatcagatcaaattaggagagccattagatcaaatcgcaatggcttgatgtgcatccctctctattcttctatccaactctacatccaaattgtcacattcgttggcttccacgaccatcaaagctacgagagtaatgcttttaatctggtaaaattaattactatgtggtgactgttaccattcccattatctagtttatatgtatgagaaaggtgcagtgatgtagttatatcatgagattgggctataagctaacagtgtggctggtcatttgtgcagatgagatgaaagggcaacttcatctgaatgtagacattgtcttctctaacatgcctacggtgaatttgccatcaaaactggatcatatttcctcaaagcagatccttccatgaagcaggtggtcccagttcaccaaataattacaaaatgtgatgcatatttttgtgctgatcaataaaacaacaaaatttagatatcaaaatctgcaacaatgtaatgatggtatgcttactatattaaatgtttgtgaagcaacttgtacatcccattggtagcatatagtacatccgtagctctaggaggctttgatggaaaaaagaccatatctgtctgtgctatgccattgctttctaacgtttctgaaagttgagaaattttatggaatagccaaagatgagaacaaaggcggccataaagccaaaatgggcaagtataacatatcctaggaagtcatgtcggacgccaacattatcttccaaaatttggctcattgctacatggctcccaccaggaactgaaatcgatccaccgttccctccaaactgtgatgcaatgacaccatatattgtccaggatactgggtttgcccaatagtaccacctccaccaaattggtattgcctgtaacacatacaccaagttgatgaaggaacctagatacactaaatagtaaataagtaaaataacaacgaaaaagaaaactttgcttgctttaccttcctaaaaataaggaacccagcaaacaagttccaaagagggagtgcaaaggttatgagaatgttcgcaagcagtgcagatggggtgcatgccaccaacatcattccgaaaaatgtgaagtagttgaagcttgaaacaatgaagaatagaaaataaaagaatttgctagctttccaatcgtatccgatcattgcatagatgatgaccgtgtacaaaatcccttgtatgatattgtaaatgaactccacgcttgcctgcgtagatcaaccatataaaatcaaccaccacaccaaaaataatggttgattctgctgcaactctttcttgagtttgtgtgattcccagcattttgcattctattaagaggaaaaagtaaaacgttcacagtcttgagaatggatggatttagtgacaacttagaaatgatacaattgtttctctgcattctaaaagttaacaacttttccaagagaatgtgaaatagattgttgtcctcaaatttaagagaactattgtttactagattagaatggtatgtcatcaacctaagattaaaaaaagaaactagaataagtacacaagtgactactctttgctaatactattttaaacttacgtttgtgctcttatatttgcaagcatatctagttctctaatcaccttttattttaatagtttttcaatatcttggagtgccacagcattgatgtccctttttatttggaatgttttgaatataaacaaaattgtcagatttcattcaaaatggctgataaatataaacaagcatgcgatgttacctgagcaaatgcataggacaatggagagtacattcctgctgcgctttcacgatagtaaactgctctctcaattgatacaacaggctgaactgacatgcagttagtagccccaatgaagaagattgcagcataagtggctccgagtaaattgtacaaatcttgctgtgagtctctgtgcattacatatataaaacacactttagcccaccgaagactataatatggtatcaaactatatttccaagtagagaacttacaactttgttcctttttgccaaaatactgtgccaaagaaaaggccatagagaaacgttgttagataacgcaagctattgtaagatggattcttccaataagacttatattgcttccataagttcgcaacacattggatatagaaactttgagaatattttgtagcaaataagagatctcgatagcctggtgggggaatgctcaactcctcaataagttcttggtttttcctggcatatttaggaaaggtgaatttagtatgagtcgtacaaatgaccgcttcaattttttagaactcataatcatttttatgtaaacaaaaaccaataatacaaaatattgtcaaacaaagtttcaacaattgagaatgcttacctataaagcagggaattggcataaatttcagcaaaatctacgttcatgcgagcttcttctagagtggagctaacttctagcatccatgttgcaggattatatccttctgtaatacttggaacacctaaaattgtctgcacaacaaatgtatcttttgtgataaatataaaaatttgttgcaccttaatggagttgaaccatgtccatgtttattgactttcatagctaacatatcatactattaatcagagtgtgtattcaacttcagaaagaagcaaaacataactgaggtcaaaatattcaactagtttatgtgagtggtcaccaagttcaccagcataaataaccccgacctcctcttttcaaaaaccaaagcctggataaataaccaattgaaagttcaagccattgggggactcacaaactatgtatgaatagttcacatatccatgcataaattgcacaaacttaacatagtagccaaacatagagacaattgcatgtgtatgtgagagaaacctcatcaaaagactcaaaaatatcaatgcttggctgatggatcgtgcagaccacagtacgcccagtgttgacagtatttctcacagttcgcatgacaattgctgcagctctagcatcaagaccagaagtaggctcatccataaagatgattgaaggatttgctaccagctccacagcaattgttaatcgctttctttgttcagtcgataaaccgctaactccagggagaccaaccatagcattgcacaatacatcaagctctacaagggccatgacctcctccacaaacatctaaatttattaaaattgtttatttgatcagaaataaccatgttgggagttttaaatctgcatataaatgcatattaagtgaaaatgtggcttagaaaaaacctttcttgtattgctatcaacatctgagggaaggcgcaaccaagcagagtagagaatggattcatatacagtaacatttggtgaatggatatcagcttgttcacagtagccgctaatgcgagcaaacgtttcttgtttcttggagtaaccagaaagggttatgcttccttcaattgttccactagttttccttcctgctaagacatccatcaaagtggtctttccagctccactgacaccaactaatgcagttagaagacctggcctaaaagcaccactaatatcagagagcagttggagacgactttccatgagtccttgttgcttcatttcctaaatgacaaaagatagcacatgtaactatataactataactatatatatatatatatatatatatatatatatatatatatatatatatatatatatatatatatatatatatatatatatgtacttataaattgtcatacaagtcagaatttatttcaaacatgaaatatgaaatgggtaaggtatgcttactgagggcatgtccacataataatttagatggttgaaacaaagtgacaatggttggaaaggtaagacaaattgtgactgagttggcctatttccttctccgttagcacctgctgaaacaaacattgatatttactattgttggaagtttgttatcaacaacttggcatgttacatcattatgggaaaggtccaacaaacgtagtttggactgaaatttttttctgcataattgtattattttaatatagataaagatgatcttactcgtaggtatcgatgatgttgtggtggatgttcgggacctatgctcttcatttcttgtttccgtgtacaactcagtttcattgtgttcatcaataactagtgcgtttgcacttctaatagctaggagagccaatttttgaagtataagtgcccaactgaatagataaacaaagtaataaacatgatgaaaaaacagtggtgcttacgacttaagtatgtaagtgccaagatgtataaggtgttgaacaaaataatgaatcctactagggctccaatggatagccaaaatccccactctccagtgaacaagccttttgactttagaatagcctcacctaccgtttttgcatcaatggttgtgtcattgtttggctgtaataaaaaaaagctcatacattagttgaattgttgccatatttcagggtttgtggttacctcactatgtatttcatagatgtaaggaaaaattactgataaaaacttacaatggcccacctactggccagaaattcgttgatcgatattgcattttggctatacatcataggagatgcccaataacaccagatccaccatggtctaatgtcatctggccacattgcaatcaaataggaggttaatatcactcttgcaaattaaatgtaagtgcaattatgtgatttctcatgacaactgaaataaaaacagatgtaatatgctagatgtttacttacttttacgtatcacaaatcctccaaagacgaagacaataagcaacacaagcatcccaaaactaattgctataaccattgtttgcaagatagcaccaagaaatcgaaacagagccattgccattaggtgagtaacgaagaaagctagaaactgacgaaagaacctaaaattaatcaatagataacttttgtaagattctgcaatgattcatagcactaaaagtcaaaataaatatgtcaggtatgtcgacggatttttagtaccttcctgctgctggtgcaaatcccatcacatagtacgtgatgacaacccagaccgtagcctccacaagagatacaggaacctttattagtatatttgcaaccccaaaggtccatggagggaagaataaaaaatctctatgcttgtagaacacaggaagcttctttactgtcaagtttagctcagaaaggccattgaacatgactggtattaaaatgaatgtcaatgccccaagaaatttaatgccctcagaaaattgcccatggggcatctttgttctaaaaaacaccggcattgacaagaaagccagaatgatcaattgggtgaccctgaatatttaaaaaaaagaagtgcgtttcatcaacaacttctctctacaaagcacacccttcaatgactcccagggggataatgcatttttcattgttttggtgcagcactatggattttggatttttcaaatggaatatgttgctccttcatcatttggtggccaatataaaatgacttgaaacgttctgcaaactctgggactgacacataacaataaggctccttgtcaaggaaccaatattgttgctggtctttcttggaagtgacctcttgaaggaagtcagacactgctttcctttgagggcatcgaaagccagaagcttcaaaaaattcgatgtattctcgcgtggcccatgatagactatgtatccttctgatagtagaactatgtggtcaaagagattatatgtctctggcggtggttggaggagagagatcatcacagtttcattcattatatggaccaaatgcctaataaattttacaatatgaaatgtgctagagctatccaagccagtggatatctcatccatgagcaaagcccttgccggtcctgttaacatttcccctaccaccaagaaaagtaataattgtaaacgatatacattctatgactaatttttaatataactgtcaagtttctacctgttgtcacacgcttcatttgtccaccagaaattcctctaatcatctcatcaccaacaatagtatcagcgcaaatgtccagcccaagcacctaacaatgttcaatgatcatttcttgttatttcacccctaatagattacatgcaaaaacataacaataatatcaccttgagaataagatctgttatgatattagtctcttgtccttgcattgcagtagctttcatgaaagcatcgatctcagggtctggcttaatgcctgcattgcgttcccttctagagatttccgtgagcatgtcgtatcttgacccaatacctaagcaccacctagagaaatctaatgtctctcttacggtcatctctgcattatggagatcatattgactaacataggcacttgtccgctctggatagaactcggaaaatttatgtccacaataggtgatattaccaaatacctagattgtgatagaatgaataagcaggtagcagtaatgcatcataagcaatataaaatagtaatattccatgagatgactggatttgaatagaaccttgaggtttttatcaagtttcccagtgagcgctcgcataagtgtgctttttcctgatgatggaggtccaagaaggagagtcatcctgaaaataatactagtcagattaaccacttttttctacttatcatattatggcattaaaatttcttacaactaggtgattccccgcgctttgctgcggaaattactaagcaattctcaagaaaatatctactttcttgtatatacatatatttctattagtatatgtatgtaaaattgattgaatgatggttggaaatagtaaatatgatatgatatcttgattgtattattgtccaattgagtacctgattaaatatatagcatttagatggggtggtgattcatggcgttgtttaattggtgaggaagtggaggggacttttatctaatggctaatactagaaagacttgtcgatccaacggttgaaactattttgatgatgtggctaaatgtggtgcctgtttgtggtctcacttatatagaaagcatagataagaagattggtttctatctgaaatgtttcgcaatctcctctatacccctgaattttgcctcatcccctacatgcccttgagcttttatgttgatctcttctatccttattccgttagttgaccatgagttgactgttaaatttttctaaaatgaccatattgcccattttccattgctacagttacatgctatctactctacttcataattcacaatatgaaaaattgtaactcatgataaaatcaaatgggacataattatttatttaaaagaaaatttaaacttttgaacaaatttattttttttggacaaaatccatataagagttttagctagaaattgtgaaccaaaattatttatttgttgggttcaaattttgatgaacacaatgtacgaatatcatgaaatttaatttataatttatttaaaaaattttgatttatttttaaaattgttgtcaaataattatattccctttgtttatttacaaatagattttttttcatataagaattgtgtttttatcattaaactagcacataagtataaaaaaaggggaatataatcaatttcaaaaatatttaatgggtaaactaccggcaactaacggaatgggcatagaaaaaaatcaaataaaaactcaagggtatataagggaataggcaaaattcaaaagtacataaaggattggatgaattctcaaaggtacataagggattttctcatatgcttattatactatacagggcccatggtggtggcaaaatgtagccaccaccctaaatctataaacaaatatattgaggtggtaaatcgatcttgcaactgtaggtggacctcaacttttaatttgtaaatgggccaccctcaactatggatagaccctcacaacacattgtaattacacacaagtataataaaaccttaaatctgcactcctatttccctgccatgacaattcatcccttattctccggtgcactgctcccctctcccctcccctacacacacgcctctcacctcatccttctaccccaccacctaatccctagccacaaaagaaggtcccatccatggagcacactaatagttctcgaggatctagcttgtctattgtggtggtggctccagaagatcttgaacggctgcggtcatccatccctccagatcagctagcggaactgtcgatagcagccaacaactatcttttatcgagcagattgcacatttttctagattttattattgttatgcacaaaacacattggactaggtattagcacatatttttttacttttgactaggcattgttactaaagctttcactttgtactatttgtccacaagtaatccagtaaatcttcccctccccccatctcaagctcaatcaatggttgcatcagtgtcctattccgcctcaaccacggtcaattgaaaggcaatccttgaacctttctacgatggtgccttggcctcttcctcctccccatccccaaatcatggtttacttcaaaccactccttctttttttttagttttttgtgttaccaaatgtaaatgctgcaaaatttaggtgctaaatgcctgtagaccccgtatgtaaattctatatttctagttgcaaatactataagctgaatggtttgtgaatgcaagagtaagataagcatatgtcactacttttggaaatgattcacggtcatgatttcttcatgtatgggcattttatttattaacaactatgaggaaactaatgattttacaacttcaggggaggtatttatagtcacaatgggaattcatagctcgtgactataaacaggtagtggtttaggatttcagaagaaatggggtgctggtaccgccctcgggcttcaaatagcggtaccaataaacaggtagttgtattgccagaatgctaggcatattagaacaattattagtcattatcttagggaagaaaaattggttatgcttaggattccctggcatgaaaactaatcagttacatttttctggtattaacactaatcaccagcccagaagaggaaagaacaaaaaggaaaggaccatgttgctgcgagcaagtgtttatatgaagaaaagaatgggaaattcgtttaataccacaaaatatggacattttagttttactgcagcgaaatttggtagtacatgttgatattcaaattttcttcgatttccattctcaaattttcttgggtttccatttcaccactattgttcttttcttcctgtgcttaaggattttcatttattttcatttggtgaaataccaaattttcccctacagaaatttgttcatctctaatttctcaacatgtggcctttggaagaagaggcccagaaatcactcaccacattccatctcaacgtcggatcttggatctcgatcatcagctggtttgcgaggtgagcaccctttgttgtccagctcaactctatcaaccctctccactggccattaattggtccatatcttcctcagctccttaattgccttcactgaatgttgaccatgccacaacaggtatggcgtgaacaaggcagttgaaatcaactgtgcagaggtgtccggttaggcattgagtcgagcatgtggaacacggcggtgtgcagaggtattccagtgttggaaataggacac

SEQ ID NO: 27692 - DNA, 3813 bp, Oryza sativa
ttccatttacaaaggctaataatagttattgagccattggtaaccgtagtaatgatgtttatctatcctctcttctccctcctgtatatcagtaaatattcctaataaacaaggctaagaacccattactaatgtccacactgtacatgcacaacccatcccaatgaatttcatttagaaaattcaatccctatgcatcaatttatctattatattattaaatcagccttaaaagaagacatcatgtttgctatggaggctagaaattcctacattaatcgaagaaaagaagaaatatctaaaccattagattttaatgcattagattaaagggtgtagatttatcagaaaaaaagttctccaagtatgaaacaaactctacttaatacaaataggagagtcagtcttatctctcacgttacgtcacgcgcaggcatgcatgtttgagtactgattgtatttgggctaggatattgtccgaatgggggaaagggaaaaaaatggataccacatggattccaaataggaaaaataaaatcaaacggacagctttgatatacagatgtggaatcggattttgaagtgaaaaaatatcaagaacatcccgagatcaggccatcgctaagttaagtagcatggtcacggtggttagcgagacttctaaaagtaaaaaatgtaaacccaatgctaatcatgtttgatttttaaaatctcaaaaaaaaaaaagaggggaaccagctggtaggccgtagaggaaaaataaacaccaatgatagtcatgttcagtttttaaaatcttaatgaaaataaagaggagatgcagcgggcagctctagaggagtacagtggcgaagccgctaacggtttaatgaaacttttaaaaagtaaaaaaataaacccaaccgataattatgtttgatttttaaaatcccaatcacaataaagagaggagacagcgggtgggcagtagataagtataatagcgaaaccgctgacggtttggcgggatttctagaatgtaaaaaaataaacccaaacggtaattatgcttgatttttaaaatcccattgacaatgaatagaggaggcagtgaatggaccctagaggagtatagtggcagtatatttggtagcacttttaaaaattataaaaacgaaacccaacaagagaatgaactctaaaaactacgatgtccaatttttaaaggttccaaggactatggatagaaatggtggtagatcaaaaaagcaaataaaggtgtgacaaagaagtaaggggtaacgactggcatgacttttaaaaatataaaattaaaaacacggtgatgataaggtttgatgtttcaaagtcctaagactacaaggcaactattaaacaaaatttaagtaaaattatatgtaagaaatagataattttatttaggtgctagccgcgtaattgcgcgggccacctagctagttctttctcaaaggaccatgcaactctctcgtctaaaggcttagttcagtagctcgtttagcttttgcaactcatttatctatagcacccgttctaaaccaaaaaaactttttatatataagtttattttttaaaaaataaataaaccaatttttaaatttattataattaatactcaattaattatattttagagactagccctattttgcatagcacaaacattccaaacaaaaaacccacgtttgaacggaccaaatagtttgtaatcaagaaccatttaaaatctttatgaaccattggaaatgaactagttctataatatatctctaaccattacaggctaagaaacattagtggcttcggttaaatgttatggcctagttctataatttgacttcgtttgattctatatataatatactatcgtattttgcataacttctctgttttaccatcgtcctacttctacgccatcgatatcgctcactgtgtagatttgctatattgaggaatgatattaattataaaatacacttaaaatttttgcgttctatcattagatgttaatggatcaatttattcattaactgttggtgatattttctctctataaaatagatcagagcaaatatatataatacttcctgtctatgtatattgacgttattttaggactgagttgggactgatctaaggtagtacgtgcctggagaaagttgatggcagagttggaaagggtgggtagggcgcggctggcgacgaaggcgtctgcctggacggagagctcctcgtaccgaatttcgatcttcggaagttcaatgccaaccctgcgtgtatgcagcagcaggaccatgtaaataaacgcgagaaattgaacaaagaaaataaagacttaactgggcttagttggactcaaacttttggcgagacataaaacaaagagaaccattatagaatgattaagtaagtactattgttaactataaacttaaaaagtaaatttatttaaattttaaaagaaatatctatatagaactttcttttcaagaatatatcgtttagctgtttgagaaaaatgtgttaaccgaaaacgaggtagcagttgagctgaaaagctaagtagaagacagcgtgacatgtggtacaacaacgtacgcaggggcggaatcaggcatggggcagctagggcttgagccacatgactagctccataatcccattataatcttgaaaaatactaatttatgaaaatatttgagatctcattagctcagtcctagacgtggaaattttctggctccgccactatacgtacgtacatgtctatgcggtcccttagccggcgcaagaaccgctcgctgtcgtcctgcaagaggcgttccacgagggcgcgggcggcgtcgccggtggcaagcctcccgatgtcgacgagctccaccgccttgccggtgcccgcgtcgtcgtcgtccttgtggtcgtcatcaccatcacgcaggagcgcgctgcggacgacgccgcgtcgcatccggtcgtaggtgggcagcttctcgagcgccgcccaccgcaggtcctcctcctcctcgtcgtggcccctcatcgactgcgcacgccggaacgggtcctccgcctccacctgccggaacgactgcgagatggcggaaccccagctcgggctccgtccgctcgcggacgccaccagcgccgcatggtggcggtggctcatctcgctggctttcttggtcgatcggttgattactcagttggcatgcagcaacttaactcaagcatacgctaagctatatgtgtatatatacgcctagatgccagcatcccacgggcacccgctctatggctccgtttttttctccaataaaagttggatgaagattaagatttttgtggcacgtttttcaaactgctaaacggtgtgttttatggaaaactttctatatgaaagttgctctaaaatatcattttaatctaattttcaagtttataataattaaaactcaatcaatcattcattaataccatctcgttttgtttaaaaaacttactccttatctctatcttcatctacagaagaaatgaagtacgaactatacgtgagtgattagcagctgctaataatttcccccgcagccaatgcttggctgctagctgaccagctgtccatcgtcgtaccatttgttatatacagtacattatataggagtacgttgatatacgcaataatcccttatatgccactaaaaattggtcggatctcttatataccactaaaaattggttctttccttatatgccataagtctaaatttgcgcaccttctcatgccactgccgtcagttg

SEQ ID NO: 27693 - DNA, 11761 bp, Oryza sativa
tcaactgacggagagtggcatgagaggttgcgcaaatttagatcaatggcatataaggaaagagccaattttcagtagtatataagggatcaaaccaattttcagtggcatataaggaattctatatgcacagagacaccccaagtgccatgcggtacagccgtgcagggccaccgtttcgaatgcgtgaaggggaccagaattccaaaattccggatgaaaatttgaagaaattttgctaaatttaattaaaaaagattccgctaatttttttaaaaaataaaattttcgatcgagaagtacctcttgcacaggtacccactggtaaacacaaaattttggaaattctgatacggtgtgtagtactgtagtgtactctctcctcttgctagatcaaccggttatgcaaaacaaagcaacacgtgcgtgtactacataagtatatggaccagtatgcttggcacggttgtgggcggtggcacagtacgaggtacacaccgtttttttcttggtaacattaaatggattgcgtacatgtatatatcagatagattctaatatttaatttgggatcggcctacgatcatgtactactactacataaaataattatataatagaataataaatgaagtgtagatgttggaaaatagagaaccgacatctataaatatatatttatatatagtacgtgttatatttttccttcgccctaaaaaaaactgaacttctatagtttaaattttgtcccaccaaaaactaacttctaccatcctacctactctcagcagaagttttatctctttaataccctttacctatctaggggtgaaaacggtacgaaaactgacggaaatcatctttatcgtttttattttcatattttttttcgtaatcgaaatcgaaatcggaaacccggatacgaaaacggaatcgaatattatcgcaaccgaaaacggagcgaaaacgaaccggcgcgaatacggtaacgaaaatttatcggaataaaaataacccctctaactgataaatctaattctcaagtctcaacggtcaacaattcatcgtaaaacacaatcatataagtccaattattaagtatcaacagtacatcacaaaacacaatctatggaacaaattagtaatgctgttgataaatcccaatgtatgaaaaaaatattattatgtaattttagatttgcataacaaatattatttaaaaaataatagccaaacaccatggtataaactattcagtgcttaaaaaaacaatccagggtatttctagaaattccgagaaaaaattccagaaagttttcgacggattgcgagttctgacggaaactgcccttatcattttcgattccgtgtccgagaaagtatttccgaatccgtttccgtttccgaaaaattccgaaaaaattctgaccgacagattccgtttccgaaaataggtccggaatacggaaaattttcgtaccgttttcaccccctacctattactcttactatgttttttatttattaagggcattttagtcattatcactcgccactaatttcaccttgggatgctaggattggattttttttggacggagacagtacttggttgtaaaaaaaaaaactaaaattgggtgcgttatagtttgtctgtgtgtgtcaatatatatatatatatatatatatatatatatatatatatatatatatatatatatatatatatatatatatatatatataaaataaaactggtgtctattaaggtgtggctttttaaagtgctccacatacacacaaatatttgtgtcagttttcttaaccgtccgataccacatatttttcttagtgagtgtaggagttgagcctatcacttcgttatctttatcctatcctctccctctctcacgttctcacctattcccgtcccccccacccccccccccccgcgcgcgcactacccttctgatgtgaccatggctaacacggatgcaaccattgctcacatcatggatgaacaagaagatatcgagatcaagtactccaagtgctggaatccgattcggccacctactacactactgacttcaaacggccaccgaatctgcatacgacctccgttttcggcctgtgagtacttgatggaaagctcttggagccctctttctaacggatccagcctcttctctgaattccatctcgtgtggccggaatcataggaacaaggtgctgcatcacctataatgggcctatgggcttgtaacttcatttgggacccggcccaggtggggcccatgtggggtgcgccccaagctgatggagcacgaccctaggcacccctaggtcatcctcccaccctatatatagctagttaccccttcagggtttctcgggttttgttagattaaagtttagccattgctacttgcttgcagcgcgcgtgtcggctagaccgtccgtctgcttgttcttcagaaccccaacttatcatttgtattaaattcctatttgcaatatcagattgcttttatcttgttcttgcttgtttcttcgatttgcttgcaggaatagggttgatctgcaccggcaagatcaacaacccacggagaggtgtatcgatcgctaaggcgcaacacaacgtctcgtacggttgtagtcagatcgtcaacgtttctcccaaatcgtagttatcacaactcaccgaaagatcgggccaacaacagccttgagtgtcgagaggaactcagggttcatcaccttcgctcctcaaagttgtgcctgtcgccacctcctcctcctcctccttccacttcatcccacactatgcgtgaatggtgtgaggacactagccatcacgctcgcctgggatagcctctaggccacagcccacatcctcgcactcctcggcttctccctctcctgcacctacacctgttgggatggcgatggctgcccctccttctctccaatcgggggcgaccggattaatcgccgcgcgcatgggggcggccaaatctgccacagcgcgcggggcatgccactcgacgactacagtagtagtggcagcagcgacctcctctctttgtgtgatcaggagctgctcgatgcctcggctcgaattattttttattcatggaacctcaaaggtgttggttccaaaactggaacctttgattcctccttgttagtggaacctactaggtgtccgttatgaaatcttgcatctatgtgtggttctcaaccggtacctactaaggtttttgtagtagtggtaggattagaatgtttcaattgacatcagcaaaatatacgttatgaaataaataatttagtcgtcaaaacattcaaaaaaaaactttgaaacacaataaaaatataattctaaaattttgccctaacacgtgaaatataaattttaatagttaaagcacatatatttctttcatcaaagtataaccatcttattataaaggtttaattgtaaagaatatagtggttattcataccacaaatcaggtaagaaatcttatttaatttcccttcataaatatatggatgaaaatgaaattcccaatgggacttttcagttcgaagacttttgatgtatgttatcattagctatcattgtcaaaactaaagtcataacgtacaatgcttcaagatacagatagtgtcaagttcttttgtttgctagacaaaacaataagtaactttgaaatatggcaaattttattttaggacaacgtgagtttgcaattttagctgtagacaccacaagagtaaaactttcagttgaagacactatgtaaatatggtaattagccattagacatcgcccccaatatttttatgtatttggcctgacaaaacaagagaaggcctacatttatacatggagagaccgaaatgcctacatggtatttggctatatggagttggattggttggaacatggcctgagccatcagtcttgaagacccacggtggccaagcacatctgtcatcataccgtgatggtggtgataacatcaaggtgaccactttctccatggtggccacaaggcgaaggtggtgttgaccgtgatggccacgatgaggcgtaggtggccacaaccgcatgatgatgatatattcttcttcgttttttgcctcacgtggtatagtgggagcccggagttcctaggtcagcgatcttcctcttgtgaaatgcctgttttgcaaggacgattccatggtagtgggatcggacaatatgtaagcaatttcccccaagtttctagggctttcactacatttcagctttaggaatttcaatttgattaaatgtgtgttgttgttgtgttttgcaaactggtgcacaatgtaattttttgatgtggcacgaggactatgttgtatagatggtgaagaaagggtggcttcatgctacagtagattgcaatgcttcatgctacgtcttgatgcttggagtagactggatcaatggcagcatggtcgcacactaagtgcttgatcagcattccgcgacagctcggacataatgtggtgaggtaaagctttagagtattgatgtagaagtgaagggtggatgatggtgaacagaggctagggtgctatttataggatggctggcaaagggcaaattggccttggccatggccatggctgtcggcatctaggaatggaatttctgaatacccgaagcataaaccgtctaagtcccatgattagtagatagtacatgagtccacaacctgatcatcacatccatacataatatgcatacaaatagataacatggttcacataacatagcgagtgcataagtcatacaatataaatagggtcgaccagccaaaagaaagagtttaaacgtagcataataagaatagcaaaatatcattttggtatacccatctaccaaaccaacccagaaaccgatagggaatcaacctagaaagaaccatcctcgaaacctcctacacggtgcaaagtactcgtccctaagcatttcacttccaacatcaatgtctaaaaaaaaacaataagaggtgggtcaatacatatgtattggcaagtactacccaaaccatgtgaagtatatgtctattgcaagctgagatcaaaggaggttatctttgtagactaaattttagcataagcaattttttattcgcaatagtaataattatatattgcaactaaatttgtaaagcaacaagtaaacaataatagtaacataagcatcataataatatcatacttgtgcactccatggtagcaagtaaccatttcattctcagctaacaccgggcaaaatcagcactgaatttacaccataccaatttcacatatcatttcaaaaatcaccaacactatacttgtatcatttcaccaaatcgctcatgaccatgagaacagttaatcaattagtttagaatctgcagagtttgtataatgtatccatatgacacaaaatagtaatcatgcaagcatgccacgcgataccgaaaggtacctgatttaacacttgagatgtagttgttacattcctcaaagtctagccttgcatcaacaatggtgagtgaaaattcacactaaggcatatgacctagcgttgttaggtagcggctcacaccttaaacctaacgccatagtggcaacccaatggttctgcgtgccgtattggacaaacttagacgcccatgccgtatcctgacacatggggtaactcctttgagttaaactcaacacaatagaatcatcatcaacacacatcataactcatattacttcagcctaccaaaatacaagcctagtcaataagcaacttagtaagctaaggttaccccaataaataacacatgtggttgcatgatacatcttagttggtgacacatagtttagtccttaatcgacccagacgaacactccccctatgtcacgccctaaaaatcccaaatttataaattgttgtttaaatagaattataagaaatgattttaaaagcctagaagaaaagatctaattttaagtaataaattccaatataaaagtggactagataaaattttattaaatacttctcttgattctatagttcctagatttttctgggatttatttgagccaagaaagtatttttaataaatggaattgcatttcatgaataatttaaaaggaaaaaggtttaaaaatccttcttttggatttgggccgaaagctagcccaagtctctctctccccggcctgtgcgcgcccggcccaagccggcccaccaagccagtccgcccctctctccctcctctctcccgctgacaggtggggcccacctatcagggtcgtcttccacctcccgccgccagccgcgccctagccgcgcgcaagctgccgccgccccttccaaattcggtcgcatctttcccgatccgatcaaattgatagagggaaaatgatcccttcgatctcctctatcttttcccctatagaaactttagctaatttcgtttggaaatcgtcggattcgagttcgattcagattcgatttcttccctccaaccttaaaccttccatcgcctccgccagacgccgtgggcctagccgcagcccctagcccctataaaaggacccccgagacctccgctgttcgtgccaccttcgccttagccctccaccgccggtagagctctagccgcgttagcccgtgcgccgccgtcgccgcagcaagtccagccgtgtgccctcgccgctctggttgtcgtcatcgcttggggaggttgctgtcgggttcgccaagtcgtctctgtcctcgtcttgtcctccgtttccgccgaagatcgccggagcatcgcagtcgccgtcgacccgaacgtcttcgccgcctcgacctcgccgtcgtcgccgtctgttgccgtctgtcgtcgtcagagccctcggtgagttcgccgcgtcgccctctacccgtaggtgctgtccgtttgcgccgctgcgccgtcgttcgccagcgagcacgtggtgccgagccgccgtcggcaatgacgtcatcgtcgacgtcagcgccacgtcagccgtagacccgcaatagattagatcgatctcggccgttcgttttgtttagattaaatctcagccgttcgttccgtaaaccgttttcgtgcacccggtccaccgtaaatccgagcccgttgacacaataaatcattttttccttttcaaaaataattctttatagcgtcataatccaattaaaatctatataaatgatttaatccggtttaatcttaaaaattcataactaattcatcttagctcggatttagttggttcaagtctctaaatttttctaaaattgagatctacatgttaaaaatatccacatgtgctgtttatgattgtttatgtactgttttggtgattttggtcttttatgtttagattccgatgttcccggagagtccgattttgcaggagaagactttgaagaattccaaggccagcaaggcaagtcacacatatcccaaacaaccctttgagcatgttgatccagtttaaagctattgtttctattcaactattgcatttatttttgaatgtcaccgggtgggaacgacatattgcctttgttatagccctttgttattgatttcctatactttgtcacctggttaataattggattagctagaacattatatggttttagctaaagtaattaggatgcttagccatgcttagagacgctagctcatatgaatgggataattaatgattcactattacttaatgatggtttaatggtagctcatgatggttaatcatgataagatgccaactaaaacatggtaatagtgggttgtgagcacatggttttgatggtcgtgctcatgacaattaaggaccggttcacgattttcggttgtgaaacattaaccgtgccaaccacaagccagcgtgggcaacggctttaccttttgtatagtgtggttcatcgcgaggcaccagactgagaagtggcgaagataagcccacgggggtcgctagggagtccatgccttgttttataagtgggtgattatgatacaggaatggtgcactgatttgaattgtgctatgcggagggtattgtcacaatctctattcgggtacttgttaagtatcgcgacgcatggttgacatgatgttaaggttgtgtcttgtgggtacagtggtacacctctggccatagtaaaactattcgaatagtcgtgcctgcggttatgggcgggtctaacaatgtcttttgtgattagtctcacacctcttaccataataaatgatgctataattggtaataacttgtttagctcctggtttggaatggtatattcctggtttggaaatagaactgggcagccgggaatggttgttcagaatggttgggcctatgcaacgggtatgttgtatagcgttggattagtattatttaattaaatactttactatttttctaaattctgaagtatttattgaatgccatttatgcaaatgagactatattatgccatcctttgttatcccctgcacttgcatatttgctgcgtggcttgttgagtttgtcatatactcaccttgcaatcattcatcagaggaggagttctacagtgatgctgaaggtgtggaggattaggcgtagccctggtcaagctgcttgtgggatggagttgtctgcgctctttattttattttccgctgcttagatctttattgtttgagaggaactatctacctctgtaatgactttatattcacctattaattggaataataattgtactctattatcaatttgttattgtgtgcctcggctgattcctggacgagggtttacacgcatgtaagcgtttggagttttgcatagaaattccgggcgtgacaccctatcaatgtgcaactatcaccttatgcacatcacttgccacccaattctaaaaccatcatttttagtttttattttcacaaataatagaggcaatacccctgtccaatattatcaaatgactaatttgaaagagtgaatattgtgtcattgatatccatcaaaatttctaggcatggctaagcaatagctatattagtatctcgaatatactaaaattggtacttggacactactacaaggcatcctaggtatatcaacaggaatatgaacaataattcaaggtggataatgtaacaagtaggagttgttctatcggtacccaattttttcaacatcgcatacaagttatagacaatattgcattacgaaaatatagacatacaacatgatcggaggaggaattgaataggacttgccttactcagtgaactcatcacaagtatcaggttcgtgctcacactcctccacggctgtaactttgtcgtttattcaaatttaaatgaaactcgaatgaacaccaaatattaaaaatgctcaaacatgcatggtactagtacagtagatataggatgattttagataaatttaggtgaaaaaatcattagaatctgatttcatacgccttagttataaagctttcaaagtttaaaaatgctgaaattgcaaaggttactattcactatttgaaaattcagatttagctgtagatctgccctatatttgtcaaaaaatttttacttaaccacacgaaggagaatattatgaggatcaatggtaatttggttcactcaaatcagggtgaaaatgaattctctatgatttttcaaagcttcagcaaattacatatataattcacagaaattgttttctcaaattttttagttatttattaaacatctacttcaatgcattacaacttcttcaatttggtcttttttttttataaatgctttgaagtggtaagtagtggcatatgtctattttttgtcaaattgtaatggcattataaatgctttgaattataaatgctttgaatggtgtgcaggcctggactggcaagtgccaacctacctgctgcgacgccagggcttctctgttctgtactctcgccgtccctaaaaaaatctcaatttaagttagaactagaaaatgagcgtgcccgttggcatggatcttgtttctgttggctcatgttgacttcatgatgatgtagttaaccaaaatctcttgttattgtcacacaccttcactcaaggaacaacaatgatcgattaattgcacttcctcacgttacttcaactttctccatcgaccatgagagggcactagaccattcggtcgataagttttcacatgaccataccagcctatgagggcactcgcagtgcgccatcagaaatggtgcgcctgagcttggggctgggctagagaacaccaaaagccacttatctacaatgtaagtgaccttacaagtagcttatagtgggacccaccataccactttttccttttcactttccctccccctctctctcccctctcttcctctcccctctctctcccgagcggcggggcaacggcggggcgacggcgccgagggcccaagcggcggcgagccaagcgacgatggcgccaggcaccgggcggcgtggcagcgaggcggtggcagggcggagcggtggtgggacggccagatctggccggacttggcctcgggcagtgacggtgacgggcggcacgaggacgacaagctcgacggtggcggggacgatggtgccatctctccaccaaccagtggggcacggcgcggcaggagattctcggcgcgcgaaagggggcagccgtggccggcgtcgttctcaagctcctcgccgtcggcctcaagcttcggatgtgccgagctttcttccctccctctctcccttccctggtgacctgacaaagctgccaaattttgctgaagaacgtgtgtctcactttggtcacttggtcctgggttggtcacaggaaatgctgatgtggctgagaatctcctacatgtaagctcgaggctgaatgacacgtaagcccactgtgaatggcctgagatgcgttcaccacttcaccagacaaagcgccgcatgtgaataatccaaaatgtgggcatacatatgcacgctgattcacaaaacaaacgttgatgaatctggtgccacacaaacaaaacttcagaggatattgcatctactaatagactagcttcgaggcttggatatgcagaagatacttgccacgtccagaaatttagccaatttccaaattattttttatgtaataaatccatgtccaagaatgaagccagtgtacacaaaatgacaaattaatatacagatccaaacgcaaataaagcataagtacttatagaagaggtgcttagtcggttagtcctcacacagtaaagaaaacagcagtagaaagggacgataatagcgatttttaattaaaaatcattccctaaaaggaataataaaatttattaaaattcaaaaagaaattagaaaacattaaaatacatacaagaaaaattcgaatgttacccggattatttttcttaaattccccatgttataaaatgtctccctaatttttacatgaattttaagaacaccagaaataattttaatgcaacaaaaaataatttaagatttaattaaaatagaaaacctaaaataaatcccctctcacccgttaggcaaatccagcccaaagcctctctcccctccctctctttttggaaaaagtacatcaaaggtccctcaacttttcatcgagtcacaaaatcgtccccaaaccgcaaaaccg

SEQ ID NO: 27694 - DNA, 1402 bp, Oryza sativa
gggcgaggcaggaaaggaggaggcgtgggctgcgatgctagagaaggcgagggcagcggcagtggcgaaagcaagagcacagtgccacagtactgcgagaatgctaagccacacctgacatgcagagactaacacaacaactgccgaatcaagcgctcccaactattgggcggcaccttgccacttttcgctgccggcgatgccggacttcaagaacggcgtgccgccttgcgcgccaagcccggacatatgcccgctgccggccagcgacgtcgagtacctgaactcgtagccgccgttgccgccaagcctcacgatgggctccccttcatagctccttgacagcatgtggacggtggagaactgctcttgccagaagcacgccaccttgccaccgacggaggcaagcgccgccgagtgcccgacgttgatgaagctctgcgtgccattcggcaccgcgttgccaatgaactccgccatcaagtgtggcccgttcgtccccgtcgatgcggaagccgccaccgccacagccgctacatgaaccaagaacgacacagcaacgacaaatgtaaccgatgtagctgagtcaagtgcattcatacaaggcggcggcatgatcgatggaagctaagctaaggtaagataagccgtcgctgccctcgccttctccagcatcgcagccgccaccatggcctccacctctcccgcctcgccctggcggcctcctcctcagccgtcggccggcttgccagaagagaagagaagagtgagagagaggagggagaggagggggaagagaacctgcagatgtggcacctgacatgtggggcccacgtgggtctcaagctgacccagccgccacgtcagataaaacaggcatcaaaaccaccgaggaacctagtttgcactggttttgtaagttgggggatgctttgtgtctagttttatggttaggggacaattttgtaactcgataacaagttgagggacctttgatgtacttgttcctctcttttccctccttctccctgggccgtcccacctccttctctccctcccccgggctgcctcggcccgagccatcctgcccctcccgcctgagccgcttccctcgcgcggcccagcgccagccgcaccacccacacacgcgcgacgcacgtgcgctgaccgcgcgcctcacgtgggtcccgcctgtcagactcgtctccttcctcctgccggcctcctctcctcacttccgtgaaaacctgcctgagtcctccccaaaatccgctcgattcaaacagataattccaaaattaattggaacggctgtgcctccatcacccggaacggctgtgcctttcccgaccaccttccatggccgccggccaccattctcggtgctggccccacctctccc

SEQ ID NO: 27695 - DNA, 1082 bp, Oryza sativa
gaaatcaagaatgatgtcatgaactcgacatgccttcgcctggccatattttaaatcaactgggtggatcaaacttctattgataagatcattaaaatagttctggccaacttcataggggctccatccttgtttctcatgaaccaatccttcagcaatccatctatttatcaaacgttgcttggtaaccttgtaatcttctggaaatatacccaagtataagaaacatgttctcagatggtggggaagttcaaagtaactaagagataatatctttgtcatgttcccagcatctggattgttagcaagtgcacaaccaatatcatttagcatcctgtcccattcatcttttgcatgcttgcccgctaacaagctagatactgtaataattgccaatggtaatccaccacacttagccaatatctcatcacaaactttttccagatggggattgtataattccctggaacgaaatgctttttggcaaaacaacattttggagtcagcaaaattaaggggttccatttgataaacacaaccaccatcacttgagcaatgtgatgcaactgcggcattacgtgttgtcatgacaattctgctaccacatctattattgaacaacgctaggctgacaactttccatgcttccacatcccatacatcatcaattacaacaaagtacctgtttcatgattttaacagggttattaaattatatatcatttaagtatgctttactatcctactgcaatcaggactgtataccagcatgcatgcttactctagcactcaggtcccctatgttgtaagtatgaatggagaacctagttagcaacatgggtatgtcttttcaaaagatatgtatgatcagcttctgcacaaacaaatttgcaagtgaacatgtgacaacatatctgtaatgcatgaggtttttgtggactttcagtttttcggaatgaaaaactttcacacgtgttagtttctttccggtagggattgggaaaaattcctgcactttcaaatgaggttttaacgttcacatgtgtcgtcattcgccatcaagcagtccacattagcactcc

SEQ ID NO: 27696 - DNA, 11538 bp, Oryza sativa
atctaaacagggcctaagatcaatactgaggtatggtatgttcaagttcaagttcaagtttaataatataccccactgtaaactccaaattatgggtagccaattcatacaataggggcttactatactattaatatctggtcctacctatcatatacacattacttcttggaagtccgtactgaagctggcttcaaatcggaagcccgctgctctgggttctcttcctttatctctttaaaatatgttaatacctggctatataccttgctattggacttgctctaatagaactagtatgttcattttatgtgtgtgggtaagatttttcttgttatgattctcagatcaaatatatcaattaaaaaattacccgttaaaattatatcccttaaaaattacatatttcaaaattttatcacgataaataataccattaaaatttagtcatatcccttaaaaatacaagtgtaaagttagttggaaaatattagtaaaatataggcggatgtgatatgaatgatctgttggagtggaaagagatatgaatgaggaatcttttttggatggccatccatatggacatactgaggatgatatttggatgatctcctgctggaaactcctctcctcggcgtggaccttggaggtttcggtggattacgcctctgttgattgaagacggaaataacgggttgtaagtggtagcccaggttcacaattctgatgaaaactggtcgaattccatgaagtttcgacgtttcgacatggctcggaattaagttttgattggaatttcgaaggtaaacaatagatttggtcgaaattcaattaaaatttatcaaaaaccgatcgaaatttatcgaaaatcgtgataccgatggggctcgagatttagtactcaaccggtaactgaaaccctgcttgtagccgtgtctaacggatgaaggcgtaaattcatttctgactattcgtgtacaaggcgtatttctgatttcgatggttttaattggttaaaatgttaaattgaacacctttacaaggccggatccgtggcgcaatggtagcgcgtctgactccagatcagaaggttgcgtgttcgattcacgtcgggttcaaaatccccgaaccaaatccggatataatttttttatttttccaacctaatccttttatttatccattatagttttccagatcaggttttcaaagctacttttattttttagaactagcaaaattgactgtgcgttgcaacgggaagaatacttttattttttttatttttccaacctaatccttttatttatccattatagttttccagatcaggttttcaaagctacttttattttttagaaatagcaaaattgactgtgcgttgcaacgggaagaatacttttatttttttagaactagcaaaattgaccgtgcgttgcaacgggaagaaaagatgagaaaattgatgaaaggttgataaagatttacatcatctaatacttgaaatacaaattttccagaatatttaggttttttttaagtagataggtatatgattaaattattttactaataaagtaaatgtgacaaataaaatgttatggttagatttaatttttatgaaattctccatattaattacactttttgaatttttattagaatttccatagcttaattgctaattttgataatacaaacatcattttagcatttatttaaataaaaatcccgctttcagcccgcaaccgagccggcccactttccctaggctgcaagcaagagcctagccctggaagcaaccaaagtctaattagcctccccaactcctcctcttacttatcttgtggaccataaccaaaaatctaattagcccgcgcgtggcccaacagggctgcggttcggcgttggagcctaatgctcgatcaatatgagctgttcgttttgatagatggctcagattagttccgaatcaattaaaaccctggtgccaaaaaaatcctaacccaagcttcattcctacccccaccgccatcgccgccctcctccccgcacccagcgccgcctctcctcctcccccgcccctcaccggcgccgtctctcccttacctctcaccccaccgacggtgcctcttccccttctcttccctcccctctacccatcagtggcaccacgccctctccccctctccttcccgtttcgtcggcacggcgtgacgacagcggggtatggcccggagacggcggcgacagtcgtccctccctctcggcctctttgtttttgtcggcgacggcaccttctccaccctccagatctcgatggcttcccgtgggcagatctaggcttggcaattttgcccatgggtctgggtatccgcgcgaatacccggttcgatgggcacaggcttgggtctattttgttgcccatgggcacgcccgcccgagacccgaaaaagtagcgggcagcaaccgggttttaatttctacccatggataacccatgcccaacccatgggtaacccgtgtcaaagccggttctttttctcaacttcaaacttcaactttttcattttctgttagcacgcttttcaaactattaaatgtggtgtttttgataaaaagtttttatatagaagttgtttaaaaaaataaatctatttttcaaatttataatagtcaatacttagagcaagtttaatagtatagccaacgactagctccaaatcatctatagctaatctaataacacattcatacaatagttaactatgaaaaaatactacatcattagagcaagtttaatagtatagccaactactagctccaatacatctataaccaatctaatagcttattcatacaatagttacatactacactattaatacctggtcccacctgtcatagacatactacgtcttggagtccgtgctacagctggctacaaatctgtagcccgctgctcttctctctccttatttatcttcttaaaatatgtttgcagctggcttatagcctgctattgtacctgctcttaataccctgtctcacctctcatacacacgtaatgtcttagagttcatgctgcaattggctacaaatctatagcccattttcttctctcttcttttttcttctcgatatgctggcttatagacttgctcttagttaatcatgttgtgatgagatttcttgttttacgtgcaaccaaaatctatctccaaaccgctgcatcgatcggggccgtcccttctgttggcccatttatagcccattaatcaaagaagtatgaggccatatcctgtgaaaatgcaccaaatgttgcaaacttggaaatactaatctccaccgttgcatccaatctgaacgaccatgataagctcccatccactctctcacctgttggatgcacttttgcagaaaaccgcccgcacctggctgcatatgttacaaaaaaaaccctatactcatcttctttatagattctatccctctcatcttgtaatgtactgctaccatgatttgttccaacaaagctcactggtcgactcctatggccagcgagacggcggtcgccggtcttgagctgcgccatgagccactccatctcggcgcgcttcaagaccgccttcaccttcaccccgccgccgccgccgcagccgtctcttctccatcctcctcctcctcctcctctgctggttcttccctcagcaggtggacgaatccatcctccgcggtggcgatggcgaacggcatcggcgctacccaatcccctaaggccgttagcaacctcgcccccgaccgctcccctgacctggacattgagttgcagggctacgaagggaatcaagtcccaaccagatctgggccaaggtattctcttctccctgatgatggatctgtgcattggagcctggtgaggtagagcaaggattggagggagagcacataagtgctcttggttttttttctctgatttcttagttagaaatgtgcaataaccctggaattgttctctgattggagggagagcatgagaatattgcttgcatgctggaattctataaatgtaactcacacatcatagtccctgaaatgttttttagtttctaaaatgtatatggatctctatttgggaaagtcactctggatgcttgtgctttttattatataattttttttacaaatgcatgtgcatctatccaaaaagattcatgtacaagtttaatttgattacgcgagatgttgctcctattatctctttgtgcaactaacaacataccatgaataagtatgtgcatctgatcacaaataagaaacattctacatctgggcatgccaatgagaaacattcagtagcagttgaattttgttttgtgtctcacaaggaatagttgttttttttcctatagagaacatctgcaaattgtgcataggaagattcaaatgtggggaggaggatgttgacttgaaaagaagatggaagatggaaagaagatggaagatgagactgtttaagattactcatttgattttttttcaaggagttgagagatttggggactgatagctctagagcactagtgataatataatttcaagaatgggataattggggcataccatcttatgcagatattgtgttcttcttttgtatgatcaatgcatgtctaaaagctttcaaattactctggtgttatcctgtgagaagtagtctttttatatggatgacaaacaacctaccggcttgaggtgagtttattggccagggattccccctcgtcaccaaagtgtccctgggtgagtttctccatcttctccatcttccccaatcatgggttgcaacaaaagaacactactgcacccaatgcaagtgggcaagcttgtgcagaggaacacaacaaatcaaatgcataaggaacaaatcaggtcaagaacaaatgggagcacacctcgattatgactgaagaccagccccatctgccaccgccaccccaaaccctaaccctaaatgaacacttgttgagcttttgtccatacctctggagcaggaatggaggaggaagattggatgcgaggaggaagctcgagggagtcagggaagcacataatcgtggggatttctcatcagttcgaatcggaaggagggggtaggggactagctgagggtgagaccttttcttttagatggagaggagctgagaattgaggtggggattttggaattgagagcgggataacatggtcctgatattttcagtaaaacatatgttaagtggggtggtaaacgtaaaatgtacagttggaaggggtacattatgatctcatcccttggaataggatctaacggttggtttgcatatttccaacatttaccctgtttgcacctgatatgccctcaagaagtatatatactatttaaccaaaacctaacctaatccatccacccatgacccgtacattcccagtgagaaattggcgattttaccaccacaaaataatagtttcgttggaataccattgctttaaagtgattcactacaatatcatcttaaattaagtggtgttcaccaaaataccatttttattctttttgttaatagaaatatttttactctattttacacttttctcaccaaaatacccctacctatatcttctcctttctcccatgactaggatattgcaaccgtcccaaatctcacatataggcacaataatctcgcatattttgtcccaccgacatagatagccattttaacatcatattaattaaatctaggcataaaattggatcgcatgtaggcgagcatcatattaattaaatttgaacagcacgtagacttaaaattggatagcatagatatgtaattgaattttaaaaaaatgtatatgctatccaattttatgtctatgtactgttcaaatttaattaacatgattcgtctatatgcgatctaattttatgcctataggttgtacctatatgcgagatttgggatggttgcaatatgctgggcatgggagaaaaggaaaagatagtggcatgggtattttggtccgagaaaagagtaaaatagagcaaaaatatttctattaacaaaaaaaaatgttggtgaacaccacttaatttagaatggtattgcagtgaatcactttgaagcgatggcattctagcgaaacatattgttttgcgatggtaaaatcgccaatttctcattcccagttccccagcaccttctaccgccgaggcttttaactatttgccactcttatgagtggtgtttaatgatttgtcactagacccatatgtcatggacagtgagtgacaaattattaattaccacgttgcaggagtggcaaatagttaaatttccccctaccgcccacgctcagggcggcgcaggcaagggacagcgcaggcagtcaggggcatagagcggcgctcgggcacggctaggctgcgggcaaggggcgcgcgcgtggcgtcccccagggcggctgctcggtccagggacggcggtggtgcaaaaaagggttgcgcccggcggcgacgggccatagggcggttgctgctcgtcatttgggcggcgactgctcgatccagggatgacgatggtgcgggcaaggggtgcgagaggcgcctgagagtgtatatggctcaacgcgataatcatgttgatacacgaagagtattacatataggcgccaaccttccatagaacactcgaccgatttatggaagcatgatcgggaggttttaggaaagagggctaattagagatacatgccatatacagtctaacacccccccgcagtcgcaacggcgctagcagacgttgagactggagcgaaactcggtgaagaccggtgtaggaagccccttggtgaagatgtcggcgtactgcgatgttgtgggaacatgaagaacacggacggcgccgaccgcgacacgttcccgaacgaagtgaaggtcgatctcaacatgcttggtacgctgatgctgcaccgggttggaggagaggtagacggcactgacattgtcgcagtagaccagtgtagcccgcgacggcggagaatgtagctcctggagtagctggcgcagccatgtgacctcggcgactgcattggcaacggcgcggtactcggcctctgcactggagcgggagaccgtgtgctagcgcttggaggaccatgacaccaagttgtctccaaggaagacggcgtagccagatgtggagcgacgagtgtcagggcagccggcccagtcggcgtcggagtagacggcgaggtcgcaggcggaggaccgctgaatgtggagtcccaggtccacagagccacggatgtagcggaggatccgcttgagggctgccaggtgaggctcgcgagggtcatgcatgtgaaggcagacttgctgtacagcataggagatgtcgggccgggtgaaggtgaggtactgtagcgcaccggcgaggctcctgaagtctgtgggatccgctacaggagggccgtcggaggaggaaagcttggcagtggtgtcgacaggagtgttacagggcttgcaatctgccatgcctgcacgctcgaggatgtcaatgcagtactgccgctggctgagcacgaggccagctaaattcctggtgacgctgacgccgaggaagtggtggagggcgccgaggtccttcatggaaaactcgccctgaagggcggagatggtccaatgaaggagcgtgcgtgaggaagccgtcagcacgatgtcgtcgacgtagagcagaaggtagacggtgtcgttccctcggtgaaggatgaacaaggacgtgtcggacttggcctcaacaaacccgatggactgtagaaaggtggcgaagcggctgtaccatgcgcgcggggcctgcttgagcccgtagagggacttgttgaggcagcacaccatgtcgggcttggcggagtcgacgaagccgggcggctgggtgcagtagacagtctcttgaagcgtgccgtggaggaaggcgttcttgacgtcgagttggtgcaccggccagtcgcgagaaacggcgaggctgaggacagtgcggacagtggccggcttgacgaccgggctgaaagtctcatcgaagtcgacgccggggcgttgggtgaagccgcgaagaacccaacgagccttgtaccggtcgagggagccgtcagcatgaaacttgtgcttgaagatccacttgccggtgacgacgttcacgccggcaggacgcggaacaagatcccaggtgcggttggcgaggagagcattgtactcttcttccatggcggcgcgccagagcggatcggcaaggcccgcccggtatgtcttgggcaccggagacagcggggcggcatgaagattaagccgatgaacaggcttgtggtgaccggacttggcgcgggttgtcatgacgtggtcgttgacaaccggtgagattcccaggccggacagtggagttggtgcgccggtagcacgaactgatcgaaggcggcgcgggacatgtggagctggcgggagatgcgggccgtccagtcgaggaaggccgggaggagccgggcaggtggaggctgatggagccggcccagctgaaggcggtccaggtgaagtcgacgccggcccaatcagtgcaggggtgggggaaggcggcccgagccggctgtctggggaggacggcccaccaggtgttgaggccggcctggtgggagaacagggtggcggccgctcaagcccatgcaccatgggcgagctggccgtctgtgttgtcggcgccacagctggtcgacgagtcgctccaattggtgcctgtgctggagcagtgaaatccttcaaaaaatcgagatcagtagcattggagacaccattagtgagctcagtaaatggaaacgagtgctcatcaaacacaacatgccgtgaaataataaccctgttggacaggggatcaaaacaccgatatcctttatggtagagggggtagcctaggaaaacgcacatggtggaacggggggcaagcttgtgcggtgtggtggcggagaggtttggataacacttgcaaccgaagacacgaaggtgcgaatatgagggatgggtaccatatagggcaaagtgaggggtgtggcgatcgagtgttttggtggggtgtcggttgatgaggtgtgtggcggtgtgaagcgcttcaacccagaaggatccggggagcttggcctgaaacagcatggagcgaacaatgttattgagggaacgaaggatgcgttcggctttaccattctgaggcgaggtgtgggggcaagacatccgaaggtgaacaccattggtgagaaagaaggtgcgagcggcggagttgtcaaactcacggccgttgtcgcactgaatgctgcggatgttagtggcaaactgagtcttaacataagcaaaaaagtgggacaaggtggtgaaagtgtcggatttaaaacgtaaagggaaagtccacacataatgtgagcaatcgtcaagaatgacaagatagtatttaaacccggaagcactaacgacaggagatgtccataaatcacaatgcaataactcaaagtttgtcgatgcccgagaagtagaactagcaaagggaaggcgaacatggcggccaagctggcaagcgtgacacactccggtgaggtcgccgcgtgtcatagggacgacggcagcgaggcggttgagggcgtcgtgaccaaggtggccgagacgacgatgctagagaaggtcggtgctggagttggcgaggagggcggtggctgctggtggaggaggcagtgcatggtgtagggagtagagaggaccggagctattgaacctggcgatccggtcctggtgcgaagatccttcacagagaagccaaaggggtcaaactcgacagaacaccaattatcaataacaaatcggcgaacggagataagatttttaataatagcgggggaacaaagaatgtcacgaagtgtaaaggaacggttagggtgacaaattttagagtgcccaatggaagtaacaggaatagtagagccattaccaacgacaatatgagagggggagttgggattaggtgggtgtgaaagggagaggataccggtgtcggaggtcatgtgtgcagtggcaccagtgtccatataccagtcatttgtggcgggttggtgtagcgtcgtggtgttgaaggagccggcaagggacgcttggtcccactgcgaaggagcaccaccaaaccagcccaaagggtgttgaagagccactggagtgggtggctgtgatgggccgaactggcccacgccaccgagctgggcctgctgccccaggccagctgctgtctggtaggggacgggcgccgggtagacttggccaggcagcgggccgccgctcggcccagccaaagcagcaccagcaaagggggagggtgccggccttgggccaagcacaccacgacccaacgggcccggccacatgtggatggtgccggcccatggattatgtggggaaggccactggaagccagccctccactgggcaccttgcgcctgtgctggaacggtgctgccgcctccttggttgctgttaccgccgccaccaccaccgccaccgccgccgccgttgccaccgcggcgacgccggttgctgttgcccttgccgccaccgccttggttgccggcaccatagccggtgccgtgcgctggattggcgcccttgccgccgttggtcgtgctgcccgtggcgaggaagacggcggaagaagcagacgcggcgtggttcggcttggagagttcttccaggcgaagcatggagcgaagctcggcgaaggtcgggaatggccgctgcatgggaactagagaccggaggttattgaacttctcggacaaaccgctcaaagtgttgaggacgagggtgcggtcgcggacgggctcgccgacgtcgccgaggctgtcagcgaaggtcttcatcttgcggcagtactcgtcgacggagaggtcgccttgtcggaacgtgtggaattccgtcgtgaggttgagggcacgttgctcgctgttgccaaggaattgatactcgaggccgcgccaaacgagacgagctgtagtgtcagtcgcaaggacgtcttggagaaggtcgaggagatggtgccgaagagccaagcgaggacgacacaatccatttgcacccaatcggcgcggtcgaagtggtacgcgtcggagaggacgtgatccgtgagggcgtacttgccgagtgccacgaggaagaggccatgccatcgtgtgtagttggtggcagcgacgtcgagagtcacgggaacgagtgccttgatgttgaggacgctgacggcttgagcgtggagtgctgccaaggcggcgtcgtctagaggagtggcgggtgggcgcgagaagtcggggacggtcggctccggcgtgtggacgccatgcgcgaggcgcgcagaggcgaagagggcggcgaggtcatccggcatggtgccgggaagaggcgccgtggtctcaagcgccacgccgtgggtggcg

SEQ ID NO: 27697 - DNA, 5243 bp, Oryza sativa
agttcataggagctgaagttgttactgcatgctcgtttacgatcattgtgtagatagacagtgcttgggacgttttcagggaataaagaagagacaaaaaccagtgtagatagacagtgcaagctgttttgtttacttttctttcttttttgatttgttttagttctcaatgcctcatttagtggaagagttgtgagtgacatcagcgcctctttgcagtgggagcaagcaaccttactgtaggtttcttccagaggattcctttcttgatttattcgagcttggtgaagaatcagatatccaaggttggggattgatcctaaattatttatattcatgccaactgaattatctgttgtttttgcttcttttttttcactttttagatgtttgaccttaattataaacatttattgatatgaactgaaaagactaaatgataaactctcatgtaagttacttacctcagtcccagaatctcatgccgcggttgtcaagacagcaataagaaattatcggaaggtataaacagttctgttttaactccatgaaactagtctcatgcgctggttacaacttacaactggtcagactggtacagttgtgtgaccattggcttggttccttgattgcaggcgattgatgaaggcctattgctgaaacttcctttcaccactatctttgagtaccttcaggttttgctcattattcctacagaaacatgttctcatatacacgctatcataaagacagaggacttagtcagtctcacgagaaaggcttaggggtcttccggctagcaccacctgggttcgagcctcacccctatcctaataaatttcgatctgagagcccttcctctcatatccagtgttttttttttcagtcagtctcacacatagcgatgcaagtggatctggatggacttggcccaatggcccatgctaattcatttgcttgaattataattcgaatgcatatatacatatttgaccagaaagtgactcatcaattgagtaaaatgggccaatggccaggtgtccagtccaattgcatttgtgctcacacgtccactactgctggtgtttcaaacattttataccttgtttcattgaatatattattatatgacttagcattgcaaaagaattcaatcacgatctgtctccaatacattaaggtggggagatgcttggattttgaaaatccagtcataatttagactgtcttagatatcgaatgctttaggaacttgccaattttctgttatgttctacagtaaaagattaaccttggcatactgttatactgatgaggaatctgatatatctcttctgcttgtttttccaatagttactgcaaatggtaggtacggcgatgaattgcttgggacgccaaggaatgttttaccttgctgcggcagtttctgacttttatgttccatgggaaagcatggtaggctctactcttctgatcatttcattgtattaaaacaaacaaatagcctatatgttcactgcatttggtgtatatatcagttaatgatgctcgtaggcttctagatggcgtttgtcattggacattataggtgcctggcttttccctaaatcaggggatccttatttaagagatcacagccccctcttacttacaccatgttagagttataccatttcaaaatcttgaaacttaggaaccatgtattggtattgaaacatatgattcttttcgtaactagttataaaaatggtagttacgtagcatagtaatggactccttgttatcagatgtttcatatatattggcatattgcacccaatgcactagtagttgcaggcaacatggtcattatgtacctcgcacatgttttggcaggctaaacataaaatcgagtcagcaagtggtcctttgaacatgcaactcaatcaagttccgaagatgcttttcattctgagaaaacaatgggctccttcagcattttgtgtatccttcaaggttagtttgatgtattttcacacttccatatggagctatggttgctcaagcttttttctgcattaaagaaaacctcagtgtaccttcattctgctcgtgttactctcgaaatatcttattttctagagtcgagatgactagacccaccttactgctggcgcctaatacctgcacattacagttgaacggacccagatatccttctgcagaaggcagaggcagctctgagaaagtatggtatgaatgtcgtggtcgccaacgagctagcgaactacaaagatgtagttgtgatggtcacaagcaatggaaggacacccgtgcgaaggcccagcaaggaggacgacgtcgaagaacagttaatcgatctcttggtagagatgcactccgaacacatcatgcagctcaatcaagacgtgcacaagctgacataacaattatactgaatggaatacgagtatcagaattcttggcaactacatcatccaaagttgttacaacttacgagccacgagctgaactatgaatatcatgacttgtaaaaaagaaaaagaatagcatatgcccacaaatggtggtaaagtatgtatgtaccacattcaggtgtcaatgttacgcctggtgcttctgtaacttactacatgttaattccctgggaaagggccttgggagataggcatgattttttttttctaagttttccttttctcaaatcatcttgttgtgatttttggacgttttgtgtagtcttccatgctcctgcttcaaattccctagggagatttttggacgttaatagattcattaacatctatatgaactgtgggcaatgctagaaagtcttataatataaatgtagattcattaacatctacatgaatgtgggcaatgctagaaagtcctataatatgaatatgaaacggaggaagtgcatttaatagcactatgttggtgcatacctagagaaaaattatcagaactttggagacgagcttgcattatttaatatggatgaagggggtgatccgatgctagtactaactgattgaaagtcaaaattgttttcattattatgatttatgacacgatatgtaaattcacgcctatccgatgctaggatcatttgatttttttttctagtcaaacttttttaagtttgatcaaatgtatagaaaatatactattattttcaacacaaaacaaacataatatcaaattatatttaatgttagatctaataaaactatttttatattttagttgttaaatttttatataaactaggaaagtcaaacaactttactgtatgaaatggagggagtaaatgacactgtgcttccccctcaaatgcacgcttagagcacccgcaatggtaaagtaatgtgctatctataaaacatgtacatctcagcaatagactagattaatagtaaatcacttcaatggtatgtctcaatgggtatctatagctctctaattcattgcctcgtttttctctatagactatctctaggttagtagataactttgctctctctcttcatttaatctcttccaagtagaaaaatatgctgacatggatctcttgtagatagcatatagataaccattgagggtgcccttaggtatgacgcggcactatggaggcctaagagttacggtgaggctcaaaggttgcggctggaggttgaagaccgttgacgagtaggcctattggcaatgaaaaaggatactaacatacgggggataatacgggggcttatcgccggttatggtagctgtcgaaattgctacatctgcgacaattcaaaacaactgtagttgacagccattgacaattgtcacgactatagcggctgcgacgacaagtttagccgaacacgtctataaacacatgataacgatggcccagtaacacatgatactcgctccgtcccaaaatatagcaacttttgcttagatgggacgtattctagtactacgaatctagacaaagcaaaagttgctatattttggaatggagggaggaggttccatggatagtattgacattttttttttcaaattgataatgttaccaattcaattaatcctattacaatacaaatgagcaaggtgaaacaggagacaaaagagaccctgtttagatgggactaaaacttttaagtccctatcacatcagatgtttggacactaattataaatatcaaacgcaaactattaataatcttggactaattcgcgagacgaatttattgagcctaattaattcatgattagcctatgtgatgctacagtaaacattctctaattatggattaattaggcttaaaaaaatttgtctcgcaaattagctttcatttatataattaattttgtaagtagtttattaaattagtgtctaaatacaccgaaacactagttggcgcatacgcgcgaggtagcgaagtcgcgcgctgctgcagggcaggcccaccagggccacgtgatgtcacgcggaggtacgcgcagcgcgatgtttctttttttttccattttttggcgctatgacgtttcttttttttttttttgccgtggactacacggccctgtcacgtttttttttcacatttgactaccgcacacgtaaagatttaaaactttcaactcaagaatttttaaaatttttcaacttagatttgaaaacttttaactcggacttgaaaactttcaagtcaagatttgaaaactttcaactcggacttaaaaactttcaactcaaaaatttttaaaatttttcagcctagatttgaaaactttcaaatcaagatttgaaaacttttaactcggacttgaaaactttcaagtcaagatttgaaaaattttaactcgaacttgaaaacttttaagtcaagatttgaaaactttcaactcggatttgaaaattttcaattgaaaatttgaaactttcaactcaatttttttaaaaaaatcaaatcaagatttgaaaactttcatctcaaaattcaaagcattcaacttaaattttaaaaactttcaactcaaatttaaaactttcaactgaaattgaaggtgaaagattcaatttataaaatatagcacgaaaaaaaaccgcgcgaccacgcgaagaaaataagggagcgattcaagaaaaaaaaagcgaaaaccgaaaaaaggcgaaaaaaagaaaaaactaccggggcttagtgcgtctgcgtgtgcgtgggccttgcggcgtcgttactatgcta

SEQ ID NO: 27698 - DNA, 2988 bp, Oryza sativa
tatgtggcatgcaaccctgagctttttgtccacccaggccaatgaaatttgtagattcgattataaattgatgttcagcactccatatttgtgaagtgatcccatggatagtggtgacaccaacggtttctcatcgttgctcaactcttgttacttctaagtgattttagtggttcctcatcgtagcatgttaggggtttgtctcactactaagtgattttatttttattttcttaggtatatcgttgatatagaagatgggatgtaaaatatgtttctttataaaaaaacacacaagaagttgcaatccctttacaacttgatggcagtaagtgagaaagaacagcaagagttaagccattgctcccatgaataaagaataagacgagttgctatttttttatgttgtacatatgtgttaaagatggtaataggtaagagcggcatgtattatttttgtgtcccttgtgaatacaaaaataagacgagttgtttgttattattttagttatcactacatgtttaaggtggtagtaggaaagagcggcatgggttggacagttcccgtgaataaagaaagcatgattgtttattgttttagtagtggtccctgcatgttaaaaggaagggccaaaccactaatgaaaaaagtagacttgagcatatatgtggtgatgatattattatttttggctccaattagaccttcttctacttgtactctaacagcatccgttccctatataaaggggaaggatgatacattatgcgaatagccaacttgctcacccaacttctcctagctgctcaaatactcatatgcatgttgcctctgtgaccgcttctcgtcttcaagcccatggattcatcaagacaactaccatcttgccatcctacagtgcctccccttgcttctccctaagctaagggaatatcacagcctgacttttcgttttaggacttataaattgtttttataatttatattaaatgttcattaatttacaagtaaagttaaatatgggaaataaaatttcctaaatataaagcatggctggatttaatttgtattaaattcttcatgattaattatactctctggaattttgtcggatttttttcagagctcaattactaattttaataatacaaagaacatttcagtaattatttaaataatgaacaaatcattaaaggatctggttttaatgttgttaaatactttgagtgtccaattattttcaggatttttcttgaaattatttgagcactagaaatatttttaacaattcagagatcatttcagtgattaatttaactagaaaagtaaattaaatccccttttccttttccggctgaaactggaaaagtctatctgtcatcctcagcccatccgtcctcttcgccctctgctctatttatggcgacggtgccgacagggctccacctctcctcctcctccaaccagcggcccaagtgggggactgcgtggcaggagctcggcggcgcgcgagtggagaaaggcgcagcgggatcttgggaggcgcgaacaggggacaacaggagctcggcagggcagatttggtggtgtggccctcttcgccgagctgctgctgtacgttgtggtcctcggctacgcgcaatggcgacaacaacgaggtttggtcatcatatccaccgccgccatcttcccttctcctccctaggccgttgccaccaccatcttccttctcctccctaggccgccgccgccaccccgttgagctcgatagatccgaccttgggtttgccagatctagcgagcggcaccactttagggacgacacacctactcggggtgatggcctcgccagcaaccgccgccgtcacgcatgggatgtgagggcgtcgcatggggccatagcctctcaatgcgccgctccacctgcacctcgccccatgcctgcaagttttgacgaagaacgcgtgacttagtttggctccgcggtcttgagttgggagcaccacgcacgcatctggtgaggaatctcctatgtggatggggcagaacaccacctcagtgcactgtgaacgcccttagaggctcatcaaagaagatggtgttgtggcttttgctcaaaagcttgccaagacacaactctggcagcccacacatctccgtgtgacaggttgagaaagtagacgaatttccaatagtaattcccaattctttattggtaaatgcctaatatgctactaaattttttaccatgtcttttattaagccactaattaccttactgactcaggagtctaaacatcgcatatctgacattttattatatcagtgatattatatcttggggagatgagcaatgcatcgttgtctcaacagtggttccaaccttttgaaaaaagtagttggaactaccatcaaaaccaatgttcataaagcattgatacttggggggcccactaccaaaaacagtttccccacttatctcccccacccacttcacacacacactctctctctctctctctctccatgaaaagatcattcttccccgcccctatccttatctctctctctctctctctctctctctctctcacagaaacccatctctgcgcccctcagcccgtcactgttgtgcctctgcccaccttgtcctcccctcctctctaaacccctcctcgcttctccccaatccaaatcaatgaccaaatcaaagacaatgatacctcgacgatgcttctcctgttgttgcttcctctgtctctcccgctcctatcctctcattcttagtcaacaccgtcaaccacatccaggccatggcttggggtgatgagctccactgttgcatagattgttggcggctagggttgatgagctttgcggcgacgcggggctgctcaaagcctatgaatgagctcagcttcgaggtagatccgtccaagtgcttgacagatcaggtcatggccaagtcctcctcggcagcggcggca

SEQ ID NO: 27699 - DNA, 9182 bp, Oryza sativa
taagttcagcgctatacgatttggcgctgaataaaaggatcatttttaaaataagttttggctacggttcatttataaaattagtttttgcaaagagtcaaattgtcaaaatttgtgtatatagctgtctctaaataacactgcttttgttcctcacactaggtaattgacatgaaatatagacatctttttgttcattgcattaggccaatgaaatcgagttcaacagagccgagccacaatttcccgcccctctccacaacctcactgagcgtcacacccttggcagccgtcagctcctcgacctcgacgccatcgccgtcgagccggacgccgacgaggtgcttcgccggaggagccaccgccgccgccgcggtggcgtcgagccgcgccttctcctggttgagcgccacccagtatcccccattggcgtctcgccggacgttgtcggggtaacccggcaggtcggcgaggagctcgtactcgccggcgttgggccccttgatccagtaccggaacgcctggcacggcaccgtgtgcgccaccacggcgtggctcccgtcgcggctgacggccacgccattggcgtacggaagcccggccctgagcacggtcacccgcttcgtcgccgcgtcgtactttagcagccgcgccgtcgcatcggcattcatcatgatctcgctgttaaacctgcatccacatgaacacacaactcttgttagtgagatcatcaggaagtggattttcattcctcgagagaatatccccttattttacgtataccactaattaaagaagttataagaaaatttagaaacttttgataagatggatcaatatgagatatgttactatataaacaagttcaaattcaacatatataattgtaaaaaaaataatgaatattttgactacaaatattatgtgttatttgcaattaaatttgttattttttttacttgtataaattaaatttaaacttgcacgattgtgtgaagtgatatatctcataatgattatatcaatttttttatagaaaaaatagtggctatttgaattacttaaaaaacttagggatgaaaacactttcccaaaagatcacgttgttgctacgcattgcatacacatttgcatgttgcaaaaatgatttgattttaatttggatcgtgttcttttggtaattaccggcgtgggtaggtggtgctactatcggtgaagtagacatcaccggtggcctggtcgacgtcgatgccattgacgaagttgaacgggacgccgtccgcgccggcggcgagcaccttggcctcgccgccgcgcggcccgacacgcatcaggcccttgtacgcgtcggcgatgtagaggtcgcccgtcctgtcgtggaacgcgagccccagcgggcgcccgcacatgctctccgtctcctccgccggcgccaccggcgtcgtgcacatcggaatcttcctgcacgcacacggtcgaaccatcaatgtcaatcgatcaagaacgcgatggagtggagatttttcattttctagatttttttatattttaatttcattaatagactttttgaaaaaaaatattttcagaaactaaacctccagtggctcgcgtggcagcgttgttttaccacgccagctcctcgtgacgtgacaaggttatatggccatgccagacgggatggcgggatcaaaagtttatatttaacaatactttttgaaaaaatctattaataaaattgaaattgaaaaaaataaaaaaaagtctaaaaaaaattgatggagtgaggtggtgtgtactttaccggtagttttcgtggtgcgcgaaggtggtccagccggcggcggcgccgccccagcggaggacgcggccgtcggagacgccggtgtaggggccatggttggaggagtcgaaggcgaggctctcggcgccggtgacgccgtcggggagcgggaggtggaacgcgaactgcgcgtgcgacgtcttgacctgctgcgcggcggcgcacggcggcgcggcgaggaagaaggcaagaagcaggcagccgacgagccgcagcagcgtgaccaacgtcgccggaaaacctcgacgacggcgagccatggctgatcaacgttgatggtttcgatggagatcagcacgcacgacaatctgtactgcttttattgggagagatcacacggcctaattctaattcaagtcggtatacgactgcacttgtgtacagctcgatcgactggtggcgagtccgattgcttcgaccgattgatccggccgccagagtcgattacgattagaatttcgccggtcgccggcgctgcgttccgacgactaattgacaacccttgcaatcagatctttgttgatttttccttttttttttcctaccttactgttatgttaggctaggtatatgtttgaaggctttcttccatgcatccttgaagaggtatattataccttctcacaatttgagagataaaaataacttgttaaattgattagaaaacaagtttttattagcaccagcaatacttttctggtcattgtgaggtatagagagtatatgtatcttatagtgttagtccggaggtagaaatacgtacctcttaattggcacattaatatctatacacaaattagtgatgatatgttgcatatgcatgtaccagtgatgatacctatcaggtatcaatggtggtacaatagatacggggatatggatacatgtacgcgatatggcaataccagaatatgtggcatttttcaaaagataatacgggatatgtttatatatatgaattaaatatagaaattatttactacaatcaccgtagttgatagcttcaagtccactatgtttaaaaaaaagctttaagcccattaactgtgtataactaataagagattaaaaccaagccgccagttgacaacaatcaaaagaaaaatccgtggaatcaacggttgctagatgcagtagcacttagcttccagttcctaaatccatcggatctaataaaaagatagttcttgtactgagaacataattaagaaggcaattacacagtcatgcagattcatttttattttttttaaaaaaaaaggcattgcagatcaagaatggaaggctagaagaggagcaaaggaaacaaacaacttgatggtgttagggttgtgtctagtgaccggcgtcaaagggactgtgttgggcagcggcgaccctagtcccttgggcatgccggtggaggagttgcatctagcctgtgggtatatactgccatgctgcccctaaagatggcatagggcaaggagatgtcgcactgtgcacaacgatggcgcgggaaaggtgatgtgcggttgtgcccgatggcggcaacaacgctgcagcatgtggagtgcgtcggtacaccacaagatttttgaggtcgacattggacgtatcaatgttgtattagaacttagaagtgtatccaaattattttatttatttgaattaaaatcataaaactgatgatacatacgtatctgatagagatactagacttgagggacatatccaggtaatgtaggcgatatgtagttaccagtgatgatacttattagttatgatactttcgaggatggtaccatgatagtaccttcatagtttcagtatcatgatatcacgtggtatcatgatatctagtatgtagcactgtagttatttgatatctcaaggtaccattaaagtatcattaataactcaggcaggtaggcccaactagtgtggaaacacgcacatcaaaagcagaaacagaagctttaatcaggagcgtgtggagagagagagaggcgtggaccccatatggatgcttggtaaaggcgaatgtggccctatgttggaagaggtcagagtcatgtgatgggtgctcgcacgagtcccatgttgcatggacgtcacgaatggcatcctatttcaagcatttttctaacgagaaatctataagtagttgtaaccagtttgcaactagttggtagtaagtgataaaaggctgcaggggtttagccattgcacctgtgaataaagaaataagacaagttgtttattgttctagaaatgccccgtaaatgtttaaggtggcagtagacgaggaagagagcaagcggttgagacgactcgtgaataagaaaataagatggtttgcctattagtcttgtgttggtctctgcatgtttaaggtgatagtaggtgtgaaagaacaacaggggttaagtcatgttacccaagaataaaaaaaaaaagaagagtagcttattagtatgccagtggtcctaacgtgtttaagcgaagcatctaaagagccgatgagaaaaatataattgagcacatgtgtagcgtgatattacttggctccaacgaggccttctactacctatgctctatcaacatttcctatataacgaggaagagcaacacattctaccatactcaccaatcttctcatagatgcttagtttctcaattacgctcactttctaagccacctgcttctcgtctttgagcccacggaacactggcacaactgctgtcttgccaccctacgattggtttggtgcctcctcttgcaattcctctaatcgtgagtaacctcttgtttatcctactcatgcaagaccatgtcccgacatagaaccttaattaggggggggggctcattagagaaaacgaggatatggctcctcacacaagcttcctgatgcaaccttggtgcttgcagtggacatacatattttagaaccagtgttactaaactctcataatctaggtattcaaataaatccaacttttagacaactatcggtaaggtattaattcctgatgccacaatactaatcaccgtgcatgcaaccatgagggaaattgtctctaggtaccatttataggctacacacctacgtaatggatcatttccgctttcaaactgatagatggaggcaattcaaaccggtgctaattaaatgtttagaaaatggtataacaccgtaatatgtgaataattatattccttccattcatcaccattctatactaaatatccctcattttagaaactactgaaaagcgaaactactgaaaagtacagtgaagtggacattacaactggcattcaacaagtgctctacccttcaagtgccatattttaatccggcttaaggaaggatatgtggtcgcttgtgtgtgattaaataaaaggattgcaatggattgtgtatatacaattttaatgataacaacaaacactataaatgtaaaagaaattgaattagcattgcataaatgtaactaagatgtattggcaaaaaaaattgactaacaatattgtgatagcataaaaatgtacatagcacagggtgttaatttttattttgcaaagtgtcaatgacatttttgcctgatattgtgcttatctcatttttctgccaatacaatgttaattccatttcttgtacacatatagcattaatcaatatgcattatcatcaaaactaaaagaatataacacattgagattcttttatttattacatgcaaacgaccacatgtccttcctttggctggataagcatatgtggcatgcaaccctaagccgagctcacgagcctgagctttttgtccacctagtcacagcaggccaatgaaatttgtaaattccattataaattgatggttttcactccatatttgtgaagtgatccatggatagtagtgacaccaatggtttctcatcgtggctcagctcttgatacttctaagtgattttagtggtttcatcgtagcatgttaggggtttatcccaccactaagtgatcttatttttattttcttgggtatatcgtgatatagaagacaggatgtacaatatgttcctttataaaaaaaaacacaagtagttgcaatcccttgaaaacttgatggcggtaaatgagaaacaacagcacaagttaagccatggctcccttgaataaagaataagacgagttgctatttttttttaagttgtacatatgtgttgaagatgatagtaggtaagagtgacaggagttatgttgtgcttcttgtgaatacagaaataagatgagttgtttgttattttagttatccctacatgtttaaggtggtaataggaaagagcagcatgggttggagcggttccaatgaataaagaaagcatggttgtttattagtctagtagtggtccttacatgtttaaatgaagggcccaaccactacccaaaaaaaataggcttgagcatataggtggcgttgacatttcttttggctccaataagaccttcttctacttgtgctctatcagtatccattccctatataaggggaagggtgataaattatgtgcatagccaactggcccacccaacttctcctagctactcaagtattcttatgcatgttgcctctgtgaccgtttctcatcttcgagcccatggattcaccaagacaactaccgtcttaccatcccatcactggtacagtgcctccccttgcgtctccctgagccaagggaacctcttgtgagagaatacaatgatgtgtctatacatgtgaacttgccaagacaactgtggcggtgcatgcatctccgtaaaatataatagagagggagaggtacttgcgatggattgataaagtaggtgaatatcaaatagcaattcccaattcttcattcatttggtaaatacttcatatacttctaaaattttatcatgcctttattaaaccactaactgtcttagtgacgcgaaagtacatagacctggcatgtcttacatttattatgttagtggtatgatgcttttgaataaaaggtccaaccactagagcaataaaggttacattcaagtgtatgcatgatgtggaatcatttaacaccggttgggtttctagttatgttattaataaccttcttttcataaggacagggaaccattagcaatttttattagcaaaaaaaaggttatcttctttttttttcatctaagaaataaaggcagggtggttttttgctgaaatgctggttgaagacttgaaaatggatagacataaaaatttgtgttttcccatgcttggaacttttttccccaagacaaaggacagctgatagaacaaaataaaaatataagaaatgtgatctctacaccctcatttttatgagaaaattactagcacaataataagagaatggtaaatttaatgtaaatatggcattcgcttgctttctcaatcccacgcaagtgcctcccttctttaaaatgggaaattagatacttaccatttaatagggtgtgaccaagaatttcccgtgttgatagaagttaatttacttaatatattgccactttggttaattaatttcgccacatttcaccttctccaagctacgtcaccttttctatttcccaaattgcccccacattggcctggccaactagcagtgatgaaagaaccgttctcacaagtgaatcatggcacttcagtttattaactgcaatactaagatttaaaaaaaatgctacataactaaattgacattcagacagtggaaaataaacaaaaatcaagagaatctctattgccaggaaatgctggatagcactgttgttcaataggctttacaagatgttcttataaaatgtcatatgagaattgtatatatttttgttcagagctccatcgtggcatcctcttggtgttaagccaaacaagaccaatatctcactcttccaattaccaactgactggagtctcaagcaaaactgtttcatgtgaatcttcaatccaaaccaactaatgtcagaaactcagaatatcgagatgaacgaagttatttagccatgggtgactaaaaacacgcttgatcgtagtctcacatgaaatgttcgcatgccaacttctgaatatctagtgacagtttgtgaactatatgaactgcgggttctgaatatccgattgatctaatcagagtctgcctcagaaatagctgatttgtcatctggcatttcatcagagctactcaactgagagcactcatcagaagcccagtcgcttgatgcttgttcctgatcaccgttctcgctctcagctcctgcactctcttcttcgagaactgaaacagatgtcttctgtgtattatcctgtatggttccattataatcctttcccctccaaacaataatctgctctttgtcaaaagagacaattatgcaaggaacaaggtcctacagcaaaacagaagggaagaaaatgctctgttacggatcgtcaaggaaaatacacgcattaatatatgcacataataaactcaccctgagcttgactccaattttccgataatcactttttggcaatcctttagaatctatccggaccaactcatcagtcaaaaaggcatcccgaaccattggaacaagactagcgtaatacccattcttggctgtgaaatagcgcagttgttaagtcctctcttcaaccctacatatatgtaagcgaaaaagcggtacagcgtttacctagcttcgtcaaaacaggaacatataggcctttcttcctcatttcctttgtctcctcaactgtcagtccttctattgttgttttaattagcctcgggtatacaggttcagctggcttccacagcattaacggaataacaggtcttttctttggattataatgccgtcccctgtacaatatcaactgaccaccatgcctgtggatgataaggccaccagttttatcctgaaagaagtgggcactactcatcatgctttctaatggacagaaatgtaacaataagctaaaatcaaacaaaagctactaaaatggcatcagtgtattcacattagtacatgcaggcaaagatgattcttatttattagacccaacacagatgaagctacctcaagctgatggcacacattctgcatatcaaccgtcggcacgccgaggcatttcaccctgaccgcctcgtcgttcttccagtgattatgtatgtcatttagcatgttgtgagtgagcccatctctccctacaaaaatcaccacccaatcgaatcataatcatcatcaccacatcttgaaatggagtaaaatttaccaactaaaaacaagtcctcttcttttttttt

SEQ ID NO: 27700 - DNA, 1642 bp, Oryza sativa
agagtagtcttacccagaccaccagaacccacaatggacaacaccttgacttttacatctcgtatccccttggcaaaccactccatgatatgctcctttggtccattgattcccacaagctcatcaacctcaacgtagagtgctggaagcctagggtcaatatcacaagtggtacagctggctaccagaccaataaaattatacctcttgtgcctcttgcttgcctctatcacacgtgtcttgagttcttcgatctcattagagatttcatggcaagccttcatcttcttcagtttgtatgagaatcccttaaagaatgtagattgttcatcttgcttgtgatcaacaaggaccaagaaggaatcaatgaaatcttcgatatcataggccaactcacgcacggtgtccctccaatccttgtgcaggggatcaagttcctctacagattcaagcatttccaaggcagccttcatgctggtcaactcatctctaaagaaggccatttgactgtgtacacctttgagcttggtgtacttgtcctccaacatcttggagagcttggacaggacggtgttcatcacttttgtagaaacacgcacaagcatcatcgccattactatcttatgtcagagctctctgttagatgatcgaattgtaggattcgtgggatggagaggtgtccatgaggtagtttgatggtactagtcatgaaactaggaagcttcttgtagttgtggaggatttgaagaaatgttctgtgttcatatggtgcctaggcctgcatttggaagaaagatgatgcactgagtccactcggtcaagtcaagtcaactagtgttttctggccgcacaattgttgtcccaaactcatcattgttatagttactttcagttataatattctccatctttattggctttctgttaggaactttccttgtttttctcatcacaaggcgttctttcagttgtctttctctgaatgtacacaacacctaccaagttgtcttgttgctttcggccttgattctaaagttgttttaacaattttcagttaacagtgaaccatcatataactctttaggccttgactctaaagtttgttttaggaaacactaccagagatttgatattcattcagtgacatgaatcatcatgacaaaatacttgggagaggttctatggctgcagagcaattgcagattcaataaggaataccaatttccatcttcttgtatgaatcatgctagcttaattttctcattgatttgcgggtactcttctaaactaggacagtgcttgggttattctttcactgttggtccttcaaatattggaactcggaactagtgggaaggaatgtttggtccattgtaaattggtttcttcaaatggtttgcttcatctttcatccaaagtactgttgttcagctggttgagttgtcagcttgattcagtttacagtggttccaatgcctttccattgttcctgtctagccatctatatttgggtattatttgacaggcctgtttttttgcttggtttgacagtctacttgtatgttttcattttattgttctgttggtcaatgtatgtacacacaatggttttgcactgacataatattttcttaccatacat

SEQ ID NO: 27701 - DNA, 1138 bp, Oryza sativa
aggccaaagtaataataccatggtttttccttacatttggtccaaaatagttaaatgtcaccaccagtcagtccaataatcacaggtccagcaaacagccgcagcaaccttaatcctagctgctaccttgtgagctttaacatactgggatcttgttgcaacttgcaagcttgcagcagccactcaggaccagggtttgacttaccatctgtaaccgcgcggttaccgcggttaccggccttaccgcggggtatggtaatagaaaaccacggtaacctccttaaatttaaataaattttaaaaataatttgaatttttaatatattttgcatggtttcgtacggtttttcacagttaccgcggtaactgtgcttaccgccagggcacggtaaccccggccgcggcggtttgtgaaaccctgctcaggacactagttccttgggatcatgccgttttcggagcactgatatccaaggcagcacatcaaggaaccaatcaagcaatatacatcaaaacatagttgtagctggctacattgggccaattggttggtatgataaaaatcactcttccgacggacaagaactagcaactaccagacaagaattagcagcaaactaccagtgcgcaacaatcatgtccgtcaagtcaacaatccactctgagttccgatggtcaagtcaacaatccactctgagtttcaatgagggccaagctctgagggcccaaaatcaggagacgttggctcaaccggaagaaagtcttgctacatcccaaaagggagaaagccttgctacaccccaaaagctacatcaagaggtgagtgactccccccacttttaagttagttcaactctctctaaataaacaatgtgtgactattcccaacaagctctacctcctgccgtactacttctatcttctgccactcctcccatctctcggcaaggccatcaccttcaagcatcctcaccacctccgccatcttagggcgttttacaggggagccttgtgtgcaaataagcgcaaccttgattagtgattctacctcaacatgaatgtaattgctctgtagatctggatcaaccaacattttcagccttttctccttgagtaatcgtttgacctgcacaaagca

SEQ ID NO: 27702 - DNA, 1685 bp, Oryza sativa
  unsure (1)..(1685): unsure at all n locations
ctaatgccataatgattaaaaaaaggactacttttaaaaccttactgggactactattttttatatgatacaattttggacatacataaaagtaattttatctaactcccaacacaacatcaagccacaaaaggacatgaatatggactgcaattcgaattgaagattgtgctagtcaattacccagtccagtagcatgacgtcatcatcattggctagacgagcaaggtcaaaggcacgttgtcctgtaataagctccaaaagcataatcccataaccaaatacatcagttttctcagagataattccagttgaaagatattctggtgcgatatgcccaattgttccacgtactgcatttgttcatcggtatccatgtgatccattagtttggccaaaccaaaaccccccactaaggcttcaaagtcttcatctaatgaaatatttgcagctttgacatcacgatggataatctttgggtcacaatgatcatgtaaataggacagtcccctggcggaacccaatgcaatcctcctccttgttcgccaatcaagtggaggttcatatggcggccgttctataatataaaacccaaatcaaccctctaattatctgaaagatacagggatgtcagactagaaaaaaaaaaggcaacgtaactctaagacgtgatgcaacggttccattagacatgtatggatagacaaggaacctttttgttggcgttatgcagaatccatgaagacgcatcaggtttctatgcacaggcatctcaacttgtgtttgaaagtgccatgttctccaatcaatgtttgggataacccatgcttaaagcccggcttatataatcctctttaacagctactactgagccatctcctaatcttcctttgtacatgctgccgtcgaatcgaccacgttgaagaacattgctatcgctaaagcaatttgttgcatcttctatttcccgtagtgaaaaaatnttatgctggcgaggataggcctcatctggaccctgaccctcaaactcttgacttgtctcaccctgttacacatggcacaaaaagaaaatgaaatgtgaggatgattattattgagaaaacagatagcggaacttcgcttccagtaatcccttcttggcagctactgattgctttgtatgatccaatctcacattttttacttattaaaagcatcaggtgaggtacgtcctgcaaatgttggaaggaaacaggcacagagccacagctcaagaaagagagcgacaagccaggagcgaattaattgtccaattaaacgataagatattgcacttttgcagcatccaagaaacaaatagtaataataacaataataggatttgaaactaagacgatgaattaacaatcaatgtctccaggtctggtcaagaacttaccaataaacaacttccatgatcatactctaaatggaatctgctagttggatgattgggaagcttctcgatggcagctttgattaggctaacaacagacctggtgatgctattgttcatatcttgttctggatcataaataccatcagagcaaatgttgccccaaataccgatcttgactttggtaagggcggagaggtgctggatgccgaaatcagaagcaccattcaggcaatccattccatgtaaacggaattccacttggaagtta

SEQ ID NO: 27703 - DNA, 2968 bp, Oryza sativa
ggtccatcttggccagcttaaaagattttcgctacgagaacttcaagttgcaacaaagaccttcaacaataaaaacattcttggcacaggcggttttagcaaggtctataaaggaagactagcagatggttctttagtagctgttaagagactaaaggagcagagaacacctggtggggaactacagtttcaaacagaagttgagatgattagcatggctttacatagaaatctgttgcgtttacgtgggttctgtatgacacccacagaaaggttgcttgtgtatccatacatggctaatggaagtgttgcttcacgtctgaaaggtacctcgccttccttttttccagtcatgcatccctatatctttcaaacaattagaggtttgatttgggtcttattttgtagaacgaccaccatctgaacctccacttgattggcaaacaagaagaaggatcgcagcaggttctgccagggggctgtcctatttacatgatcattgcaacccaaagatcatccatcgtgatgtcaaagcggcaaatattttattagatgaagactttgaagctgtatttggagattttggtttggccaaaccaatggattacaaggatacccatgtaacaactgcagtacatggaacaattggacatattgcaccagaatatctttcaacaggaattctctctgagaaaactgatgtatttggctatggaatcatgcttttggagcttattacaggaaaacgtgcctttgatcttgctcttctagcagaggtgagggtgtcatgccactggactgggtaagtaactggtacattcctcaatccaaattgcagtcgagatgttcatgcccttttgtggcttgctgctgtgtcagagttagataaagtaacttttctgtatgtccaaaaatatcatctaataaaatgtagtttcagactttcaataaaggtcttaaaaaatagtatttttatggttatgtgctctgtgcaggtcaaacgattaatcaaggaggaaaagctggagaaattgattgatccagatctacagaacaagtacattgatgctgaggtagaatcactaatccaggtcgcgcttctttgcacacaaggctcccctctggaacgccccaagatggctgcggtggtgaggatgcttgatgaaggtgatggccttgctgaaagatggaaggagtggcagaagatagaaatagtacagcaggacgtggagcttggcctgtatcagatggttggactgttgactcaactgagaacctccatgcggtcgagttatcagggccaaggtgatgaatgctcaccggtaactttctgctgattcttgtacatcggaagagcaattcgtactgatcaccctagtcgaatcaccatctgtcatatttgtttgatgtataatgctttttcttgctcgacgcacaaccatggacattgccatattggtgccacggaaacagcacaacccgaggaactagtgtcctgagtggttgctgcaacaatgtcccagtatgttaaacctacaatttagtaggatggaactgggtatcatttttgcctcctttgggaaggcttcagatgatgcaattgcccatggtgtacttttatttgggcatttcgttatgtctgtgtttcctgtaaaggatatatacctagttctgaatcaaatgtaccttctgcacagagatgtaatctttggtaagaatcgcttctcttttttttcttttcctaaggtggattggacaatttggtcctgttatggccgtgtttttcttgggaagattatatgtttatctccgtcttacactgttaggcacattatccgtaagtttgttatttaaagaaaactactagcagggtagcctgcgagtaattgctcggctagcacttttataaaattatctggtttttacacatgacttttttaaaaaatatactaaatagtcatctaattgttttaggattctttttttttttataaaagaagtcgaatcttctcattagcaaccaccagcaactacccctcgctcatttgcccccattttacttgcttgctcagcttgccatggcttctatttatactcacctttagaaaaaccaaaccttataaattttagagttcaaaatagaacacacatgtaccttttgttcaaatataaaaatcaagttgtaattctcatgtaactctttatttatttttcttaatccataatattataatctaatttcacctagactttaggtggccgcacgggcattgatattgttcaaaggtaagactatagtttgtttagaaattatctcatagatagcgaactaaaggttggacgatgtcattttaaaatgattcagggggtcatatttttatccatagttttgtgtgtttagatccatgggtgtaaagttttggcgtgtcacatcggatatacggatacatatttgaagtattaaacgtagtctaataataaaataaattacagaatctgcctgtaaaccgcgagacaaatttattaagtctaattaatccatcgttagcaaatgtttactgtagcatcacattgtcaaatcacggcgcaattatatgcttaaaagatttgtctcgtaatttacacgcaatatgtgtaattagttattttttcgtttatatttaatactctatacatgtgcctaaacatttgatgtgacagggtgtaaaattttgctagggatctaaacaagccatttaaagaactttaaaggttttggtgcacacaaaccacctaccctattaacattgtttgaagcaaatttctttctttttcacatgtttgattattttctttgaaacaatatttatttcaaatataatttaggactgagggagtaagagccaatgaaccaatctgatgggaaaagaatgtgggggtgtcagtctcaggctctcagccacccaacatcaggcggagatgacaacat

SEQ ID NO: 27704 - DNA, 15697 bp, Oryza sativa
tcatataatagcatatatgttttctcaatgtattattcaaatatattaaaatgacaacataattttaaattttatagtaactttacgaaactactcatgtgtaatattcatattgtattatatatatatatatatatatatatattagttattaattatttttaatattaaattttagttatttgtaaattatatttttatatggattctagactcgtctttcaatatttcttttttaattctaaattttcattatctgtaaattgtatttttatatagactctaggctcttcttccaatattatttattttttaattctgaaattttattatttctaattgtatttctatgtggactctaaactcatctttcaatattctttaatttttaatttcgaatttcagttacttctaaattgtgtttctatattgactttagactcttcttcccatattttttttaatttcaaattttagttatttataaattgtatttttatacgaattctaaactctacttttaattttattatgtttattccgaattttagtttgttttaaattcctatatggactctatactctacttctaatattccttatttttaattccgaatttatattatttcttaattatatttctatatggactctatatatactctacttataatattccttatttttaattctgaatttctattatttcttaattgtatttctatatggactctagtctcctcttccaatattccttattttttaattccgaatttcaactatttctaaattgtatttctatatagactctgtttttctttttctccgattaatatgagaatttttaggccgcgagagcgaacgtggagggtcctttttctattcctttaataagttaatagattggcattagttccaaaagagaaatttttcgcgcatgcaaaacgagaaaacttattaacacatgattaatctaatattactaagtatgaacttgaaaaaggatttatttgaattttttaaacaacttctatatatgatttttttttaaaaatacgtctttgaaaaatgtgctaatagaaaacgagaaagttgaagaaaataactagacctaagtgaggatgaactgtataggtttataggatttctggtgaatgtgtgttaaccgtgaaatttggtaaacccaaagtcatcatcggcctagagtcagcatcggcttcatagtcctggaatcggccgatgagaattatcaagttgccaggattcttgctatattcggttaaggaaattaatctattaaataaagtttatccagaagagaccgagttcaagaaagatgcggcatgacagtttatctattaattaggaatactctattaatttccttttatctttagtaaagtatgtttagtgtccgataaagactttatgttttccttttatctttatgaaagtttctctcttgtccaacaaggactagtatctacccatgggtataaatatgtacatccggggtcattgtaaactatctcaattgtaaactatctcaacgatcaatacaattactctcggcacatcgccaccttttttaccgaggttttttacttatcattcggtggaatttggcacctgacacggggctgcattagctttcgatctccggcgaaggggtaagtcatacgttccgccggacctggcaattgtattgcttcattggcgtcgttaaaggctacatcaatacattcgacctcttgattgctctggttcagttgatatatttgcctacctatctatcatatatcttagttaatcttgtcttagtatctcaatttagccatattggtcgattctcctttagggtttatgccggtattggctaaatcactttaccatattagattagctaaggtatctaccaccctgaaaatcagacaaaggcttgattatctagatattatgtttctttttatatttagtgttgcatcagttaagtttgatctactaagtcatgcttagaaccataatctctagcctgcttcttgattgccaataagggtttcatcggggttttagccgatgagttatctggacgttgcatcagcttataaagagtacatacaagttggatttagccgattacgacaaatgtttcactgtttatctaatcgtttggattttatgacatcagacctctagccgatgtattctttaaccatcggattagggcttattctatcatatcattattagccgattggtttctactggattagattgttgtcttattatattaccatccgccgattgtctttatatcattatttacatcaagtgtcagattctacattaaccatatagccgattgttcaagacctatcgacatcggctggtatcagcatcggcatcggctggaactaatccatcggcttatcagctgatcggctcatcagtcgatcggctctttcatctgatttttatatatcttgtcagttgcaggatcaaattgactggcacgcccgcatcccatcaacctttagatctgcactagagctaagcagatctcccagaccaccgtgttttcacatcaacaatgtgtaatgcctctagcttaaagtcctctttacttcactttttagtttttacatagatcagttctgtcctgctgctcgttggcggttgcatgtcactttaagccgtggtatttctgacggttgtattgctgacttgctgaggcaatagaaccacggaaggagcccttttctattgttattttccttaacaagtaaattgtgttcgttaggttgtcactgttttcaaataaacaaattcagcttaaaaaaacagtttggatttatggaccaaagccagcaggttattatcaccagttgccaacaattaccttttttcttttctcactccaatcagtttttaattgcggtcatgtcacaataaacgatgcattaactatgaagcattcagaaataaaaatgaaaccacttgtgagtttcgactgactttccttgggagtatagatttgattatgtcaccagcaccaataggctcacagaaaccttgataaacaatccttaaagaggattaggtaaagcatcccaaactgacagcacttctaggtgcatgattggagaaaattaatctaggtttgaagaatgatgaccattttttctactccgtgtttctcttttctatttcggcccattgattggcttcaggtaacgcttgtttggctatgaatgtaacatagatattatatttgagaaaatctattgtatacccctgaaattttagctaatcccttttatgtccctgaattttgcttacttctttgtataccctaaaatttgattttgattccttccatacccctcccatcagttgaccatctaatttctataaaaataaccattttaccctttggatgaacacaaaaaattatgaattacattattaaaaatgtaaaagtttgtcgcatgagactattatagttacgagtttgttgtgcaatgcattatttatcaaaaaaatatttttagataatgaaataaaaaaaatattttttttaacaaaaggaggatcattcatagaaagatgggactaccaatgctcacagtatttttttaatgaatgctcggtaaaaaagaaatccattgtcctattaaaattttagataaatattttaatttattacatttttttattttcaaaatttatgtcaaaatttcctgctctaattatttagtctcatcagttttataaaatgcacatattgtgcactcaaacaaaatttttaatcgtttttcaagtttgtattcaaacttaaagcagcaaaagcgaaaaaggcatttacaaccaaacgtaatagtgaaatgaataaaaatgtaatggtagggacatggaagggatcaagttaaaatttcaggggtatagaagagattgggtaaatttcagaggtatgaaagggattgagtgagttttcaagggtacacagggaatttactcattatattttgtgttgtgttcagacctttaaaatttctttgtacagaagatgcatcaaaataacgacttcgctaaacatatggtgacctctctctctctgcacgaaatcggtcaaatttgcttttgtggggatcactagcttacagcgtggcccattaattaacagctgtgtttttttttgagagggaaagagaggagctctgcctatttcatattaggagaagagagaaaaaactagagtttttacaaactaggttacaaaaggatcctatgggatccctctcgagaggttgacaaaggaggtgtcaacaattttaagacaatgcaaagcaactagaaggaggatatgagaactactcatctatgttgtgtgctccatcataggctttacacatggcgattattgactcgacaacttgcattactgtgctgtaagccccgttaaagatcctagcatttctttgaagccaaatgccccaggttgtgtagatgaagaggccatcaaagttccttctctgttctttcgccatctctctcctgcaggctatccaccatcctagcatgtctccattgaaggaggaggccagaggcatatgaaggcctaccttctgccagatgaatctccagatttgctttgcaaaggagcagtccatgaggaggtgagtggctgtctccggttccacacctcaaagagggcagatgtgactgttgtcccaaccacggagatggagcttgtcggcagtgaggatcttcctgtgtatcataagccaaccgaagaacttgcatttgttttccacttttgccttccaaaagaaatccgacctgttatcctggatgcctccgacgaattgtatcctatatgcggtgtttgccgagtaggttccatttggagaccaccgccatgtaatcgtgtcatctgtttcttcttgtaggacgacctgttggatttgatgccataggaggatgaattctctgacttgtgttgtggtgttcattcttctcatctgtcttagccaacgattgccctgtagctcctgtgccactgttttgttttttctcgttgcaagctggtagagggaaggggttagctctttatgggataacccatcgagccatctttcatgctagaattttgtcctgtggccatttcctaaggtaatcaccgtggaggccctaaaaagctgcttatctgtttcatcacaaggaaggactgatccctgccaaggtttgtccaccgccgtccattcttgccagagccagcgtagccttaaggaacggccgaagcgttcaaggtttgttatgcctagccctcccatgttctttggtctacagaccctcttccagtttactaagcagtgtcctccacgtgcctgttctgatcctatccagaggaaaccgcgtcggattttttctatcttttttagcccatatcttgagggggaagactgtacgatgataagttgggagggccgaaagggtggatttgatcaggaccgtccaacctgtcttattcagcaatttccctttccatgttggaagccgagctgaaaacctgtcaatgagcggttgcacatccgactttttgagctttctgatgtgtagagggagtcctaggtaggtgcaagggaaggccttcctctgtgctgggaaaggggagagaatattttggaggtccaggtcttcacatcttattgcgtagacttcgctctttgacagattagtgaccattcccgtggaaattccaaagttatggagaatcgtctgtactgtatggagttcctgtttatctggccttgtgaacaccactacatcatcagcatataaggcaacatttaaacgagcggtccacttgtgaaaagggtgaaagaagccctcttcctgtgctctcgcaagtaatttctgtaaggggtcgattgcaaggatgaagagcatggaagaaagggtcaccctgtcaaagacccgttccatgcaagaagttgttacctgctttcccgtttagggggatctttgatgaggatgtagataggatagaaatgatccatccaatccacctgtctccaaaccccaggtatctgagtctatcaaggaggtatggtcagctgaccgagtcgaatgcttttgcaatgtctagtttcagaaggatcaccggggttttgcaggaatgcagttcgcgcaccatgttgttgacgaaaaggaagttaatcctggatgtttcttccctttatgaaggcactttgattttttgagatcaactcctgaagcctaggggccaatctgtttgctagtagttttgagaagagtttcccaaaggcatgaatgaggctgattggcctgtaatcacctacctgtagtgcttcggtcctcttaggcaagagggcaatgtaggccgagtttagtaaccaaaggctttgagtgtcatggtttgccacctgatttatcgccagaacaacgtcttcctgtatgatctcccaacatttgttgaagaaggcacctgtgaagccatcaggacctggggcattatctgatctagcttggaagatcacttgttttatttcatcttctgtgaagggatcctctaggtcagttaggtcttgactctgttcctgtaggaagctgtagttgattgctgtggaacgggatctactttcacctaggtgatgcttgtaaaaggtgagcaattcattttcttcttcctcatgagagtgagccaccccattttcagtcataaggtgttggatgaaattttttcactttctcgcacttgctttgatctcgaagaaccaagtgtttgcatcacctgcttttatccaagtctgtctggatcgttgacgtaatcgtctagtcccagaagtttctattttaggaagcgtctgaacgtgagctctgcaggggacatactgcgttcctcctgagctaggtcgagcctgaaaatcaattcgctcgcaatgtctgttctcaatttaattccacggaccctgctcttgttccaaacacttaaggcctttgccgtcctagaaagttttgtgtggaggcgcttgattgcatctgtcgtgtgtactgtcttgttccaagcttgttggactgtatctaggaaatctgggaggcgcaaccagtacttttcaaaacggaagatgttactctttggtctggagggatttgcagtgagtaatagagggcagtggtctgagaccaaggtagagatggctgctaggaggcaatttgggaatctctcctcccatccctgtgagcaaaacaccctgtcaatcttcgttaaagttggggactccgtttcactggaccatgtgtaacgctgaccatttaatttgatttctagaacttccagatgatttagggcagccctgaaggcttgcatcatgcccctattgagatttgcattgtttttatccctgtcatgcacgatcaggttgaagtcccctagaattaatcaaattggtttcattacctgctttagttgttttaattcttctaggaattctctttttgcatcatcctgttgagggccatatactcctgttaagctccaggtggctctatcttccttctctgtgagtgtggccgacactgtgtaagtacctgtgtgtgcatcctttaactcatatttgttgtcatttgccgccagtaagacacctccccttgtacctgaggtagaaggaaaacaaaagttttctgagaatgttggccctaataacctattgaaatttgcctggtcgatgaaatctaattttgtttcctgcaggcaaacaacagtgcagttgaggtctctaactaaattcctgaccacctgttgtcgggctggggagttcagccccctaatattccagctcagaatagcacattcatttgtaaacattcattttgcttggtatttatctgtcagctggatgaggacatggacagtagaatcaatcggctgaacctgtacagcagaacctggacaactgaacatgtagtggagtgcaggatcaatcagtacaaaggaggcagtggaagacacttttagtttcttcattagtagcatcattatgcttaagatggggctagcagggtacaagggagcaaacagcctccctatcatcacctgacacaacccaaaaactccaaaagcactttcctgccagcaaactacaacctctgggaaccatctcaggtttcaaacaactagaagctaagacagacttgcacagattagacctaagaaacggcataagaaactagggacaacactgatacattagctagtcacacacacagcacaagtcactttggcttcttgtcatcaccaatggcacagccggccaccagggtagagaaagcatcgatcacttctgcggacaggggctgcttgaatagcttcacgtattttgtcatcgcttgatctgttttcttgccatctggggagatcaagccagctttcttcatcaggtcttcctgggcacgatcaccaggcttggccggagcgaggcgagaagcaaccttctttgccagccgtgcgctcctttggagcctggcgcgcttgcacctggcgagctggggtcggcagcggcggaggctggacctcctggaaaacatgctcaaggaaagccgttagcttatcgtgcaaatcaggcggttggacctgttccggcggctgggcctgcggctgttccagggactgctctggcggcggagcgatgttgccaaggccaacctcctccaacattgggtcgaccgacagggggatcgccatcattggagcatcgaagccggcgatggagttagctagctggtcaacttgtagcacagtcgcaaaaggagtagtcagtggaaaaggcacaatctgcgattcctgtgggcgaaactccgtcagcccctctgacggcgggggagggggggaggctgtctggggtaccagcgggcgaggggctggcggaggggactgcctgttgcgaggggacctggtgcgctcccttctaaccggagacgtcgccgcccgctgatagccaccataggaaccacccctgtggtctggtggcctggaggaggagcgcctggttggagccgtcgtgcgagcagggggaacatcccaacccgaaggccggcgatgctcatgcgccggcggagagcgggagcatgagtgagagcggttgcgtcctggtcccagcctcgccgccacatgttcgcgaggggcgcgctgtccatccttgactcctaagctccaaatgatatcgtgccgctttggcacctcttcagtcactgaggccgaagagatcatgccactgccctggctactagggctgtagccccagactggctccatcggaggaggactggagtcaagcacttggtcaaggtggatcagcacctgataagtgagaagcttcgacgagacagtccgtctgcgttccagccctgactcccccaggtcctcaagccagaaggagtcaggagagttctgcagaagcggctcctccagctggaagtgaaccgccttcgggatggcatcaggatcctcggaccaaatccaagcacacaggcaggcggtcttggtctccgtctttggctcctcaagatcctggaccaggcaaccctcatcgaggatgcctgcaattgtatccacagaccaagtatggctgggaatgccctcaaagcagacacgcacgctaaagcgccagtctaccaactctgcctgaactcgcacggcttgaccgagaagttgatgtcctcaatagagaacggactcgccgccaccacgctgtcactgagagtgctcaaggtgcaggtgaggaggtagacacctttagggaaaaccaccaccgtaagctcgtcccgcgggagctagaacttggtcacaatcaacctattgatctaccctgcatttgtcacaggcatgttacctgtgatccggaccacagccgcagacctggacagtaagccctcctcctcacggaccgcagtcgaccacggtatgcagcgctgaatgctgtccagccggttggctaggtcccctggacgcgccattgtagggaggggaggaacaccaggcagctggcaagtggaggggccggcgctaggcgaggagacaggggctgcttctggtgaacctgtttcttctgaactgaagcccctgggcagcggcgagcacggtggccagaggcaaagcagaggatgcacctgggtgggtctctacagtccgcaatgcggtggtccttggcgaggcagcaaaaacatcttccagttgccttccttttaaagagttccaggaaggagatcctgctttgaattggctgaggaggctcatggtaaacctgcttgttgcctggtaggtggtgaggagtgaagactcgagcgttgaaagctttctcagatacgctgggatttgaattgaatgctggtagagaaggtttcttcctccatcaatgcttcggcttcacaatctgccatgcctgctgcgaaggatatgctgggatttcgttgggaatgcgcgaggcggaagtcgtcgcctgtaccatcagcgcaggaggcttctgagagtaactccccttacctgcacagaggaggcagctggcggagtaactgctgtagccacggctcgacgaaggagcaccagagggtgcgaggatccagccgaggtcgcggagccggatgagagcgcggaggtggcgccacctgctcccttcaacgctggctcgagcagatccgccaggagcatctgggggcggaataaatatgtcctcctctgaaccttcacctgaaagggagccgagactgacacggaaacggcgatgtgaacggaaagggggaacctgcaaaggggattgggggacgccggtaccgaattggaggccggcggtggggtgggtgctgggatcgcagtggcccccagtgagggcgggcggggtgggggtggggaactcatcgtgaaacttgctagtggcctgatactactcctaatgtgcctgatatacgttccttcccacacaccacttaacttctctccctaacacaacaaacaaacgagtatgggcttgaatatgaacagatgcaccaagtgaagcatgttttatgtgcatggagtcaaatctggtttagtttgatgatttaatattctatattttctatccttgaataattagggcggttttccgtggagatcgagggcaagaaattgtggagattttgcttgttctcctacatagcgtacgattcgaaatttacattataatatttaaaaattaaatatcgaggatgtgcacagtacaccaacactgaacacaaacaatgaacacgaggttcattgacacatccacgtatcgtgaaatctgaatgaaccaacccgtgagctctctgtcaaacaattccttacctacgtactatttgccactctcttaaaatgccagtgcttaaatgccactctcccaaatttcattcctaaatgccatccggatccacatgtcagcctcactttccattcaaacaaaagtgatgcgggacccgatactgagtgagactggcatatgggcccggatgatatttaggaatgaaaatttgggagagtggcatttgagcactgatattttgagagagtggcaaatagtaaattacgtgggaggctgaaagaacagctctatatgcttacaaaatgcaacattttctttctagacacatatctacacaggatatggatgacgtataactgctacaaaacaagaggcgagggaggcaggttacagtcagccgaacggagaaagtgctttcaataggaaaacgatgagaaggttgtaaataattaattaatattgacagttgaccccatagaccttaatttctttcatgacaataaataatagagccaccaattcctgtggcttctactacagtatctaccagctcagtgcatgctcagcgtcgacaagagagagagacaagagatcgatcgatcagccatggtgggcgcgcttgcgagcgcttccacgggggtgatgaactccgtcatcgcgaagctctccaagctgctggaagacgagtacgccaagctcaagggcgtgcagcagcagatcgccttcctgcgtgacgagctccgcgccatgaacgccacgctccgcgtgctggccgatgtagaggaagacctcgacccccccgtgaagaggtggagggacaaggtccgtgagctcacattcgacatcgacgactgcatcgactcgtttgaggtccgtgtaataagccatcagcaggagagaggcgagggcctcatcaaggggatcattctcaagctgaagaagctgagagctccccatgagattgccaaccagatcgaggcactcaaggcccatgtcgtcgaggagagcaagcgacacaagaggtatgatcttctcaagccatggtccagcagctctgccacttttactatcgaccctcgactgccggcgctctacgaggaagtagataagcttgttggcatcaaagggcctagggagcacatcattgaatggttgaccaacaagaggagtgatagatcaagagaagatcttaaagtcgtgtccattgtgggttgtggcggtcttggcaagactactctggctaaccaggtgttcaaggaaatcagacaccaatttgattgttcagcctttgtgtctgtgtcccggaaccctgacataaagaagatattaagagacatgctgaaagaagtgaacagtcttgacaacacacaaccatggtctcctaatgatgatgagaggcaactagtcaataaacttagagatacactccaagataaaaggtatgcaaacagccatggcattttacatgcatgattgtggaattaaaattcgtatttgatcctagatagatatagcagatgcttacatggtctaagtaacattctttgataaggtttaatgcatataaatattgcatcagtttttttttaaaaaaaaaattcttcaattgttgtgatatatgcgccccaaccgatttgaactctcaatgtaggactaatatattcccgggtattatgttcacctccattaatgaatgatatgatgccctcagcggctcagcggcaaaccgtatgtgcaactgatatccagaaccacggcttgtacatgatcgtgttgtatgcccatccagggtcctatatacacgtgcttgtgtagggaaggtttaaacgctaataccaattgtaacatccctagcttccaaaatccacattaacctagctcttccatggagcaggtccatgtaaatagcgccgtacccaagaatttgaggccctagcaggatttacgattctgagatggccttccgttttgggcatacaacaaatttccttttttataaaccaaaatttgaatacaaattcaaattcgtaaaccaaaatttgtagattccgaacaaatttcataaaccaaaatttgaatacaaattctctgagtttaccgataagcttgtgaaaaccggtcggctttggcgaaattccgagcgaaatcatcgaaatttcaatcaataactataaatagaggtaaactaaaattgttttccttttttaattcgttattcttttctttcctattgtaaatttcagtaaatacatggaatacatcagtttttttgaaaatttatatcccaataggttctatgaatatcatactatttataagattttatttgattttttccttttttatcaatttaaatttgaatttggatgaaactcatcgaaatctcagacggcttctactttcgagcctcgtcgaaacctcgaaatttcgcggaatttgaccggttttcgtcgaaattatgaacatatataggatggagggactaagaaattaattcacaaaccatggtagcactttgcctaattttgggaagaaagggttgtgacattcagttttctgtagcaagtacaaaaaaaaatcttcaatgtttgaaaagcgtgttcttatcattaacatgaactacagttatttgatgcagccctgattaccattgtacacttattggagaaaagaaaaacaatcttgttataaccagattagtgaaggagaaataagactggaacttgaaaaatagaatgagaaagtcctgaaacatgttgtaacacactggcttggattgaaataaatttgttttgaggcccctaattttagggacctgcagggtcgctcatcttgcacttgcctagatacgagcctacacgtacccctagcatccaggcacacttttatcatcattttgtgtaaaatggtataattcagaggtagagtactaaggttggaactcatgactcgagtttatatgccgcccccatcacatctgaactcaccatgtggactaatcccaccaacatgtaccagacgctatggccagatgggccaactactacttgtacaatttgtagcatcaccctccctgattattgtctcactatcttacttttgcacggtgtgcaatacgctttgtttcaccattcccttccattggggagatttgcaataataacactgcaaacattaatccctacttaattaacaaggaaattagtaaattaaagtaattaaggctaatgcaagaatatactccatccgtctcaaattatagggcaccccttttaaggaaaatcaaactcggtagcttttgactaataatcatactaactatatctatactaagtattatacatgctatatcactaaattaatattttaaagtagtttatgtgatgctaattttatatttgtggggatcatagaatgaaataaagtactagacaaagtatgttattgaagaccgtgtaaaaaaagtatagccttataatttgggacggatggaacattagtctcccatgctacaataatcgatataaacttccaatcgattttagtctactacattacagattaaatcatatatagtctatatgtagttgtatgtattttatatgtaagcttatatctcactaggcttgccttggcttaaaaaattttctagatccgcccctgctatgatctatcttgaacagctagccatgcaaagaatttgtattattcaatggtattcagatcttccaaattatttctgtgcacggcatgttggctacttggctgagccaatgaatggaactatgcaatataggtagactagacttaaatgcatagcagatactccctccataaaaaaaaaagagtaaattgcactagcggtccttaaacttgtaacgatgtttcacttaggtccacgaacttgtaaagcgcacatcgagattcctaaacttggtttattgtatcatcccggtccaaagccgcgtttaaccatggtcttgcctacgtggcgtgccacgtagacgatgacatggcacaaattttaattttcctttttttctccccatcttttctctccttcctcacctcgtgtggtcggaggggacgcggggcaggagcggcgcgggcgtgctcgggcgccggccgacgggaggagaggagcggcgcgcgtgcgcggccagcggccggcgagaaaggagcggcgcgcgggtgtcggctggcgggaggagagaagccgcagcagcggggcagcagggcgagctcgtgctcagcggcgtaagctcgacggcgacaacggccatgtgagggcaaccgccggagtggtggggcgaagaggccgaggcgcgcacggggggtggtgt

SEQ ID NO: 27705 - DNA, 4486 bp, Oryza sativa
accaccttcctcctgagctgtgcaacctccctcccgtgcgcgcgcccggccgtgccgccgcgctcggccaccgccccgctgcctcgtgccacgcccggcctgggcagcctcctctcccacaccgagctcccctcccttatcccaccggtgcccctctcccggcgccatgccaagctgcgccgcgcctacacgccgctgtcgcctcaaccgcgtcgtcgcgtgccggctgcctcgcacgcgaccgcccgcgccgacgccactgccctgagctcccccgtgccggcctctcccttccatcgccgccgcccgtttccgctcgagccaagacgacgccgccgccgagttttcctctcctctcgacagtcgctagctcctctctcctgcaccgccgccaggtcgccgaccccggccacagcctcctcgcaccggtcggcaaccgcctctccccgcctctctcctgcgccgccggcaggtcgccgaccccgcccacggcctcctcgcaccggtctcgctggctccctctctccctttgcctgccacatatgcatctagaggtggaggaaggagagaaaaaaggaaaattaaaatttgtgccatgtcatcgtccatgtggcgtgccacgtaggcaagaccacggtcaaacgcggctttggatcgggatgatacaataaaccaagtttagagacctcgatgtgcgctttgcaagttcgtggacctaagtgaaacctcgttacaagtttaaggaccgctagtgcaatttaccatggtttccgtgtccaactttgactgtccgtcttatatgaaatttttttataatttgtattttcattcttgttaggtgataaaacatgattaatattttatgcgtgacttgtctttttaattttttttcataattttttcaaataagacggacggtcaaacgttggacacggaaactagggtttttcttttttttttgactgagaaagtagtatcttaccaaattgcaggcccactagtgataggatattactaaaaggtttcatgaactctcttgaacctcatcttgccatttcataaagagtcgcatttaattctaccaaagtgatttttatagtccttgtttagccaacctctcctctatagtatgtctgctgtccagactctgttccacagaaccagccatgtaaagaatttgcatttcggtggcgcccaacattttcaaattgtctcattgaaaattgttctcgctgcccctaggaattggagtctgtaaactgtgctgtgtattccctgctcagggtgagcttccagacgatgctgttgtggcgttgtcccaatggggccatattgtgtatcgaggttcatagctcaacttattgtcgaaggtgttctccccccgtaatttggaatgaatttaattgatctcatacacattcttgctgaggtcagggtccatttttggttgaatttttttgtatggtccattcttgaaataaatttctgaaaagatccaaatagtcaaaatttcagcaaagagacaaccacttccctcttcctgttctttcaccttcaccatagcaaaatgcctaatgaaatcataacctttaagcactgattcaaatctaaaatcctgcaggtacttagttgtaatagatgatgtatgggctacagaagcatgggaaactattaaacttgcattgctgagcaacaactgtgacagcagaataatcacgacaacacgtaacactgctgttgcatcaaagtgctcttatcatggaggctatgtttatcatatggaacctctcagctttgtcgactctaaaaggttgttttttaaaagagcttttggttcagaaaacctatactatcctcatctggaagaagtttctaatggaattataaaaaaatgtggtggcctaccattggcagttataactatttctagtttgttggctgatcagtatgcaaaagatgaatgggtgagggtgctagcagcaatcggttttgcacttgcaaaggatcctaatgctggaaatatgagaagaatattgtctttcagttactatgatcttccttaccatgtaagaacttgtttattgtacttaagtctatttccagaagatcacaagatcaacaaacagcggttgataaacagatggattgctgaaggcctcattcatgaagaagagggaagtgcatataaaaccggtgagcattatttccatgaactcatcaatagaagcttgatccaaccagttgatgtccaatatggtaaaccagtggcatgtcgggttcatgacatcatttttaatttcataacaggcaaggcagctgaaaagaacttcaccactttattagatacaacagagttcaaacccatcccaattgacgaacctcgtagagtatatttccagaataacagaaaggaaaacgtcatcatggcaacaaacctgagtctgaaaaatgtccgatcacttactatatttggttactttgtgaaaactccatcattgttggatttcaaagttctacgtgtgctagatttaaaagattgtagaaagttacaaaaccatcatcttactggtatagaaatgttgcttcatctgaaatatttgagtctcggatcaaggtatataactgagctcccaaaaaaactcggagaattacgatatttggaaacactggacataagagagactatgataaaatcccttccatcagcaattacaacattccagaggttagttcgtctacttatcaatcatgacactacatttccagatggaattggaaggatgcaaagcttggaagagttacaaacttttgacatttttacatactcatcaagaaattctttacaagaattcggccagcttacaaaactaagaaagttgagggtgacatggaaccttgataactcattagaagatcatagaacaaccatagaaggttcaatgaaacatttattatctctatgtgacctacattatctccttatctggaatgattgtcctggcctctcactggattcatggtgccctgttactctcagtagcctccgggagttccagatcgaatacggtagcatagctaatgttccgaaatggatgaacatgcttgcatgtctcacagaattagatctcactctgtgcagcacaaaacaggaagatattgatatccttggggagatacctgcctgcttgtctcaggctcactacttctcatggcaccaatggaaggatcttcatcagcagctacaatgctttccgatgcttgaaatacttctttcttcacataaatatgtgtggaacattattggaatttgaagaaggatctatgccaaagctccaacaccttatgatcaagttcaatgcacatagatggaagtgtctgaatgggggctttgatttaggcatccgacatctctccaacctcaccatggctgaggtcattattggtacagattatagtcatggatgctataacccagaggaagagttaatgaaaagcagcaccaattttgctgctagtttgatccagtctgcagttgagacacttcccaaccgtcctgttcttcgttttcagttacagcgtgaagcatgcatacagtttgaagagaggagtgtgaattatgaaatagaggtcaatctaggcgaagtaagagatgttggcaaggtggatcaaggtgaaacaagagttggatcaactaaagagccactttacacgatatttgaggtattaatggattttatcgatcggttcaccatcaaatagttatttatgtttgttttatgatgctttttactactccctccgtttcaggttataagacgttttaactttagtcaaagtcaaactgcttttaagtttgaccaagtttgtagaataaagtagtaacattttcaacccaaaacaaatttattatgaaaatatattcaattattgatttgatgaaactaatttagtattataaatattattatactactccatactcataaaggaagtcgtttaggacaatgtttaagtcaaaccttgaaaatataaatcatgaataactctcaatttgttaagtttgaaaatgtaaaaattatatgtatagatttgtcttaaaaaatactttcataaaagtatacatatatcacttttcaataaatatttttatagaaataagaagtcaatgttatgttttggagactgagtcgctgtcctaaacgacttcctttacgagtatggagggagtatttgtttataaacttggtcaaaacttaaaatagtttgactttgaccaaagtcaaaatgtcttataaccagaaatggagagaccagaaatggagagagtacttagttattttttataatcatactccatccattccataatataagacacaactacattttaaagttgtttcataatataaggcatgtatgcaagcatatcattaactagcacatctttttcactaaaatattattatgtaaatttaagtaaaaaaat

SEQ ID NO: 27706 - DNA, 21213 bp, Oryza sativa
tgccctatacatagccagatgagcacatttgtttgccccaaagttaggggacaccaaagttatgtgtcgccgatgcgatgaagactctgcccatccgtcctgacgaaatacagcggactgaaccagcacagatagagatgcaagccgctcaagaagttgaagtgccacccccatcacccacaggaacacaagaccacacgtccatttttcggtggcagaggcagagcatccaagaaccgaataggctgaagactctttcactggcagtagctgaatgtacactagtagcctgtccgatagttactccattagatttggatttgactgtagagaccacagtagatactgacctgtatgagactttcagatacttgatcatgaaggaagtgcagaagcatgctgtcttcatatgacctgttcagcatgttgtggcattcgtaagactgttactggaatgtcctgttcctgtcaggcctagcattgcagttggtagaactgcttgccgaggtgtcactgtgcctgtgtcacatatatactcccgtaaccatttcttttttgtatttttgtccatactttttgtcacaatggacaaagcagggcacaccagggtttcccaaaccgccggggccgaggttaccgcgccccagcggtaagcacggttaccgcggtaaccgtgaaaaaccgtgtaaaatccatcaaaaattcaaattattttttaaatttatttgaatttaaggaggttaccgcggtatttacattaccgtatccccgcggtaaggccggtaaccgcggtaaccgcgcggttaccggcggtatggtgaaccctggggcacacacgctagccaaaatttgaattttgagaacttaattttagattttctttttagagttatttcatcgtagtctatttttttttacaatggcttttaaaccgcaaacgagacataagtaaaagttttattcataaattaccttcagttgtttctgtttatctttcacgcattaatctactatgggtgggtcaaatgatgagtcaaaattcaacttttctcttacgtgaaatccacgttcttctaagggtgtgtttagttcacgtcaaaattagaagtttgaaattaaaacgatgtgacagaaaagttagaagtttgtgcgcgtaggaaagttttgatatgataaaaaagttgaaagtttgaataaaatgttgggcactaaacctgacctaagttctgtttgggaatcatggaatcgaaacgtacttaggttgcattctttttaaatgcttgaaatagctaattagtcacacgtaaaacgagaaacgtaattagcatagtataaaacaataaacttaattagcatataattaattaaatattaatatataaaaattttatgaataaatttattatattttttaaacaacatatatataaatagttttcacgtaaaatataccgtttaacagtttgaaaattatgctaccgaaaattgagtagctcagctgaaatagctgccttagggcctgttcactttgatgccattttcaaccttaccaaattttggtaaatttgccaaaaaagtgattacatttagtttgctgtcaaattttggtaactatataagaaatactgccaaaattttggcaagttgccaaaattttggtaattaccaaaatttggtaaggttttttttgcattaaagcgaacatgcccttagagcacctttaatagtatagccaactactacctcggaatcacctatagtcaatttaatagccaattcatacaatatttacctacaaacatatactacactttaatatctgatcccacctgtcatacacgtattgtgtcttggagtctgtgctgcagttggctacaaatctgtagcccgctgctctcctctctcctctcctatctccttaaaatatgtttatagctggcttatagcctgttattgtacctgctcttaggttctgttcgttgctggaggttcccaaccagaacagtgtgcacgcaaaacggagtgatccattagcgtgtgattaattaagtattagctatttttttttcaaaaatggattaatatgatttttaagcaactttcatatagaaacatttaaaaaaaacactttttagcggtttgagaagcgtgcgtgcggaaaacgaggcaaatggagctgggaacgagcacttacgaacagagagcatctgtcggtgctggaaacttcttttgaaaagaaaaaaaaaaactcaaaccgaaactaattcccaactcatcctaaccgtccgatcgtaacgccccgagatggaatccaacttgctttggggcgaagcaaacctccctcgcgactttctccctcccctccccacggacaaagaacccagctccacccagaaacaaacacggacctccggacccaccccatccaccgtacacgtgtccacatctacggcccagatccctccaaaagtggagcaggttcgggctaaggctacgcgtcgccgccgcggccgcctccacctcatcatctcccacctctcgccgtcgccgccgctgctatttagatcgaatcgaatcgaatcccacgcggcgcggagccctccacttgcgctgctgctgctgcgagagatcgatcgagaaggcgcgaaccattctcccccctctcggatcggcgggtcgaattggggcggaggagatgctggacgccttcttcaagggcgccggtggcggcggcggcgggttccgcggcgcaaagtggtgagggtttctttgaggggatcttgggtggattcgtttcttgctgaggtttcttttgatttgtttttgattcgatttgtttttttttggtgatggtgggtgtgagtagcaagacgctgctgaagctgtcgatcccgcggatcaagctgctgcggaacaggcgggagctgcagctgcggcagatgcggcgggacatcgccaagctgctcgaggccggccaggaggccaccgcgcgaatcagggtaaggaggagcggggtggattggctgggatgtggatttggggctgatttgctttctggtcgcttacttcgtggtgcaggtggagcacatcatccgggaggagaacatgatggccgcgcaggagattcttgagctcttctgcgagctcatcgccgtccgcttgcccatcatcgagacgcaaaagttcgtcatgttcttcttcacatcattccattgcagtagaattcactagtttatgtgatggtcatagtatggactgttatctgcataatctcatctagataaggccgattttccgacgacatatggcagagtttatggctgcacgaagatattcacttgcacatttctggttcagaaactcaaaagatgttgattaactgcataatgttagttcaccgctaaaacagattatggatgcttttgttattatttcctagctcattcatttggtatgatgatgcatatttggtacagactactcctaagcatcactttgtttacatccaatttcctaatacaagagagagaattttgattattacaccctctgcatgctggtatatggtagttgtctatctctgcacttgttttggtctgaattccctggatagcactaagtacttcttttaataggcattattgatttttttctagtttttttttttaaaaatcaaattcgttcttaaactgtccttctgaacgattgtgtaagacacatcagttacggcttttaggtaacaaaactgttgcaatatttcatcaattggtgggctcaaatgtagtagtgatatcattaatatgtgcatgctacaagatgaatggggctgacttgtgtttcttttcactcctccagggagtgccctatagatctcaaagaagctatatccagcatatgtttcgctgctcccagatgtgcagatctgcctgaacttatgcaagttcagatgatgtttgcaactaaatacgggaaagagtttgttgctgcagctacagagttgatgccagattgtggggtcaatcggcaggtcatataatgagttcaactgaaagaaatttaattatgttatttgatcattatgttgttactgaaatagctggaataaatattcctgcagataattgaactactttctatccgtgctcctcctgttgatgtaaagatgaagctgctgaaagagattgctgaggagcatgagattgattgggatccatcagccacagagacagaatatcttaaaccacatgaggatctattggtaaatatttacctaccagaaaccatttgttagctgcttgttttgaatcttacatgtgttctcttttgctagaatggaccaacctacttcaatggttctacacttcctcttccaaaggagaaacatgaggaaacactagctgcaagtgctgccgaacatcctgatgaagactatgagtctgatactggtttagagtcattggatttgcctgaagtcccaaaagcagccattcgcccaccttctgatactccagcaacccctgatattgacacacacgtgcaaagctcccagccaacttctcatgaattctcaaacatgccaagctcccaaccaacttctcatgaattcttaaacatgccaagctcccagccatcttctcatgaattctcaaacattaaaagctcccagacaacttctcatgaattctcaaatgttcaaacctcccagttggcttcgcatgaattctcaaacccaagtgacttggaagagaatccaacagctaatgctgctttcatgactcagccaaaaggttcagaacatattcctacaccattcgctcaaccaagtatgccagtttcacccaatgaaaagaaacattttgttccatttgcctctccaccgccatttgctgttccctctctagtggagaaaaatgagtccattccgtcaccttctccatctcctccggtgaagccaacagatccaggaatgttcaggacgattgatgaagtgaccccacctccaacagctactgattacttgttctcaaaacaaccagaacagttacactcaacctctgctgagaacattgcaaacattgacttggatgatgtactttctgctgcccagacagctgccgaaacagcagagcgagctgcatcagcagcccgtgctgctgcaaaccttgcacaactgcgcatcgcagatctgaagaagaatagtaaggcttatgagaactacagtgacagtgtccgaaaggaaagccatcctcaatccgaagtgacacagaaaccagtatttgatcaccaagattccttttccagtgacacacagggttatgtgccttctcatttgccccagaggtcgccattgatggaggatgatccgtatttctcctatcccaatctgttctcgtcaaaaccttgagggtggaaactcggtgcgacttagtttttcagcatagttcgaagtgccctgcgatgttgcatcttcagccttgtttaatcttgaatttggctgttgccgggatattctgtgtatgctgagttgatacttaaaggggggtactggcggggtactggcgtactgcagttttactaggtcactgcatggcttgttcaatgtctgtaaattgtaaatgtgtgctgcttgtaccaaatttgtgatacattttaccacctccacaagaaatttaaaaaaataaaggtgaacattgttccttgctattctggaatcttggatggtaagtataatgtctagtgttctgtatgtgccgagatgcgagatgtacctaaatgagtattctatcggtaaactctgcatttgtagtgcttgaaccaaatttttgaaagtttgctaatctttactggaaatagaaacttctcaactccgcaagctgtcattcgttaagcaattgtgtatgcctgtcacattcgcatgctttgagatgcattttgagttcttaagttaacaaatttgtgtgaacgactagatgtgcctgtgtgatttgatccactgattaaagctagtgtatacatattcttgtatgacaatgtgcaattagtacagaggttaactcttgacacctccattcctcacaacctgaaacttaggccagaatttcagtcttccgagagaaaaagatgatatggtctcatccagtaactcacaatctgaataagctgcatgtacaggatcactagtacaaagtacagagcacaaagtctgacagcttattgttctttttcaggacataacacattttgggcgtgaaggacagatgaaacagaaacaaatgcccttctcaactctgaggaatatacttatttccaggatggctataaattgggtctagctgcagagcaattccttcagagttcaatgcagggttattagtgtggagcatctgaacatgtatggttttgttgttcctgagctgtactgttctagctagttttgaggtgtttgtcaagcactgaaagtgagagttggatgaaagcaaactgactgatgatcagacaactccagcagatcactgatcagcttgttttcctccaatatctcaccttcagcaaattgacttgtagctacagcctacagataaagaaaagattttcgaagaatacgattgtgtcattcaaagtgaggattagagggaactgaatcacacccatctggaacaaaagatggatggttcagtttcttctaatatctcacattgaatggttacacgtacatactggtaaaaattcagagaggtgcagacattcagtcaaaattcagagagatgatgacattcggtcacccaacgtgaggattggagggaatcaaactagaaactctgtttatctagtttggtttcctccaatatcttagattggctgatgaatttgtttatcctgagttgcagactttacatgtagaactgaagagcacaactgaaggggcagggctgtgtgtttctacagtgtgtgctggtatcttccagcaggaggggtttcctcatttattgtttttcgggttttctcatttattgtttttcttttgacacttcttcacttgtttactatctatagcatgttctgggtttgtcccactgttttaagttatttgatttattttcatttatttctaattctaggctaggttacatatttggtgtataagccaacaacgtaaagcatcttccgttataaaattacttttcaagtagtagtaagataatcccttacaactaggtggcagtgcactaggtgaggaatagcagtgaaggctgaaccatgggatccgtgaataagaaacaagataagttgtttattattattctagtaatggtccctatgtatgtaaacaacgtgtttcaaccatttgagaaaaagttaagcatatgtttaacatgatatttttgggctcccataagggttagtactcatgctaacaacaaagcaacaggaattgagttgtggtccacgtgaatgaagaaataaagcaagttatttattattgtagaagtggtacatacgtattcaagagaagggttcaaccaatggaatgaaaacataggcttgagtgaatggtaatgtgacatttctcggctccaacaagaccttctactatccgtgctctgtcaacattctctatatatcatggaagaggaaaacattgtgtaccatagcttcccattttctcctagctgcttaggttttcgtttatgcccgttgcctctaacacctgtctcacccttgagtccatgaattcgctgtgaaaccaccacctagccaccaccctttggtccactatgggcatcccctctaagccaagggaacctcatgtccgtcctccttattagaaactcatcagagaagatggtgttgtggcttttgctcacgagcttgccaagacaactctggcagcccacacatctccgtgcgaatctaatggaaaaaagggatgtgcttgtgatagatcgagaaagtaggcgaatgtccaatagtaattcccaattctttattggtaaataccttatatgctactaaaatttttaccacgtctttttattaagccactaattaccttactgactcaggagtctaaacaccgcatatctgacattttgttctattaggaatgagcaatgtatcatagtctcaaccaatggttccaaccttcacgttggcaaaagttgttggaactaccatcaaaaccattgttcataaatcattgatacttggggggccactaccaaaaacactttccccacttttctcccccccctctctctctctctctctccatgaaaagatcgttcttccccaccccgtccttatctctctctctcgtagaaacccatctttgcgcccctagcccatcaccgccgtgcctctgcccacctcgtcctcgcctcccttctctctaaccccctcctcacttctcccccatccaaatcaacgaccaaattaaagacaacgatacctcgacgactcttctccagtcattgcttgctctttctctcccgctaatatcctctcattcctagtcggcaccgtcgaccacgtccaggccatggcttggggtgacgagctccatcgttgcatagatcgttggtggctagggttgatgagctttgtggcgacgcagggctgctcaagccgatggatgccatgtacttgctagatcaagccatggccaagtcctcctccgtggcggcaacaactgttcaccagatcaggccatggtcaagtccccctctgtggctgcaacaaccgctcgctggatctggttgactgcggtaacatttcctggttgacggtggtggcatcccttggttagtcagtccatcctcgcacatactcctttatctctctccatatttcttatttggaccacctccttttcatcggggctactcgtggcttgcagaaagcactctagccactcacaaacctcaagcatggtatctgagcctagctgaagcttgaacccacgacctgggtcactgcgttgggcatgcccttagtagtctcacgtctttgggagaaaaggaggttcaaccgctagaacagtaaaaggttacattcaagtgcctacataatgtggtcttttttacaccatttgaatgcctgcttatgttgataaccttctctttataaggacatggaaacaacaacaattttcatcaacaagaagttgtatatatcttcttctctacccatatatgaccatcttaataaaggcaagactcttccttactggttgaatatattggtggagaagaagatggtacaacttcttgttgacggggaaactattgcttcttccctcttcttataatgagaaggttgttaagagcactaggagaccaccactgatgtaagaaaagccaaagcttgtatacattagaatctaatctgtgtttctttcgtgttaggagaactttaaaaaaatctctgatcatgaagattctaaaaaaaataaaagtagcactgaaaactataatggataaatggataaaaggattttgttggaaaaataaaaaaaatatttccggacttggttcggggattttgaacccgacgtgaatcgaacacgcaaccttctgatctggagtcagacgcgctaccattgcgccacggatccggccttgttaagatgttcaatttaacattaattaagcaactaaaaccatcgaaatcagaaatacgccttgtacacgaatagtgagcaacggattttacgccttcagttcgttagacacgggttcttctacgccttcattcaacggaggcgtaatccgccgaagcctccagggtccaagccgagtagtgcaggtgcagccgccgcttaaaccctggtcccccttgtctcccaaaccctctctccttcccctcgcttccgcctccggccgccgccgccgccgccgcgaggccaccgcctgctgctgcagcggcctacccttgcgtcggtgcaagacggcgccctgcggcttcggttgcggggtgggtggtggcgttgcgggaggaggaggagggaggcgggcggggtccaagctgaggcggctcgtgaggtccatggcggtggcgccgccgctgccgccggcaccggcgcggcagctacggcggtggaaggggtcttcgccgcggccgccgccgtggctgtcctctcccttccgccgcacccgctacttgtcgcgcccggccttcgccgcgggaggaaggtagccgtactgtttatttgtgtgtattgcataagcctttttctttgctagtagttgttaagatgttccgtagtgcctaattcgtgatgaaaaataatacttcctccgtttcacaatgtaagtcattatagtatttcccacgttcatattgatgttaataaatctagataaatatatatgtctatattcattaacattaatatgaatgtgggaaatgctagaatgacttacattgtgaaacggagggagtaaatgatgttttggttaatggatgggtgtatgcatatttttcgcatgttctaatgtgatgatttatctagactgtgtaggacttcggatatgtctcctcatttgagctagtgtcgattagcattccttaatccttatatatatttttattttgttttaagagatctaagcattccttatgtagtcacattccacttcttatagccatacaattattactacagaagtacgaattgcccgataatagtaatctgccaaagagtaactaggttctactgtcactatcctgaatgccgcgcttttgccttattacttgatgatttcacattgcttgggatcttgggtgcttctgaactttgcaaatggttctcgttggcaggcaagattattctcctagttcaggcatgggggttagcaaaaccggtgctttcaggcttggattgtatggcaacttaaatgtacaaagtagtgtgcaagaatgggttgatgaaaccaagaggttatttttcctcaggaccacaaacagtgtcagaaacaacatcactaatggcactactcctctgcgggttggaaatctgcgtcatgatccctcagaagatatcaggagttcaaactatccttccttgtataatcaaagagaaagaggaccatctaattcaattgtaaatagacatgtcgatacagatttggctaagcatcgtgtgatgtatcagtcagcacatgctgtgcctgccccattcagtgttgttaataatgatatcaaaccactgaacatgcttgatggctccaaggaggaaattccttggcacgattccgttacgatggaatcttctctgcctaaagtttccaagtcagagaaaactttggtggttgataaagctatcccagacaaaaaggagcacaaacgcattacaaggaaggtgacgccaaatttcccggacaaagcttccttgtccactgagtcaaaaaatgcacggaagttgcttgctaccatctatgacaaagttttggttgtcgacaatgttgagtcagctaggagtgttgttaaattgcttactacaaagtacaaaggctttattcatgcatgtgacacggaggtatttcgccaaaccctgcttgagttctatcatcggtatatcagttttggctatgttatttaggttttccctcataattgtgagagtatcaataagaagtatatttctgataggtgatactatagtatcttgtttggtcatcaattattgctgacctcaagtgtttgttgttagattgtgcctttttttccctatgtatcttctctgaaaatgtaagttgcagagtttacaggagatgtcatgaagaatgtaaaatattaaatgctaatgctaattattggtttcttctagttacatggtttgacatgctcatagtctacttctgtggtagcaagctttgctcagaattatttacagttttattgcgtatcaagctccaaacatacattctaatttaggatagtacaatattatgcaggtggcaaatattgatgtcaaagaagagacgccagttggtcatggagaagtaatatgctttagcatctattcaggaaattctgatggggaggctgattttggaaatggcaaaacatgcatatgggtggatgtgctagatggtggaagggatgttctaatggagtttgctcctttctttgaggacccatctatcaaaaaggttcacttcgattcctcattttataagttatttatcttggagtaaatttattgtggttatcttctccctttatgtgttggatgaaatgtattagtgccatagttcctttttcctcttctattactactataattacattactccttttagattaggccttagttgcagcaaactgcactaaacaccatttcctatcactcgtaaacttatgctaaacattgaaaataactagatatagttcactattttataattatgcatttcacctgattgtcagcaccataaagttgtgggtttataaaaaaaaaatgaaaaacaaaatcctacctggctacctgctaaaccctacccaagagtgataatgtaaatggactaccttaagattgctgttttagacagacccttctgtgctctgacatactgtctttatatgttccatttttccctgcctagaaaaaattcctgtgcgttgcaacgagtgaaggcaacttgcaaataactgaacaaaattaactgtttaaactcggctgtagctaccggtccatcacctaatgaactatgaaatcatgtgggtatgatcgatgaatataattgtaacaaaaaaatgacatcatttctaacatggtgatggtgtttagttttgaagttatggagtgtatttctttcgtgcaatagcgcatgtgtgcttgcgtcgaccaacatgagtcaggtcataaaaaatcttggtatggtagtctatttgatttgtaggaggcttggagtaaatcttagttaatagtgaggacttggactacactaagggaagagccgaaagacacatggtagattgataccgtgtagaaggattgatgtgacatgtgactcattagtggtgtaccaggtccaaaaagtcatgaataaaatatttataaaaatgggaagagatggagaaaaaacatctatttttgaaaatcacaagggaacaactttcacctcagccactgttcacgcgggaactgttcatcaccagagaggtgaagagcttcatggctagcttgggacagtagacccatctgatctaagtaggccatgaattcacgatcggtcaatgcagccacagccggcccaggtagggtcagcaggaaaaagacctggctgggtggagctagaattccctcactcgtgtactgctgtactgaaaaagggcggacgtgcgctgtgtacaaagagtcaaagactaatgcggtaactgagtagaggatggacgaaaattttgagtacaaaatcatcttcaatttttataatataataggtaaagattgaatagattcacattttcgtacccgagccccatatttcctactacttcgcttagaaaaaagaaacatgttttagacattgacacagtccccaaaatacaactttgacaacttatttatgttatagtatatttgtagtatcaattgtatgaccctataaaattgtaatattatgatattctggtcacaaaaactatgttctattacaaaatgctaaaagaacccaatatagttctaatattgtggaagtattttttgagaaaaatctacaagtacaattttcatgtgtccaatctaattagttaaaagatattgataagaacatttttaaagtttgacttcaaacatgtccaaaacgagatgtttttttgtgactggagggggtagtaattttggtgacaaatatacacatatgagtttcatataccaagattaaatattttgaagatattgatggtcaaagttctgattgttcaacttaatgtatgtccaaaacggcatgttttcgtgactggagcccagagggagtatgaaattaatatgctaattagtagattcagtcttcaatcaatctttgaactgtgcagttcggaataaaactacagattggtcattacccatcaattattattatactacgtatttgtttcttcttggcttgtctgaagtgatctgttctttctcctcatcatgtaggtttggcataactatagttttgatatccatgtcattgagaactgtggaatcaaggttgctggatttcatgctgatacgatgcatcttgcacgcctgtgggattcttccaggagaactgatggtggatattcacttgaaggactaacaaatgattacagagtcatggatgctgttttaaaggacatacctaaaactgggaaggtgtcaatgaaaactatctttggccggaaaaaggttagaaaagatggatctgaagggaaaaccatatctatcgagccagtcgaaaagttacaaagggaggatagagagttgtggatttgctattcctcactagattcaatgagtacattgaagctttatgaaagcttgaaaaacaagcttgaagcaaaggaatggattttcgatgattgtcctagaggaacaatgtatgatttctacgaagagtattggcgtccctttggtgctcttcttgtaaagatggaaacagagggagtgcttgttgaccgtgcatacctttcggagattgagaaagctgctgttactgaacgagaattagcagcggataagtttcggaaatgggcatctaagcattgtcctgatgccaagtacatgaatgtgaatagtgataatcaaattcgccaacttttctttggtggcatcgaaaataggtattcctaccaccttgtataatctctttgatgtctgcttgatttgtatatactttatgccaggatatctttttgaatgcatgtcatttagaaaccactgtaaaaggatatcattaatatgtgttaaaaccaataattgcttgctgttcttatatgcattggtctatgcatggtttaaactgggtagcaattgttcttgtgtgtccaacactccaagacatgaataattcttcatatcaacaagtggtggaaaacgagggaatctatctttgcattctatttgtgctaggtatttcctttatgtaatttcaaagaaaaagtagtaactgtgagttattgcttgtgcgtatttcctgtaaaaatgattgttttctttacatttacctgcttatcattgcttatgtataattcttgtcagcttcacaatctttgtcgtagaaataagcctggtgaaacttggccacaaagtaaagcttttaaagtgccaaatgatgaaggcatagctacagagggcaagaagactccaaagtctcgcacaatcaaacttttcactattgtggaagatcttaaacttttcactacagagggcaagaagactacaaagactggctggcttaaagtccggggggaggttttatggagtttggctggtaaaatacccacagatcatatatataaaattgatgatgatggccaagagtttgatgaagatgggagcagtgtggaacttcctgagcaggatatagaagacacttccccatatggaactgcatatgaagcgtttggtggaggaaagaagggaagggaagcatgtcatgccattgctgctctatgtgaagtcttttctattgacaaattgatatccggcttcattgttccattgcaggtgagccaggatcttagtcatgctgattgaagttgccattcttaagacatcactcattgcatgtacttataaatgataatgcaaatcaatttgtgctggtgttatgtgtcctgagtcctgacagctccaatgttctttcacctcacgctcttgaaactttggggcttcagcatgcaccataaatgtggtgatttggtcagcatgcaatttttgtagggagagcatggaattcagttaaatgcattgtcagtccatcaagtttgaaatttggttctttcgattagtgctgtttgatatcttaatttgataatttaatactttgtttataccatgatcacttggtctgttttgattatatattttgaggcttaatggtgctactactgtagtcttggtgctgatccaacttgtgttgtttgtgtgagggacaactatggtgtatacttggtgcatgataccaatagtctcagctaactgcacttaacttctaagttgcacctactgtttgagtcttgactgctctttatccatgatagggagatcgtatatcatgcaaggaagggcgcattcactgttcattaaatatcaatactgaaacaggacgcttgtcagcaagaacaccaaacttacaggtatgcctcttcttttgcatttgttggaatcttgcatcagtacctcacagttcacatttgggttgtcaataagcacatgatgatggtacaccacactattgtcaagtaaaggatgaaaaatatacaaaaggtctgtatgttctttcaagacaaaagtatgttggtgtcggctccttctcactgacttttgcctggtttgagtgtgctctaccactgtgtatgtaagcagtataagactgctgttccacagagtcactatatgagtgtttttcagagtatatgcttgcattcttatttgcatcaacttgccaccgactgctacagaagggagacttggactgcttagcaactaagttgcatatgctatcaatttcgatttttcgtaaagcacaggaactaatgttaccttcaaacttcagcattcaccagttgcaatataaataaaatgctctgtagaagtatgatactccataatcattttattcattcatcaatggatatgagaatgaaaggcaaaacaaacatggcaaattggcaatataaagtaggaatgatgaaatggctcaccggcaaacttattttgtgtagccaacctcaggcatcaggacacacatttgaattattcatttagtcaataagctgtctgctatttcgggatatttgattattaccatgcttcatcatcaagggtatttggacccttgctaaatttgttattacttctgacaaatgcttcagtttttattgttagagtggtgctatatcgattatgtaaattttatttttttttaaccaagtatatcttccttgcagaatcaacctgctcttgaaaaggataggtacaagattcgccatgcttttgtcgcagctccagggaacactcttattgttgctgattatggccaagtatgcttagtggttctcaatagtaagtttttttacttcacttagcagttccacctgataaaaggtctttttttatgtagctggaactgaggatcttggcgcatcttactaattgtaaaagcatgctggaagctttcaaggctggtggtgacttccattctaggacagccatgaatatgtaccagcatgttcgtgatgctgttgaaaaaaagaaagttctgcttgaatggcatcctcaaccaggtcaagacaaacccccagtgccattattgaaggtacttgagtgtcactaacattttctgacagcagcttatctctcgaagttgtacttgatttcatttgaattacgtaagattttggtcctgtttgcttattgtgataagatggaatatgattaccttcatttgtagttcattcagtcaaattttaattattttagttattgagaaatatatctttgttgcatttttttttaaaaaaaaattgaacatgtgaattctgtgacagttgttcctagtggaaagccacataatttgtcggataacatgtctaaattacacaaaaaagtgtcggatttaatttaatcgaaagatacatggataattgataacctcacttgtcatacatttatatgttagggcctcgtgttttctttctgctttgaagaagttggcaagttgcatagagtgcttttatcaattgttattgggcatatatattccatatgtactgatttttttatatatatatctggacccctggtagaatggtataaggctatatactaataggcatggagttaaaaccaaacttgatgtttctatttctattttaggatgcttttggcgctgagaggaggaaggccaaaatgcttaatttctccattgcatatgggaagactgctgttggtctatcttgggattggaaggtatgggcttctatttgtacaggcttgtgcatgcatttatcatcttcccttgttcagtttttcttattgggtttcatcttgtttttgtacacaacatgatatcgcataggagtattattcagtaaaagttttgttacaatcagttccagagttgtagcttaattgtcctagcaggtttctgttagggaagcaagggatacactcaaactttggtatagggatagaaaggaagtttcagcttggcaaaagaagcagaaagcctttgcgcttgaaaagtgcgaagtctacactttgctcgggcgatcacgccaatttcctaatatgactcatgcgggtcctggtcaaaagggtcacgtcgagcgtgctgctataaatgcaccagtgcaggtaattcctattagttatatcacaatggttgttcttgttcagttttgggatgtctaaatcccttttgtgatacacagggcagtgcagcagatgttgctatgtgtgcaatgcttgagatagaaagaaacgctcgccttaaggagcttggttggagactcctattgcaggtttatgacaataacactcctacgtttacaaaagaaagtacttaggctggtatttgaaggcacagacgaaaggggccaccattgtttctttctttcaaagaatttggcgaagcaaagatttacatcatatttaagagctacgttttgtgttctttcagagtattttattttgatccccagaatgaatttgtacattgtcctcaaatgttatgtctgcatctgccaggtgcatgatgaagtgatcttggaagggcctacagaatctgccgaggaggccaaggccatcgttgtggagtgcatgtccaagcctttctatggaaccaacatcctcaaggttgacctagctgtcgacgccaagtacgcgaagagctggtatgctgccaagtagaatccacactcagttcttctgccctatacatagccagatgaacacatttgtctgccccaaagttaggcgacaccaaagttatgtgtcgccgatgcgatgaagactgcccatccatcctgacgaaatacagcggactgagccagcatagataagagatgcaaagccgctcaagcactcgaagtgccacccccatcacccacaggaacacaagatcacacgtccattttttcggtggcagaggcagagcatccaacgagggccgaataggctgaagactctttcactggcagtagctgaatgtacagaagtagcctgtctgatagttagatttggatttgactgtagggaccccagtagatactgacctgtatgagactttcagatacttgggcagtgtttagttcccttcaaactttaaaaaatttcgttacatcaaatgtttggacacatacatgaagcaataagggcttgttcgtttctctaacaaggaggagatgaaattttcgatactcgtgtacgtttttcaaactgttaaacggtatgttttgtgcgaaaactttctatatgaaagttgctctctaaaatgtcggattaatccatttttcaagtttgtagtaattaaaattcaattaatcatatgttattatcatcttgttttgcgtgaaacacttaatcttcatcttcaggagattcaaacactatctaaatatggatgaaaaaaaaccaattgcttagtttgcatataaattgcgagacgaatcttttgagcctaattacgtcatgatttaacaatatgatgctatagtaaacatttggtaatgacggattaattaggcttaataaattcgtctcgcagtttacaggcggaatctgtaatttgttttgtcattagtctacgtttaatacttcaaatgtaccggtttacagtttaaaaatcatgctaacagaaatcgaggagcagctaagttgaaatagttgccttagatctttcccgaaatccatgttcttctaagttctatttgggaattatggaatcaaaacgtacttggaaaaaagtttaatagtattgccaactattgggttcaatagtcaatttaatagccaattcatacaatagttacctataacatatagtacacaattaatacctggtcccacttatcatacacacgtgtatcttggaatctgtgttgtagctggctataaatctgtagcccgctgctcttctctcttcttttatctcattgacatgtgtttatagctggtttatagtctgctattataccagctcttagagcatcggtcggtgatgcaaacttctttaggaaaaaaaaactcaaaccacccatccaccgtacacgtgtccacatctacggcccagatccctccccgaagtggagcaggtgctacgtgtacaccggcagcgacgccgcctccacctcatcatcatctcccacctcccgccgtcgccgctgatgctgctactgctatttagatcgaatccccacgatgcagccttgctctcgagagccaatttcatccgggggggacatgctggacgccctcttcaagggagccggtggcggcggcggcgggttctgcggtgccaagtggtgggggtttctttggggggatcttgggtggattcgtttcttgctgaggtttttctttgggtgaataactaatttagtcccttaagtttcaccaaagactcagtttgatcctgtaagtttcattttatccatatagctgttctaagtatttagtatttgttttggcttaaaatcatcattggactcactaaatatgccatatggctatttctagtcaacaatttggttagaaaatgtcccttttgcccttaatttgtatccaactatacactagaaaaaagaaacccaaaatgaataaacaacattgcatatgtactttccgttatttcaatatgtgtatatgaaacttgagtctaatggctatcgtatacacttgcaagtatataatttattttcgttttacataaattgctatgcattatctataaaaagaattcgttgcattgcatatgtgtataagagaaaaaattgcatgcaatgaattctttttat

SEQ ID NO: 27707 - DNA, 641 bp, Oryza sativa
tagttcggaacaggatttgttttatacctgtcagagagtaacacaaaatgctgattgtcaacgtcttccagtgcatttgccaacaaccttctctctgcatcaaccatggaaatcttaccccataccacctgcaacaaaaagtaaaacaatggcaccatcacctacagcttcaaatcactacgataagctgaaagtaatcttcatttttataatgcaagctgttaatcttcatgagcgccgtaaaattgtataataccttttcactgcgtatgtctcgatcaataaataagggactggcatgttctggtttctcccttgaggcatgaacatatatggtatatcttccctcatgaccctgcggaaacaacaagagaagacatggtgaattagcactcagcaaaaagaggtggcacaagaattaggatatcctttcaatattagtagttctgggcaataaacatatacaaaagaaaagtcagagaaagtgatagtataaatgttgacaaaatgaatgcaattctacataagcttaattatcatgaaaaccccacttctaaatcttgcttcttagctaggtgcaaatgggcatgcccgtaatactaattacagcatcaacttaaaaatttcagtgtgcttcagtc

SEQ ID NO: 27708 - DNA, 1011 bp, Oryza sativa
aactagatatacttttatgttctaaaaaatgtggtctgcctacatagcatcgatcaaagaagtcaaatattttaagaaaaaaaatagtacagcaatagtaaaccttataaggcaaccttatggtcgtttcaaagacacttgcatcgtaatccttgtcaaagcttagtgaatcggccacccagctggcatcatgaaatagacatcgactgaattagagtatgacataaatcataagaagatactccactctgtaatggagctataaacaagcagattagagaacttaacaagatataaataataaaaaaagtgctaaacaaaatatactcataaaagccatttatcacatgaatagatgaaacaaactgaatgcctaaagaagtaatcaagaaattccgatttccctatatcacaagggataaagagacgcattcattgctaaaagcctaaaatacctaaatgacaaataagtttactttctaaattagggaatgccatattttaacatcacggaatattaaaggatgaagcagacacaggtttagtctgaagtattgaatgttaatatgagaaacctaaaatctaatagaagtctctgtcgtgaatggaccaaattaaagcgcatgaggaagcattatgtacattctgtatggtgaaaaaatagttaaactcactctctggccctctgaaattcatcctttaggcccattatatacagtgtatcaagtgagtccacaagagttgccccgagaccaccaaagctattgacaccattctttgattgtggctggaaaataatttgaacaaagaaaaatacagaagacacttcagagctcactcagataagttagaagggcaatagaaataacagaatgttgactaaacaaacctgaagttcatccattccccaggcatacttcacataggaattccaagcatgggccatagcctccttaaccttttctctcctttcattattaataggatcaatttctacaagcttttctctgg

SEQ ID NO: 27709 - DNA, 15995 bp, Oryza sativa
atttcaagcaacacgcacatttttttagcaagacatatatacacaaaagcttgtcggccgatccagcaaaatatatacacaaaagcactaactagctcctagtagggatgcaagcgggtcgacccacgaatctacttatatgttaaataaagagtaatctgtgggttttcacgttatggctcggcttgccgcgttgtatagatgcaagtgggtcaattaataaacctatttataggtcaaattagtaagtaacccacgagtcaacccgcgggttactcactaattttgcctataaacgggttcgcgggttggcccgcttgcatccttggctcctacggagttagtagtgactcgcccactgaatctctgactgtaaaagggcagggcattagtagaataattaatattactagatccttgtgttgcaatgggctgggacaaaatagaattttgcaacaagtttgatagttgtttttaaggtttaatattatatatttgaattgaattgatgcataagactaccattatccatctttagagcctagtgctgaaaatggtgggaaaaaaacaaatcctgtcataaaatgagaggaatggatagatgaaagttgaaacatactaggtccactggaaataaatcccataggtctgctttgcctttaactgggggtttgttcagcatgtataacacttgacttcctagctggtcacccatttggtaaggacacttcctatcggaataggtcatgatgtaatcagtaccaaaccagggttgaaatgttaaggggtcttaaggatttattctatttccagaggtccaccaggcaaaattattgcacttgcaccagagatgaatgaaatatcgagaatgattatgttcacgcatgtattctttgtgctcacttaactagaaattctcttgtgcctagtagtgttttcctaaaaagttgtcctaaaaggcattgcacacaatttgatggtagcatgtagaatttggggaaatgtggcactcccatgcattaactttttttgtcgccaaccttagtagaagagattagggcatgcatttccatgcaatacaccattaaattatacttgttacaaatttacattgattatttaattaaattttctactagttcaaaaatactgttgcacaggcactagcagtttttttcgccgggccggcgaatagccggccgatgtatattaagagtaagaaagggaatgtacaatatagcgcggtgcgtcaatgcaccaccattacagacataaaaagaaagctaaaatctcacagaatgagttgctacagagtgacacatggggctaacaagacctgcagctatccaagtctcccattcatcccccatggcagaaaagagctggggaatcgttgcctcgatcccttcgaacacccttgcgttttgctttttccaaatcaaccaggttactagcagtacagcggatgtttagatatcactctagctataagcttccccagttttattttattttactccttatgatttatataccaattctatggtggtttctactactagtagaatcaatccagaccttgtatcttttctcatccaatagatcatgttagtttatcttatcacctgaactaccgatagtagaatattttttctactgatagtagaacttataaattaatgacttagacgataatattggtcgtagaatagtaccaaactaccgatagataccaccgtaaaatactcacaattaattatatgtagttagcttctgtaactcaaatcacttcggttatgatgatctatagaagagatatgtgaacttctctacagaactgcaaaataaatatagatagaaaattaggatttatgtcaagtgaatcattttaatgttattttgaagctttgataagtgaattctaagacatatatgatataacaatttctgctttagtgttcgcatctatgaaaatagaccaagtcctagaactagaagagaactctttgcattattcttggaaggccctatatacaattaatcaagaggggcttgcacggtgatgagaactgatgatacttaccgtggttattgttctcttaccatttattcttgccatatacgggttgattgggacaccagtacaccactggtgcaccaccatttggagcatctgccgattggagattttggcaccatcttctttttaatgggaccattctgattcgataccctgcgtatctcaattggattgtgtggtctctccgtccctcctcactcacagtgcgacctgcacatgtaacctttttatcctttgcatgttttcctaagtgattggtgggaaacctcgtaggataagtgtccttaatagtcatttcattggtatatgtagagaactgtagacctataatgtctctcactctcactcgcagggacgcaggcaacatagccttagctaatgatgaaggatttgctggagttagttggtaccactttcacaaatcaagcacatcctcacactgggtcccgaaaattctgcaccggcctctcttagggtttctatcagagcaatgtgttcttttttagtggcagagagtagtgataaggatgatgataactgctagtgggcccccgtgccgctccaggggcaggggcgacacgggcggcgaccaccgccgccttcctccctcctccacctcgccgccgcccgagcagaccgccggaaaccgcgtggctgcgaggaaggcggcggcggggccttccttctccctcgagggcgcgggtcggtgcccacgaccccgaccagttgggggcggcgacggtgcggcggcatcggcgtcggcgtcagggcgttgggctgggcgcgcggaggcgacagggtgcggaacagctgggcggaggcggcttggtgcggaacggcggcggcggcgccggatttggcgtccctcgccagatccggcggtccggtctcctcccgggacgatggtggcacccaaggaggcggggaagggagatgcaggcggcgggaaaggtggagcagcggcaacgcgcgtcgcctctccagatccgggctgggggagtggtcggcgccgaggaggtgcggagaccggcaggcagaggcagcgtcacggtggtcaggcgacaacagcggcggctcgctcccgccgtggtcgcggcgccgccgtcggtgtctgtcaagcgttggtgttggcttcggtaatgctgcggcggcgcgctctagctggtcatcccctgtacctggctggatctggccgtccgcggccggatccatcgcctccacgccgaatggcagctggtcggcgggacggctgcgtgtggacggcaagcgcggcggcggctcgctggcggccagcctcctgctcggcagggggcttctgccggtggtgggtcttgtcgttgttgatgggcggcgatgtgcggatgtggaaatggcaggacgacggcttgtgctggcgtgaagcaggaatggggcttgatgtccgtgacggtgacttcctcattgtcggccgagtgttctccctctcttcggtttccccccttggccggacccttttctagtcatggggaatgctagggggagggcggaggctccggcttgctgtagaagtttgtggcggatagatggcgtttcgagggtggccaagggcccgtcttgccattggttacaatcaaggtatgattgcttctaagacgtcatgaactattctgcggccatcgatgtgggggtgcttgtatgggtgatgtgaagatgctggcgaaagccttgccgtgcttttggcgggttcgacaacgacggcgcccgtgggtgtcgtttccctccttggaggcgttgtcatggcactctttcatatcctcacaaatctctccaggtgaaaaccttgttccgattttcggacgagtggcggcggcgtcacgcgtcgtatcctccttgggggcgtcgcttcggagaagttccaatgcatcgatgactattgatggtccttttcggttcaatagctttcatattttgtgttcggcgaggcttcccttcttgggtccgcttctttcttgtggtgggcgacacgctcttcggttgtttctgctgatgaagtcgaagttgctcactgatggggtgcggcgacgcttggcaacgatgacatgttgcagtctcttccaaggagttctggtgctggccgtgtgaaggaagtggctcctcagtggcttggctgatgtctattgttggatgccggagccgcttttcgctttggcgattttcgtcttcagtgttgttgcggttgtgaagtcggcgctactaggtcgctggggcggctagctcggcaacgataacacctcttctgcgatgtggaagctgttgtgtcgcttttgtgtttagctttgtggcgacgtcctgcgattgggctccgccgtcgttgttagttgtgtagcggtgggtttgtaattaaccgtgcagttgtatgatttttgggcctagttttccttataaactgggccaattcttttcttctaaatataaaagtgtggaactaagttccgccttaggttttaaaaaaaaaagataactgctagtgggtagcatgagaggtggatcgatctgatggaaatagcaaaaggtagagacccggacctggatagattttagtggtccaaacattctctttcagctagcgtatcttttgtgtgtgtgtatatatatatatatatatatatatatatatatatatatatatatatatatatatatatatatatagtaaatttgtttggtgctccatggtgcccgggcaccattgttgaaattgagtatatacctaattcaaatgagtatgaaactttttcaattacttagatattaacattagctactttactaactagttcaaagcaagtttgaactgaatttgaacttgtttttgttagattttgattctaggtatatagcatccatacatataattagttaggtatgtaatcatggattgtgaaataaagttaaatttgagttgttttgttgataggtataggtatgaatcgagttattataactaggtatatactcacaatttgaaaattttgaaaaatttgagtgattttgtgtatttgataccatggtgcctgggcaccatggtgccccatatgagtgtcctatatagtaaatttgtatatatatatatatacgtatatatatatacacacatatacatatacatatatatatatatacatatacatatacatatatatatgtatgtatatatatgtatgtgtgtgtgtgtatatatatatatacacacatacacacacacacatatatatatatatatatatatacatacatacatatatatatatatacatacatacatacatatatatatacatacatacatacatatatatatacatacatacatacatacatacatacatacatacatacatacatacatacatacatatacatacatacatacatacatacatatatgtatgtatgtatgtattctattgggcattatgcttttggacagcaaaagattgatgatttattgttattttttgggtagctttactctgataatgcattgctaaagtgctgatggttagtttgcatgcagccgcaaacaaccatatcaaagagagcgatataatgttactgacgagtgttatagaaaggtagcctggcatattctacattagtaggtcttgtgagttgctttttcttgttcaatgaaaagaaatcttacgacatatactacctctatttttttatttgaagttgattaattcaaaataaaactaaatcagaaaaaagccacgaggaaattagccatgcaactacatacatggtaaatcaaatcggtccgctaacgaagatttaatttaggagttggagctctataaaacatgccgtaaggctttgagctacttggcaagttattcagtgcatataaagcattatgtactggctattgctaccatatatcatgtgtgacaggtgggaccaaatattatttatatcttatatatttatagttaactattgtatgtttcaattgactataaatgatttggagctaggtagctatactattcaacttgctcttagtagagattaatgttgaaaaattaaagactttggccctttattaaatgaggtattggatagtaataaaaggacaattggggtaagatagagaaaaaaaatagtacttcctccgtcccacaatacttgtctttctagcattcaaaagttgtcgcaaaatagttatcacttggaagtactacttatcacatcaaccactttcaattcaaatatcttctcattctaccctcaaccaccatctcacatacaactatacattattatctccgtttcaggttataagactttctatcattgcccatattcatatagatgttaatgaatctaggcatcatacatatctagattcattaatatatatatatgaacgtgggcaatgctagaaagtcttataatatgaaatagataaagtatttattaagagatattatagtttttttctcttaaccttagtacatgctaaacaacctaaaatgacatgtattataagacggaggcaggattactactccataagtaaagtgattgatgggacaatcagtattataaaatatttatatttgtagataaattttaaatgttttaagtacttatatttatattttatatttatatttgtggatagaggtagtacctgatttgcacatgtctggttccctgtatagtttgctcgggcctcgggaagacatgctgagtgcctaaggtgagagaatctttactaaggtccagttcaatctgaattgtgccaggtagcctgtcgcatgtggagacagccaacaaggtgatatttatcgatacatgcattacgagtgatcagacagtagaatggacttctcgtctataataaaaacataaactcgtgaacatgaagaatgttgagttgagttcgttcgacggtattctttgggaaatggtttagccaggtctacaggtcattttggtccaaccaaggaagctgtaggagtaataatattttgacaaaatttgttctaggataattagcttatgttcttgctgctggaaactttaaaaacgtgacggggtctaggatactcataaacatagtaatttactgagggatattgtagccattattttattatttatgagcaaatagagggaaccctgaaaaaaagagatgttttttttaatttgcccctcgagacaacaggttgtaatacaattgtgtgtggtttaaatcagacctaaagccatattcccctcccaatgccctcaccgaaacttagaaattggtggtagcgggaatggcggcagccattacaagctattgccacatgaacaaacttgtcttttctaaatattttttactccatttggcttggaaataatataaaatagtagttgtggtgtctcctagcacattaggaggtttttaggtgtcctataaatgtttcacttttttaggtgttcagtagcaaaggaccatatataaactttaaacgtcttgtattaattttttcctcgtatttttagttcaaggatatgctaaagaaattgctcatagtgctagctaatgatgtcccaattaaatcaaatctagatattacataaaatatgttgctaatttctattggaattgtgcttgtggtgagatccaaataatatatcttgtggtgttgttttctcctgaagataaagatgaagatgaagatgaagattaggattaagattaagttttttacctaaaacgaggtagtattaacgtatgatgattgagttttaattattatataaacttaaaaaatagattaatatgatattttagagaaactttcatatagaaagttttttacgaaaaacaccgtttactagtttaaaaaatatgccaaaaaatcttaatcttcatccactctttttggagaaaagaacaggacattgctcctttgcagctgatgcacattgcacagctaggcgcggccgcgcggataccgttctgccctgcaccactaggccggccggcaacatgttcttcgtttctgtgatcgtcgggactcgagaattggattctccctcacattaggcggacgaacaagccatcccgtccatccaaatcgctggatgcgacgctgcttgaccttctcgtcatcattcatcagtgggctgtctaaagcggttttcttcgtggagggctttcccggtgctggctgcctttacctttcatgagacctggacacatcgaccagcaaggtaaaggtacgacaaaaggaggtgagcaacgttcctccactagcccacgtgtcctctcctgtggctcccacgaccggggtaaccgtgtcacgctgtatatatcctttagagcttaggtttgacactttagtgagactacatatagagcaagttagatggtactagaaaagggaattaccgttggttttattttgaggctgtgtttagttcccttcaaacttctaacttttccgtcacatcaaatatttgatatatgtatagagcattaaatatggacaaaaaaaaccaattacacagtttgtatgtaaattgcgagacgaatcttttgagcctaattatgtcatgatttgacaatgtggtgctacagtaaatatttgttaatgatggattaattaggtttaatagattcgtctcgcagagttatagaattggttttattattagtctatatttaatacttctaattagtgtttaaacatccgatgttgctgtatctaaacaggccctaggttacatcgtttctctagggttccctttttcttgggtttctttgccgggtcggccgaaggaaatatcatttttctaggtgtcttttcgttttctgagggggcgctccgttgcactaacctgtgctgctttgaactctgttggctcgtcctatttctatgtgcgtgagctgctgatttctctgctctttataaaagtcgacataggtgatgacggttcatgggatttagagtcgcacgtttgttttttttttttaacaaattggagggtcatgcatacacgatactgacttataaaatagtatacttaagatttgaaggcttaacttcataaggtgcacggacgtgttttgaccatcacacatggactttttgagacgcaaatattacgtatggaactaatattaaataattagaaggggtaaaactttgaacccaaatcgtctaacccaccaccttgtagagctagccgaaagatccctatgcgttttttactttttgagattaaatcctaataaaaatatgagcacatgtgtcaaatttgagacctaaacctaggtgaccttgtggatagattttataatcaaggattatgaacaactgaattatgcccagttgatatccattatattatatatggccttatcgttccgctgattagaggaataggccaaacgacatatttacaaacgaaaaaaaattgaattttttatatatgtgttctcaacgatttaaaagcaaagattgaaaataaatttcgattcaaaatcacaaaatcaactccaaattaagattgaaaatttaaattttgattgataagtataaccatgtataagcgaaacaatgatgcttatattactttgggaatcttgtagttttttaccaagctcttttcacgtggtaatgtcggctgcatgcaatcgcactctcagataccctcttttcgtttggtttcttaaacagagcacttgtatatttgatttactttcttgtgaatttcgtatgaagcacttcctcttcctcaaaatataaccatgtttaggatttaaaatctgtaccacagtaatgttttaggcagtgattccaattcaaagacgaaatatatgcagtttcaatcaatcaagtggttggcagaggaatttaagcaattttagaattcaaaatttgatcattgagtaatcttaatatttgccaaacaatttagaaatgctcatattttaagataaagggatgcttatattttaagataaagtcatgataaagttccatgacgcatttattattctttttctttttaaattggagaggcacttcaaatccaagagaattgctcgtatttacggctactttttttttcagtggtaggcaacgacgtaaccatcatagtgactagtgagatacggtcatttcgttaattttaaaatatattgtgcagtcttttgagatatttataaagatatggtatgtgtgcacgtttgtgaacacctgcgtttgtcttgtatatttttgaaaaatggtactaccgtgcaatggtgctgttggtgcaagcatgacataaaagcacatggcggtgatgagctcgtctcaaggtgcgcaaatgcaaatccatccaacagccaaacctaaagatcagcgtaagcaaatggcccaaagcccatgggcttcgtagagggcgcggcccaatcttgacccattctgctactctaggccctcccagccagagcactagagcagtgcagcgcggcggcgactcggcgccggcgtcgcctccgtggtggagctcgccggcggaggatgcctccaccgtcccccgaccccgctcctcgccgtcctcttctgtcagttcctatatcctatcatccttgtaggttacgattttttttccttccacatttcttcgaattttcttataatcatggtgcttagttagggctcaacacaatgcccatggccgatagacgtttacgcgagcgagcactggagcgcgatcctttctccgttcgtgtgatgaagattgttcgcacactgcacacggcctaagcgatgtcgataaatttctccctttgcacttttgctttgccaatcgtgatttggccaatcggctcgaatcaatgaactaatgtggaatctctaaaaaaagcttgataaattcctccttttgcagttttgccaatcgtgattcggggtcaatcggcccgaatcaatgaactaatgtggaatctctaaaaaagcttgcacgctctggtccttgtggcacgtgagcactcaagcttctcctcatttcaggatgaactccttgagcctccccaggaacatcaccaggataactatcagcttaccctcctcggtccacctgccgacgaacccgtaggaagcatctttgcaagtggcatcaggcttcaacaacttctggcaactgtatcctagtgagtagcctacattgccgaaagcgctgtggaaataaaatggcgttatttctgtttgcttgtaagcaaccaaaaaagaaaaaaaaatgacaggtcgtagatttgatatgttcttgcaaatttaattatgctggttcagtggttcttagtgatcatactaggcaattcggattttcagtgatgtaattttgatgtagccatagtttctgttatgggcagacaaaaaaaaaaggatgtgaacttgcctgattatctcaaaaactatgctgaagatgttgaaatttagtggatcagaagaaattgacttcctttctgttatgcatgccaggaatgtgaacattgctaaacaagaaagcttgttaacggtaaaattcctccacagtgctctgctaatcgagtttgtctttttatctgtcaagggctggttatcagcattggcagtgagaaatgaagcatcggaaggaaggtacctgcaagcaagttgattatctgttaacaaggagtaggaaacatgctgttccacataaaacatgttgtatgctgcctacttttcatttaaacccttgtcagaagttctgtcctatttgttcaaagtagtctcactttctctattcaacagtagttatttagatgcagatttgaagttcataactactatttcggtgacgtataaaatcgataaaacctagcaagctgcagtggtcatgaatgcatgtgtttagtaatcttcaaagttataaatgatgaagctatcaaattttccaacagtttctcctgataatttgttatgttcctgtaataactaatctaagtgttctactgatttagttaaattcattagaagacagggtttggaggagatactaacatgacgactgcaaatagcaacagagttgatggagaaagtgttgatatatcaaggatagattcaccggcttgtcttgtattaacactctggaataataatcctaccaatttctgtaaccaattcattccctctaagctctctgagttccactcaaacgagcaaataaacattacttgcagtagaatcagtccagtaacactcagaacaatgtaaacagaatttctcctcacatgcaaatgtttgtagccagtctccccaggatgctgaaggatgtaagcatactctgcttttccactgaccttccccaaaacccatacgcatagccgcaagagtggtgaaaacaaggtgttgcctgctagaatctgcgggatcactaggagcaaaaggacccagttctttctgaagggttgcatgttactatttagtggcgtgaagccacagtttgcgaacgaggacactgctgtgaagatgcaaaaggtatacatattgatctccttacttttcagtacatttcttgcatctgaatcaatccaaaagtaaataataatgatgacagaactggaaatgacagtagctacgaaataacctgtcactatgcgaaccaacacagcgcaaggattatatgttatgcttttgttttgctgtacctggttttgcgacatagtttcttctgattggccacattccgtaattttgtgatccccattgtttgcaggactgttgaattcaatgtccaagctgattgaaggtaaacttctctggctgttctcatttctgttggcattggcattgttgaagtagagccctagcattgatgtgaacacctctcctcccattagcatcagaaggatcagaacccagagttgcctgtcagataagtcttccatctctactgttgccatgctcgagacagtaagtgtagacacagaggtgaacaataggtccaaatcctttggacctggcttaccctggggcttgagattcttcagagcaaggaaaccagcaaatgagattatcacaaagtaaacgagctgaactaccaaagggttacttttgcaaaccagaaaactataagattgtttgacagaacttgccacacatctggctctggaaatgagcttcatggacaggaacccacagagatgctgagctttctcccaatagatccgaggcacctccgaattcggtaacaggagcttcatggctatgtatagtttgatacgcttcaaggtatctagcactaaacttggtggatgcattcttcaacaaattttttgggcttatagaaggtggtattggagttggcaacccatagtgtgtttcaatggcatatttggtaggtttctaatattgttggtacttgtgtaacgctgcccaatgtgaggatgctctgagcttaatatgtaggatgaaacaatcaacattggtggtgtgtactttttagagtcccaagtgtttggtctatatttgtagcaagaggagtacgttcagttcgcacaacaatgatgctgatggtaccttagttagcatattttgtggctgtggaacaagccaatccagggatttttggtactccgaaaaggactcgtggcaatttttcctacaacaacactattctcttgattaaaatatttcattttttttttgttacagattggtctatgtgattcccttcttcctgagcagtcaaggaagtcgctacacttgccagtgaagttggtccatgcatctgtgtgcagcagctgtaacctatcgacaattcgggacctcatccgcactggtaaaatgtacaagcattaacactagtgtcactgaatgtttttttatattcttctctctgatctgaacagttcagttcagaccccagttcagtcggaatggatacagcatgcaggtgagattggcaaacggcaatggcaactgatcgatcgagcagccgaaagcttcgatggaccactgtttgagtgatcggacaataatgcagtggatcacgcagcaataattgagagaatttttttcctttgggctccccgatttagtggctgggagagctcatgtgcggacaattcaaatccgtcagctactacgcgttggtttgtgctttgattggctcaccatctcttctacttctgtatgtcttttgcctcgctgaaaatctcagctgctattgagctcccaattgtgccactgacaggtacatgtaactgtttcttaacgacattgacgcgctcacgcgcatgcgccgctgcactggacacgcattgcacgctgccgcttgctttctatggacttcagttaaagcttgagcgtatggctgaagaggagtaagagaaagtcagaaagattttatctcgacttgttagcacgtttttccaaattattaaacttacctatcaaatggtatgtttcgttgaaaattgtctttgctttaaaatatcaaataaatctatttttcatgtttaaaatagggagaatagctaatatggtcactaaagtttcgctcctgggtcattttagttcttaatattttatattgtccaaacaagtcctttaaatttgtcatgtgggctaatatagtccttggtcccaccaaaatcgccacatggacatgccatgtcaccttcctatgcaaaatctatatgatttgtccaatttacccttacgcataggaaaataaaaaacaaaaggaaaaagttaaaaaaaatatatggtatatgcaagagcaaaaatatacctcaaaatggtgaaaaaaggaagtattttttcctatggttatgtctaattcacccttatatttatttttctatgatatacgtaagggtaaattggacaatttattatagattttgcatgaatgatgacatggcatatccatatgatggttttggtggacccaaagactattctaggttttatgacaaaggttaaggatttatttagaccatttaaaaggttagggactaaactgatcctacagagaaactttagggactaaagtagctattatctctttaaaataattaaaacttaggacctgttcagatagatatcatttcaaaccataccaatttttggtaaaattgtgaaaatatgtgcatctatttagtttcttactaaactctgataaataagtaagaaatcctactaaaactttggcaatattgtcaaattgccaaaaatttggcaataccaaaatttggtaaggtttattttggctataatccgaagagaccattaattattcatgcactatagttcaactttaacctgttttttccacagcggttttaaactgttcaaccagcattttgccaggatatttgacaccctctcaaggatctgaggttggtagagagaatggatttggctaacatggagtaccggccagcatgtatgacagatgtggacacggctatttgatcgatgataggtaacatgatgtggaagaaacatgatctttgtttccttctgctgatcaataatctttgcgtatgtggatgccgcccccacgatatatggacgcacaactagcagtgaacaaaaaagttcgaagctgatgactccgatcctctcgaattcgttgttttaataagtaagctaagttagctgctcataaattgcccggattgattttctttacggaaaggctaacgatatattgacagaaaatctatctctaaatcttgcagattttgaatcactggatgaactttgcgattcgtgctccaggccttatcctccaactccggcgacctcctcttcttctccggcgccggcgacaccctagactccggcagaggaccctacgggttagggtactaggttgggatgggggtgggagggggagggggaagagagaggag

SEQ ID NO: 27710 - DNA, 1180 bp, Oryza sativa
acccgggatcctaacccgtagggtcctttgccagagtttagggtatccctggcgccggaaaaaaaagtccccggagttgaaggaaaaggcctgaagcacaaatcgcaaagttcatccggtggaccaaaatctgcaagatttggaggtagattttcagtcaacatatcgttagcatttatcggcgaaaaaaaatgagggccttaaatgtgttgggctgatatatagcccacagtttattgggcccacttgaggaccaaacattagctctttaggcccattttttaggcccagtcgttggggaagcccgacgatggcgagcagtccgccgcaacagccgacgacggcggcgggaggcgccggcgttcttcccgccgccggcgcgcgcggtgcccgtcgccctggacgcgatcctgtcgcggcgcgtgggagctcggtttcccgccgccgacgatgtctccctctgcccgcctcgccgcgccgcgcctcgccgcgcatccgaggacggggacaagcccaatcaatgccctgccgtggcggcctcgccgccggccacctctgcaacctcgcttctcctggtagttcccctctttccatgctctgcatttccctgatctgggtgcccgtgtttttgctctcgtgctaatggctagcgaaatcaaatcccaatgcgtaatgcgatacgatacgcgttcctcgtacttttcccctcggtgaactgatcacggaatggattctcgcttagcccattcgaggctctcgcatcgcattcatgtaatatcgattgaattcctaccgaggaattggatatcgagacgaatttcgtttccccatgcttagggtgatatgatgatatcaactgattgatttacagtttacaccttcaaacttttttgcttataatgctcgtgatcgtacagtttactccctactgatgtagtgatgtttaattacatggacgttcaagattttcctcctgtgagggtgaactttttaaacctccccaggaacatcactaaaattatcatcagcttaccttcgtcggtccacttgccgacgaacccatatgaagtagctttgcaggtagcatcaggtttcagcaacctctcgcagctatagcctagtgagtatcccacattggcgtatgcactgtgaaagaaaattttgcatcattgcttggaag

SEQ ID NO: 27711 - DNA, 1579 bp, Oryza sativa
cttcagtgtgctaagcattgttgtcgaagttgtcaggcaagtcagactaaatggtttcttacctgagaaaaaaaatgcagaccaagtaaattaacaatttatctgatgaaaacagcaaaacacaaagtaacacttgtcaggtatttctgaatcttaataatacacaatgaaaatagtaatgttttctttcgtggaatctgacggatctgcccacatttgcagtgcatatggaaatgtggggttctcaatgggctacagttgcagtagacagatcaatccagaccatctctgcacagataaatggactggtttcgtagggagatggagcgactctggcaaactgatactcatttttgtgatgttctttgggaggctcaagaagttcagcatgaaaggaggcaaagcctggaaacttagttagatcttagatgcagtaccagctgaacattgcaggtccctgagggtaggaaaaaagtataaagatgtactctttctcttccgtttgtttgtatattcattttcacatagacaggaaccttccactgtcatccttgcacaaagctcaccctccactccaagtgttggcagtttcagatcaggtgaatgaaagttcatcacaagaaatcaacataggctaattaacctgattcacttcacatagagatgcttctgtcactggctccctgcaatgaccatttattgcatccatgtaatgctagtaaaaggccggatgtcattgtgatggctgcaatacttaaatacccacatgttaaaagatatgtagatgtctatcaagtggtgatcagttcatacagtacgtccagaagtactttcttctgaagcaagggcatctagaagaacctgagagctgagatcacaaagattgaaaaaacactagattgcttatcctagtcactacacttttctgatagaaattaaaaaggacacacgtgcaaccaagggtgcatcagtgaaaaaaagagagaataaaagggaaaagggaaagaaaatctccactacacattgtgcattctggtacacttgttcccactacagaagatgttgattatatagcaataaagcaaacaatctagtatttgtggaatctgaaagataaacctcagctacatacaaaaataaaacgaggtaacaaattgtaatctgttataataaatatataaatgttcaattaagtgaatgcaaaggaaaaccaaaattagccataactttgataccagaatcttcaacaatggactgaacagcaatatgcagtagtaaattcaaaataatggttactataactaaatttcagtatcatgatacacaggtgaattctattaggaaaacagggacaaatttgtagtccaaaactagttgcacatgcaacattactgatttcagctaaagaagaacacaactaattttttacaataccgtatgataataatagattaaaaaagagtgaattattgaggcagagcaggtttacgtgtgaagacaaacagctaatctaaattgaggatattcttatgactcaaaaaatgtgaatgaaggattctaattgctgacaatcatttca

SEQ ID NO: 27712 - DNA, 1110 bp, Oryza sativa
tgtttgcagctccttagtcattattatttttgctcagattgactcagatacaagacaactcctgaagagtaaagatatcaaaatatggacgttttccatcttcacagcagtatcctcatttgcaaactgcggcttcaccccggtaaatgataacatggcaatattcagaaagaaatccagtctataacttctggttaccccacaggttctagcaggcaacactatattatcgccactattgaggttaagcatatggatcttgaggaaggttagcagaagagaagaatatgcctacatccttcagcatccagaggatactggctacaggtatttgcaattgcagaagaattcagtcaacatggttctcactgttggggggctagttctgctgcaagtgatgtttctttcctattttgagtggaactcaagtgccttaaatggaatgaactgatttgaaaagttggtttgctcattgttccagagtgtgaaactgtgaatacaaggcatgctggtgaagctgtcattgagtccaatactagttctatttgcacttgtcatgtaagtattccctataaacatttcataatatttattattttgaagcatttatcaggactttcagaattttatcataaatatggcacaatcaccatcagtaactgcaaaggataaattaagcacataatttcagaacgaaacaacataaacaattatgagcttaaaatcttcagatattttttggttgaaattgcttagttatcttaataaaggaacacaaaactagttcacttgttgaaggccagccttatgttctcgcaagagtttcagtttaaatgaagttctagataataacatggaagtatgaacactgtctcggtgagaaacatacttgtttactacagctaagtcagcaatttgtgtactcgaaaaagaaaaaaaagcagataaatgcatagaacaaaatcaaaacaaccataaaatcctgcactatgacagaggtcacaacatggcggacaagaacagatcccacaatccagatagtcaattcatcaaaaaaatagaaaagcatgctaatacccacgtaaacttcaatgacaacatgccattaac

SEQ ID NO: 27713 - DNA, 6567 bp, Oryza sativa
tttttatttttcccatagcttttgcttcacacgttgtttgcaatgtgactgtcaacatacctgtctgttaatgtcaacactaacatgatctggaatttttgacagaccattagaccaagggtgacatggacgtgtgaaaatgtcaggcaagcaagcaaggctagctgtggactatactattgttaatccacgctggaagcttcacccgaatacggcatgtggaaagggatatggttaggtgtgttaagttcacgtcaaaattgaaagtttggttaaaattagaacaatgtgatggaaaaattaaaaatttgtgtgagtagaaaaattttgatgcttgaaaagttgaaagtttgaagaaaaagttggaaactgaaccatgccttacttacactcttctattgacctaaatatcttgtccatactgtaaatgattttatccatgtattattatatttgtgaattctcttatattttagacgtagatagtagttgtagaaaaaatgcttaagagtttgcacgtactgctaatttatgggtcaatctgggtacgccgtacgcttgcttcttcacgttaagaattgcagcattgttcctggagaaggaaaatggcgaaaggccgaaagttgcatcgcatgtgttacatgcatgcatgttttgttgaccaaagcttccgtccaagaacgtgatctcagttttcgtttccatttcaagcgaagaggccggggccctctgtcactgtgtcacatgcatgattttttttttcgaggaacatgcatgatttgttgaccatgcattaggcctaattaatcatgctgccagaggaccagtggtggtggttgcattgcatgtatgtagctcaaaaactcgccaattaaaccaaaccaaattgctgaacttgttttcagaaactggtaatcagtacaagacgtgagatgcacgcgtgttggattaagcagctaccgcggtgtaaatcagccagcaacacagtttggttaggacaaattaaaagattctgcaaatcagcgcttatcttcaagcgcggtataagaagttcacacggttgatcccttgtacagcttctactgcctctcactgtctggacgatatttcccacgtttgggcagaccagactctcaggaggcgacgacgcgatggcagctggtcagtgcatctgtgcatgaacgagcaggtttgatgccgacgcgcagcatgaagaaattcggcgccggcccgttgttgaggcgcgcacgcacgtttgatgcaattgatgcgtgcccgtagtccgtagagagagtgagagactggctgaagcgtcaccgagtccacccgctgtcttacgtgggagcgttgtagccgcaattggcaattaaaaggcacagctctagattttaaaattataatattagacttaaaatttatatgttaaattatagtagtttgaaattttatatttcatctaaaatatataaatacaataattcattcaaatgttaccaacgaaatcacgaatctaatatatggatttgtgaagctaaatcttgatactcgtctaaattcataccccatcccaaaataattttatttttcaccgtcttattatcttgaaataactttatctttcaagcaatcattgtatttgagtttgtgaaaatgagaacaaatgcattaggactagttaaagcaaaaggcaattgcattgagatttgattaaaaaaaagaacaatagttttttattggtacgtataagatgtgtgaaaaataaaagagtaaatttcagaaaactgtaactacagtgacaaaactatcgtttgacaaaactatcgttttgctacaacattagtgacttgtttcagtttgctgcaacaatagcaaaactattggtttgctataacattagtgacttatttcagtttgttgcaacaataacgtgggaaattatcacaaaactacaaacttttacgtgctatactgctacaggacatgtaggtgacaaactgtatcagcatatcacgaaaagttacagttttgtgataatttctcatactattgttacaataaactgaaatagattactaatgttgcatcaaactgatagttttgtcactaatgtagttttctaaaatttactcaaaataaaactattttgggaaaatattttgtgatagagataggtaccataaatccataatggcactcaatcaaatggtttaacccatatatggatgctcacccagggggttcacaacattcgctacctctcgaagggctaggcttggagcatcctttttctcgtagcaagagtctagtggggaagtaaaatgcaatccgtttttatagaccgtgtttcaaaatgtcacaagtcgggccacgtaatgaaaatacaactccacggaagcccccgtgtaaccaacaacatatggacactgttagatttacatgacagatcaataatgcagggagcgcaaacaagtacagaaatataaactttcatggggttattggtcttcgatttatactctgaagtttcaatgtgccccagaatatctcatcgtgctctacctataattccgttgcctaaacagcctattgccatgactttcagcccttatactgctacaggcagaatcgctgctcctgtcagaaccttggatcaggcaggtcaaaaatcagagggcagatgaaaaattcctgtgctctatggttcaaatctactcttgtttcccctgcttcctcccgaacggtcgtaccgtcggtgttgcaatgcctactgagtgggctttgctattgtcatttaaaggaccaattcgcaatgggtgggcttcggtattgaagacccactcatcgaaggatatgactgatggaggagagaacaggaggtataggtacttgagagtctctgctaggaagaagctttgcatcatgttatccttctcgccagtattcacctggagaccaaaatatttgacaagaatttgtgtaagtcttacactagcgctcagtgggaatttaagtatggatgctatcataaaaacaattaaaaaaagcttacatctctcagcccaacgtaaccagattctatgcgggagttcttttcaaatgcctggaatatgtcccacccccagtcttggtatgttttgttccccgtaagacgccacaagtacataagtgattcgacagtctcaggtctcaggatattccatgatgtgcccacgttcatatcctaaattaagaagctatcatttagagataaatgatggaatagtacgtgattattatagagaataaaataagagctgccttgctacctgtccagtatggaaaaaataattctccccagccaactttgtaggagttgtttggtagaagttataacaggtccgagcaagctaagaagagaacaaaaaattatatcaacaaaaaaccatgtctgtaattgatcgatttggatatgagttgactatgagacttcatacacattaaagttcatagaacgaaaagaatattagacatgaagataaaaattctttaagtatctagttaacaaataaggatttaagactttgaatatacaaaagtgagaattcctaaaggacttacctctttcgcaagattcataatttcttcagccttttcagtctcctcatagccagaggcccccagtgccagcataccaggggcaaaacatgcaagctcatccatctgtgctagtcacaagccgaaccagtgagaactcccgagagagaatgaaagttaagtccaaatgatcctcttgttgattacagccaaccaaatgggattatttaccttgtcagacaatgaaccaccattcttctcgcaaatgtagtagtaattagagggtgtagtttttttggtcaagcttagtaggccttccattgatgtctcccacatttgtctagtcaaaaatcatataaacagttatcaacatgctaaatgaaactgtatggaatttccagtaaaagaaatcagtgaagggaatatgaaaaggtgaaaagtgaggcttataggctcaaacctgtaatgctttacatgctcagttttattcccctggacccaaaccttgagcaagtactcgtagaagctgaaccacaaatgtagttagctccatttttcaatcattctacactcactaaaattagggtatgcaacagaaaatttatgaacaatccaatagagcaagttgcttaaaggtttgcacaaattaacatggaaagtactaatgttaatcacagaaggaccactatgttttcaggaaggaaatagcttgtttgaataagtgagaatagaagtataacctatctcccattgcaccaaatgtaattgttgagtacgacgcagttcctgaatgagggtttatgtatatagggagtaagccatcgcttgggtatatcttctgaagctgtctgatgacattctctgcctaaaattgtattgtatcaggccaaactgtgagttcaatattaagaaagccaaaaagagattttcaggcaggatttaaatttatataaattatatacgggcagatgccattttttgtagggctttgcttacgcacactggttagcaaaatattataaacattaaaagaaaaggcagtaataaataagtacgggccaacataaaccaatgatgtaggatacaaatttacattagggatcaaagtttttgatggaactcataccaattgatttgatccatgcaatagcatgtcaaataaataggataaggaacaaggttatttaggatctataagtaggaccaatataatcaaattgattatgatttggatatattttctatttccaacttataacagccttttctttgagacactattttattcttgaaaggagatctaaagcaaacctggcgtcatctgatagagagaagtcagtatatatacttaacccacaatactggggtcaagctaaattcaagaacttttcaggggaagaacatttgtatatgaagaaggctatgattttgaaggccatccagaaaataaaacactttaaatatgacttatgaactatcacaaaaaatcatttattcccgcagtcatgatttgagtacttatgtgtgtcacaaaaggaggcatcaaggagatttggttccagtggttatgaccatagcatcaagtgaaaaagggatgcatgcatgcacatcaacaacaaagggaacaatcaaagtattatatatgattacaaggtcctttttgcttgctcaagagtcaagagccaggtggttagtctcacgtcgtggtttggtttgtgggtcgtggtcattttatctgtttgtgtttgtggtcgggtttgtgacacgcatggttcctagaactcagtgtgtgcgtgtttggttttgcacgcgtgttctaccccctcttcttcttattcgaggaaggaaatagaagccatgttttgcacacaactggttgcacttaatttaccaagataattgcataaaactggcaggatgtatgaaatatgagtaatctgtagaaccttttgttgatacttgggatcaccagtcctctgtgacaaagctataaattcaagttgctccgtgccagaatcagcaaggatactatcaccctgcagaaacacacaatgtacatggttcaccatccaaagagagagaaaatagtttcaggtcaaatgcatttataaacaatccattgagcaattattgatgtgtttttataaagattatgcagctctcttgactattcgagaaaaaagtgtttttacaaagatattggtaatatcacattaaacttctaatttgatcagtttttttaaaaaaacttctaatttgatcactgtggagataaggggctgaaacaaattataaacatgatgaattaatcataaagatgtatgtgatgacatgtgattcaatccctcgaatgaaaacagagctctaaaggaacaacaaagtttgcatcattatgaagaaaaatgggatgctgtgaacatggttaaaacagttagctgtaagcttcagtgtgcttagaaggaacactccatgtaattgactaccactagcaaaatagaatctattactcacattggtccatccaggattatgggctcgtccatgagctaggttgattctattataagggataccagatggtgtatcccaagcaggtagtagacggtcagtaatatctttggccttctcaagaaatactttgtcaccagatagatcatatgcactgaggaggcctccaacaactctgaatataaaaataaaacagaaacttagaaaaaactagatatacttttatgttctaaaaaatgtggtctgcctacatagcatcgatcaaagaagtcaaatattttaagaaaaaaaatactacaacaatagtaaaccttataaggcaaccttatggtcgtttcaaagacacttgcatcgtaatccttgtcaaagcttagtgaatcggccacccagctggcatcatgaaatagacatcgactgaattagagtatgacataaatcataagaagatactccactctgtaatggagctataaacaagcagattag

SEQ ID NO: 27714 - DNA, 6238 bp, Oryza sativa
tgcaagtagttcatcaacaaggtaatattcctggagctttgaagccatcaatagtggagaactaaatcataactgcgatatctttattcaacagaaaatcgttgaatctgaactgcaagatattttcctgtacaacccaatatctgccatccgtatattcatttgcatttactagcactagactgagctgttcaacaagcagcatttaagacaacctcgcaaataccctactccctccggttccattttaattgacgttttggacaatgacacggtctacaagatacatctttaatcttacttttctattataatatatataataaataaatgcatgtttatttttattatagtactttaaaagacaaatctatatatgttgttctagttcttttaaaccaaatatttttaaagttattaatggttaaagttataaaagtttgacctcaaccttgtccaaaacgtcaattaatatggaaccggagggagtaccttgcactttcacaagtataatttaaagccattcatctgtagcacttcagaatgaacaattcaagatggtgacgaggcacctttcagatagcataccttacatttgtacttttaagttctaaattctacaaggaactcaaacaataagagtgaacagaggaatatcaaaagtatatgcatactccaggagataagatatgagttgactcaaactgaaataaaacatgccaacagcccaacagacccatgtgattttcaaacagaccaactaatccatgttttcttatggtttacagaagagctagattgacttgataaatccaaaggatgaaaattgatcaaaatatacattcatgactcatgtgtggtatccttcaaattagctgattacttacaagcctcaatgaacaagtgggaaaaaacaacctaaccttaatttcatcttgtcaaacttaaattgacataacaccaactacatctctgacatttgttttctcctcaaaatacataacactataggaatttgtgatgatatcctcctctaaaataatcacaaaacagaaatttttagattttttagactacaccaatctcagtgagtatgctgtaaactaacacatcaaagagcataaaataacccagttctccaaatctacaccttctattagtcctaaaacatagaaacgtaaaactttacttccacctgaaataaataggaatagttcagaccttcccatttacttaatttaacgagaaatcgagactacgaaaatctcactgtaccaagagtggccgagtacctccactaatccttaaactaacactgaaagagttcgaacattttaaccgaattatcatcacagctgagctaaccagaatgcactccatgtggttgatttgcaaacttccagattctcgtcccaccagtaatccacagaacacaacaaaaacgaagactggatcctgaatcctggaaaaaccacactctgctccgcaagcgcacatgtcccaaaaccacccgcacaagctctcgatactcagatccagcgaccaatcatcaccacaacaaacaaaaaaaaaaggaaatccgaagctaaggcgggcagcaaaaccggtcagatccccgccgcctcaacccggatcaggggaacttcaacgggtgggagaggaggcgcgaacctcgtactcgcggacgagcgactgtcgatcccagaaggcgaaggtggcggcgacgaagacgaagaagaggagggcgaggcgcttcggccgcttgaggtaatacgccgggttgaggtaccgccacgcccccgacgacgacgaggaggaggaggaccgacgagccatggacggacgccgcccgcggggaggagatcgccggcacccgagctcgccacctccggcgaggtctccggcgattcgcgcgtgtcacgccgccgcgtgggatgtgttttcgtgtgtgtggcgtttgggggtcggacctcggtggtggctcggtcgtcgttgaacggggcctactgccggtaaataaccacttggtcattagagcaggtataatagcatatgctataaaccagctgtaaacatattttaaggagataaataaagagaaagaataacagcgcgctacagatttatagctagctgcagcacggactccaagacgcaaggtgtgtatgacaggtgagaccaggtattaatagtgtactattttactattgtatgaatgagctattagattgactatagataaattagagctagtagttggctatactattaaacttaaacttgctcctatacactgattttccccctttttaacttacagcattcctctttttttttcttttgaaaatacttcttgtccttttctcgtaacaaattgatgttattagctcattcatgttttttttacatagtagacttaattaaatagtataatatatcaacactatgttaaattaacatgtgtaccattttcggccgcttgtgtttttttaagtgaacaacgccccaagcaatgtgatgtttctatcaatatagtccttcaattttgtattataagtagtttaaccgttgtggaaatataggctgatttgatttgatgccctatcaaatcattggtagtgctaaatcttagttatgttttgacactatcaatgttttggtagatttagactatatgaattgtattagctatggcaaatattgacatcaatccaaacatctacaaactactatttaaattgccaactatttggttgggcaagttttagcatcaaaccaaaacagccctatatcccatgaacgctaatcagagatttccgtgtgagtgggggcgttggcttgcattacattagcatcatagcgtgaaatcccactgtttcatgaagaaatgctagcgattgattaccggtgaacatactcgtttctatctctccattttagtttttctacataaggcagagcgatagaaacgataaactttttgcctctccattttgattttatgaacgtagacagcacgccatgtgtacaggtgggtaggagggatcaggtacaccaaattggtcggatggagcacgtttttgacgttgggtctcacgcttcggtcgtcgcctcgatcaactttccggctcaaagtgctctgcaacagtgcaactctacactgttcgcatcacgggcccgcatgctcgacatgctctgcacctttggtgcatggcaacctactcctctcacaacacaacgaccatacatgcaaaggaagtagcaaaagcagcagcagcttacgatgttatcaatcggaagtagaagctctcaactactagccatcacgccgttctcaacaacggggagcgcgaagaaaaacacgggccaagtgtcattttcgaccaaactactagcgccattcttgtcagaatcttcacggacgttcagagctaagaacagggacattcacaagcatttgtcacagcctacagggccgtgcagattaatgaaagatggggaatatacagcgtacaggttacccgaagtggcagcattcagtactatttgtcaccaatccttcagaagtgcaccggcgacgtccttgtaactgacctttttcttctttggagcaccagcagttggatctggggctggaaccccggtactctgtgtggagcttcctgcgtgtggtgccggaacaccagaactggatgcagaactcgctgaggcctgtggcactggagccacgtaactggatgtggagcttcctacccaaggtggattcgtctcagctttggcttcggcaaccctgttaccaacgtccgtcttcatctggccaagcgatggaatcatgtccaggagcattgcgtgcagcggatcaaccatctgttccatcttctcgcacgttgcgctactcgttgtttcagcggtgtctcttctaagaactgtttggttgcgttcgtgttttgggctgcttggtgtctccgtggtactcgatttgattcctttgggctcctgctcatccaatgtgataagctgggcacctggaggtggttcttgatccttgtcatgggcatgttcttccatcttagagatggaatctgcgttcaacttcttatcatcttgacctgtttcaccaggacctgtttcacgatctatctttgcaagccactttcctctttgagcccttgatcttcggaccactctaggagcggttggatgtgccccctggtctctgtcactgctatcttcttccatcttagagatgtaatctgcatccaacctttgatcatcctgtcctgtttcaccaggatcactttcttcagattgaccataatcgattttggcatgctgttttcctctcctagcccttgttcttcggactggtctagcagaaactggtctttgtcaaagctatctacttccattttagagatgttatctgtgtctggtatttgatcatctagacctgtttcaccatggtcactttcttcaggctcaacatcatctatttttgcatgttgatttcctcttctagctcttgttcttcggactggtctaggagcaggctttgcagttcttgaggcactactggatggccttccccttttccttggtgcatgcttaacatgagatgtatcagccttctcattttcctcaagcttgtcattacaaggctgaacagtttcctcactgaaaacaaaacagaaacttcagtaaaaaataaaagatcgataacaataaaaaatgcagatattgcgaatgctgaaatacaaccatcccgcatctaccttcgttcaatttctatttcttctagtgtatccggtttaaggctgtaagtggtttcaggcagccttgtttgtttttccactgaatcttccaaccacttgttactgacaacctgcaatcttttgtcatgtagataacgcctctcggcaggagggaggctgcataaaccagtattttcataagttttcaaatttccagctgtcagtgtttgaagaaagaaattcttctatcatagaacagaccaaaaaaaaattaataaataacctcttgtacagcatgtcaaaattgtaggcttgtagaactgaaactataatcaaatgagtagcgggagcaagaatgctgcacacttgaccaccatgcatggtaaggtcctgcttcactctcttgagtgcaagatcagatattacattgtagtccgcattcctccagaaaagaagagcatcaatgaataaagaatcacattacatgaaagatgatattgaccgcaaataaaacttacaccaagggtgcatgatagaagtagacacagcaaccctggaagaagcagaatctctcatctgcgcaatacttctttttgtagtggtgtaccatgtttgaatcaacaacagctctgtccatattgctgaaaatctgaacaatgtacaaagaaagaagaatcaccaaaatgatcactgtatttagtccttatctattggttctctacttggataatatttccgagcacaatagtagttttcagacaaacttcttaatatcaaacttgccaaacttcttagtaacaaagagtaagtagcttatgaaaattgggaaatatttttccaaatttatcgttggctgttatcatacaaaccccaacagggaccattggatgaattttcgtatgtttggatggatcaaaactatggagattaagcagggaatccctcatactagatttctagtctcatatacttgtagtattgttgattgcacagattttaactacaggaataccaatttagcacccagaatgacatatctggcattatgaattacagccaaatgcatatacgagataagcatttgctgcatacaggaaaaagaatttacctgcttgaggtcagaaatatcaatgtcccagtagaaatagtcggcatatgagtcgatctcttcaggaaatttgtgccttgcaaaatctgcaagaaagaggatatacctgcacagtgaaatgagttagaatatttttgacaagaaaagttgatgaaagaaacatgggctgtaagcaagggtcaaacttaggctgcaaatgaagaaggcgtttttccttgcaacagtctaagatccaggaataatgaatgatccttccctgccgtgtggctgcctgatatttgatacctgggaaaacacaagagaataacttgaactaaattactcaacatttagaataagagaaaacataaggtttctcaacaggataaagttaatacct

SEQ ID NO: 27715 - DNA, 13338 bp, Oryza sativa
  unsure (1)..(13338): unsure at all n locations
tgtagatatgctgtccaaaatcaggaggcaaacttgcacttgcagatgtgatttagcttttcaacccttcaaggaattgccaccagttcgtgatcctgattatctaaaggactagtttgtaatacatgcatgtagataagcaaaaggttcgatcgaaatgacaaaggggagaaattaaagtaccaaaaagggaaagcctggagaatttgtcctgcacaagcagcaaaaacagctccctggtaacaacaagcacatacagttacaatttacatgatgatgcacaccggacagaacttgtttggaggctattgcatcataggatgcaaatggtaacattaaacttcacatgatgcaaacagaaataaactccatgtggttgaacaatctattattagtaaagcgttacatgatgtgcttcggagcttgtttggaggacacgtagcactgtaatatccccttgttttgtgcttattaaaattccatttcttacctccttcaatgcaatagttagagctcctaccccttttggcatttttgctgaaaaaatatcatcatcaaaatgcattaccaggtgagtcaagtgtgttaggttctaacgtataaggcagatctctagtattcctttgctaaaaaaaggaagatctccagtaacaccttttccagtcttactagaatgtaatcgtacataatagtacctttttttgcccttgcatggaactacagaacaatgcatgcaatttatagtaacacagaccatttttttattttatttcgcagcccatacatatactaagtctaaggatgttctcatgtgccatatatgtgaatagcgaataataaggggagatctcaccatttgacaacacaatgctccagctaagattggaatcctaacaaccttacaaacaagtctactgcagtgatgattgtatatgccacgacagctaaaccacatcatatccgatgctgcaagatgtcatatatataaaacggaaagcaatactgccaattgctgctaaaggcaaatatgttagaagacttttgcttccactgaatgatgttttttaagaatgatgttaactacagctactgctgaagattatctcaacaaaaaaaaaagctactgctgaagactaattatatacacgacaacactactatatacgttgttatatgtacattatttattgcataagattctgctaattaggcgatgataacgagctctgaaagaaggttatattgaaaacaatagccattgtgtctctccagaaaaaggaaaagaaaacaaaggcataaagcatgaatttaaacatcttaagcagatgcctcaaaacaaaggaacctttcttttacaaagttgaccatataagattccatccacctaaaattcatcattaaattcctggagtttgaatcctgaaatttcattctccacctcaggttctgtaccttgcatgcctgttgaaggaaaactgagggctggtgccttccagttcctcatattctgttggcatccattttttttttttttgacgcaatgttggcatccaatttaataataataactgaaagatggctcatatatctagttcacagtcttgcaaacctttctcaatatggaacgaacttgtgctgtatatgaaacatgtgaataatctgggatcaactggatgattcagtcaaatttgccaactataaataaaactatcaacaggtattcaggaatctcaatgcaagaaagaatacataagagaaattaggattttctccactaagaagaaaaaaggaacctaagctcaaagcgaggtcaaacccaggtgttgtggagggtggagatgctgaccttccaccaagctaggctcagttacataggattgttgaattaccgaagtatgtacatgagcttcacaaaattgatgaagcaacaaaacaacctttctgtattcagagttgacactaattaacccagtcaacttggcataataggaaacaacatgtattggagaacataggtcgcaataacaaccaaaactaaacatttctgtgccctgcacatgtggctacatccccgttgcagaaatagtgaaatccaacatttgcagtattcaataatcatgagtgaagtatacataaagttgtacagacatgcaaaaaggaaaatgaatgccagattcatcccacacgtcaagatccaaacaaggcaagttgtacttgggacatgatgaaccattcacattggttcttgtcttcttttttcctttacttctagatcaaacttgatattgaattgcaggtttgtagaactttgtatactacggtaatgattttagtagcaattttcaaatcattgcaacacagggcattcgatattgggtacatgaattcccatgaaacagaaactttctttttaaaagcatcaagcacatttttattataatagattggaaatttacattgaggacacaaaactgcattcaaattgaaagtgtacacaaattttgccttgtaaagtaaacttatatatagctatatcttttgtactatattgcaaaattactgaagaatatatatattgtagttgcctagaaagtcataacgcaatcaaaatagatggaacaatccaatgttttcttcttcttcttttttgcggcgaagatggaacaattaagttatgattacattttcagaaagaatcttcaatgaagcattcaacaaatcaacttacaagcagtcaagcagaataaactagcaagaagagcttctaacaggactgcaaaaacccataggagtgattatatctaaatgacaatgcaactgaaaacaaaatcttaggatggggagacattaatgtggtgtttaaatgtttcattgacaatatgacaatgacaaaaggaattagtatgtgtcaaataataaattctaatgcacatacggaataataagaggatggcacaatttttttttttgggagcagcttagctctagctaattactgggttgtttttgtgtggtcaccccccacctatcctatcttcttactgtttttagagaatatgcaggaattgtgcttcttcgctttgagataggaagtgagataggccaatcctgtccatcaaatattccaccataaaacaaaaacattgcaggaaacgaactgaccatttctaatatgtatagagaactagccttgtatgcaacgaaaaataaaataaaaacctataaatacaattcaaaagaacatgctgctagtatcttaagatttttaacaactggagggggaaatatatttttttgccaggtcggccagcaaggccgaccaaatttcattaagataaacaggggtacaagttacaaaattgttactttgacaatggttgccgaaagcagggcgagaattgctaaaaggctcagttcttaaaaaaattgccaaaaagcaatccgcatgcagaaagaaaaacctgatactagtgctgaaaactagccattagcttcttttaaaaattttgcttgcgaggggaaaatatatgttacctgcgaacaccacattgccaaaggtgtttgttacctgcaaacatagtggacatagcgtgtgcgcgcgcacacgcaaccagacgaaggtgaagcaagctcgttgaactgtactcacacacacaccccaaagaaaaaaggtaacacatgatatatactccctgctcaacagtctgctttccacgttccttgaaagctgagagcatgctcagtctgcatggcaatggttgacagtatcagcatggagcgtacatgtgcagagcccatatatagagccacacatggactatggtgatcagaagaattcagagctgacaggttgcacgttgcaactagcaacaggatgacatgtagtaagcactaggcatttctagactattcgcttgtgcattacacaggaaccaacctactctgccataaaaaccatgctaacgagaacgttcaccattgctcaaactgacaactgaagccgaacgtacatgcagcaaaacgcacaggtaatgtctgggcctccgggcaatggagatacctggaagacatatctaaacaccctccgcagtttctatgtgcattttgcctaaaaaattgattctacctatcccgtgagaccaattccccacgagcgctcgctattcatcaattgattgaagcgccctcgtaaccctcagtaaaggttccgatcacctcatctgaatactggactggaatgcgtaccaatcaggcactcgacaagcgcacacgcgtagggttcgatcgcgtgctcacgtggtgcgctctccccgcgccttgacagatcaaccggttaaacccacaaatccaactaaccccacacgcgtaagcaccgcgatcgcgcgcccaattcaccgttcacgcgtccggaaacggaacacctagcgcacgtccggtcctccggtgcgagagaggatgtggctgtggagacgaagggtgggagacgaacctgaacctggagaatccaccgcgcccgcccatccacctgctccttctcctgcgtcggcgccccgctcgaggagtggttcgccggctcgcccgcccaccgcttccgcccgctcaaatccggcggccgcatacagaattgggcatatccccccaaccaaatgcggcgccgcggatttagccgcgccacccgtacgccttgaacccccgaccaccccgcagccgcgtggcggcgagatccgggaggagagggcgcggcggcgcggcgcagcgcggcggggagtgggggtttcgccgcctcggaaaggttcgagaggagcgggaggtttcgggtgggcggtggcggtggcgatatggcgcgcggggtacagtggccgggccgccggggggctcgagacgtgcgtgtaattaatggaggagagagacagggattccttctccatcctggccgttgataggatgatccgatggctaaaactgactagacggcacgctctacggttttctctgcaaggcagaggatactgttcacgcattgtcagagcctgtcaaaaaaggccttttaggattttgggctctgccaattttgcgtaaaggcccataaaggcataaagaaatattatttgaaataagttcaccggaggtccctcaacttaacagcgagattttttgagatcccttaaccacaaaaccagaaatcttcacccctaaactatacaaaaccgttcactcaaggtccctagacagtatatatgggtggtttcgctgacgtggcatcctagtcagccaaaaaaaaatttaaaaatacgtggggcccacatgttagctgcacattttttttcttctccttccttctccttctctcctcttttctctcttctctatttctctttagtgagggaggccggcggcaggcggagcagcgcgtgcggatgcgggtggcgcagcagagggcaagcgcggcagcggagcggcggcaggcgcaagcgcagcgggccgagcagtggagcgcaagcatggccgcgggcaaagaatcagagggcgagcgcggcggcgggtggagcggcggaggccgagcatggcaccggagcggaggtgggcgagcgcggaggcgcatccagcctaccccaaccgaccaaagcacgccctttgccctcgaccataagccccgccgccaagtcgccgtcgccgtcgccgtcctccccgtcgtcgtcgagcggcagcgatgacttcgcggtgctcctcgacgcggagctcgagctcacctccgccgctgactcggcctccgccggagacacctccgccgtcaacaacgactatgaggaagacccctcccaaccttccctccttcctcctcgagctccctcatgccggcgccggcgcctgcagggatgggaagccgacagtgctggccgttgtggtcagctcgcttgccgcggcaacgctggtcccggcgctaaccggctgatgcgtctgcggatcgatgccctggctcatgagcttgcgcttgatgtgcgtgttccacctgcagaaccaatcaatcagcaccaagaacacaagaagagctaaccggagcagatgacaacacgttgaaatttgttttgcttacttgttgccgagaagggcgtggaggttgatggtgagctcgtcgtcgtcgtcggtgaagttgctgcacttgaggtcggggctgaggtagttcatccagtggaggcagcagctctttcggcagcggagcaaccccatcgccttggggagggagagagggtcgacggggagagcgcgtcgctcgcccggcgggcggcgacggggcccgtggtcgagcacccggcacgttcgaacatctccgacgcagagctcgccgtcgcgccggcctccacctctcctcctctcccgccgccgccgtcgcgtcgaccgcctctctctccctctcccgccgccgccatctccgctccgccaccggccacctttctccccctcggtcgccgtgcctgctcgagactcgagagatttcggagagaagagaagagaaaaagaaaaaaaacagagaaatgtgggacccacaccattgtctcacttacatgtgggccacacatattaaatttttttttgctgactaggatgccacgtcagcaaaaccactcgtatatactgcctagggaccttgagtgaacggttttgtatagtttaggggtggagatttctagatttgtggttaagggatctcaaaaaatctcggtgtaaagttgagggacggcggtgaacttattccatattatttcatggtttcggaagctacgtattgttgggccatagcccaaactgctgatgttcacactcaaatttcgcatcaaatctcttgtaatttaggaaaattcggaaatctaatggcaaagttttgcggcggtgctcccgaagcttttcgtacacgccacagcaggttactgtagtagcagctatcacatcgttctctgacgtgtcgtcagctctgcacgccgcgaaggccacgtgtacgcgcccggatcgacacgtgtacagccacgcactagaccatctcgaactcccaaagtcccaagctctacgcaaaacgcaaaagcatggacgaatcaaaaaaaatccaaactcttaaaactcgcgtcgaattcaacctggtccagcaaaaacaaagtctcgatcgaactctgatgaagaaaataggaatgtctctggacaaatcgtgacgcgacccagcactcgcatttgcatacaaaaacctgaggcacgctgatgccaggcaaacctgacgaagattagatacagcagcagatcgattctacggcgaggacagcgagaagtcgatagccgcccatacgcggccgccggcggcgagcgagcgagcgagcgcgccatggcgaaccaccgagctgtgatcgcggccgtcctcgttttctgcttgtgcttcgttcaggtggcccggtgcgatgtggtcgccgccgccgtttctccgtcgtcgccggagcaggcgcaagagcttcagatgctgagagccaaagtcgcgtcgttaggtgagtcctgttcttgtttatttatatactcgtattttgaaaatttattctgtttgcattgttgaatatcgcaaaagatatgatagatcaccatggttttgttgctttgataccatataataacttggagctaccaaaaagttcaactcgttaataagagtcgttataggacaagatgatagtttggttgttccattaaccggattaacactgtgcaatggaaatttacctgattcattgttgtttactgggtgaaagaattacgttctttgggtttagaggatgagatcagtgggaggaaggaggagaccttgcagctggagaatgttgtcagggagaagtcagcacagattgcggcattggtgagcgagctagaagttctgcaggtgaattttattctgttttttcaccttattgtatgaaattctatgaattactctcttgaattttaactccgtatgctatattaacttttttggtttggaaactgtaataattaactgacaataacggcataaaatacatgactgctagttgaactctcccgtttagaaactgttggttactggttgactgtgcaacattacttagtagtccctccgtcctaaaatataacaatttaggtgtggatgagacgtattgtagtactatgaatctggataggctcccatccatccaaaagttttatattttgggacggagggagtaattaacttgaattttagaacaatgagtttcgagtcatagttaacatgatcacttcttgaataggaccgctcattatcagtgactaacagaagtggcaaactggcacttgtcataatcatatagtataacctcagcttagactaatcttttttttcggaactcttattcctataaatgttatctcgacttttttctttttatgctgttgaatcaggtgcctaatgttgctgacgatgaatcagtgctgaaggcaaacgcccataatgagatgcttgagaaacaggtaagataatcatgatttcaaaacaatggtattaattaagcctgacaaaaatggttacaaaactgacatacaactgtcaggttctgaggctgggtagtgatttagaggaccaagttaagaaaggggaatcactagaagcccgcgctagtgaagcagagaaaagtttgcttgagcttactcagaagttggaccatgtaagtactataagtacgcaatcgggatatactgtagtgttcagctgtttttcacatgtttgtaacgtaatttctaatttgtatcatacaggctgaaaagataaatatggagcagaagaaaaaaattgaggagcttaaccatagtcttcggcaagtccaggttgatacaaaaggtgtacaaatgaaaacaacctgaacaatctaatgtgcttatctgtgctttatgtggtttgctcaggataaactttttgaagtggagagggaagcaaagttgaaggcggaagagttgatgaaggtatgcaaattctgtcatcttctttttttcttttgtgaggtgtcctaataaaaaaaattgatgttctctttggtgcatttctttcttattgtcttgttgtggaatgattcatagatccgtcctcctttactgtactctgtacatctggcaaaggtacataagcatttgagtttgttttcaggttcatggcatgtggcttccacattgggtcatggctcgttttgtgtattgtcaggtatagatggattcactggaatgttaacgttaacgtagttttctacttcaagttgagcttgtttttgtgcacttgcaggacttggcttctgacaaatggcagctccatgggaagcctgtgcttgatgctctggcgcagaaggttcgtttcatttttttttacttaattaactattcctcaaatgtttctaaatgattggcttaatgtgtcaaccggacagatttctgagaaccttgcacatgctcaaacattagtggagccgcacatgcaaacaacacagaatataggtttccgaattatctcttctatagacttgttaggagtaaaaaatgatgtacatcctatagactgatggccttcaaacaacttcttttcattgttgtgtatgacactatactagattttttagtgagcgtaatcggtagtcaagttcatgatcatgttttgttgaactgatgcacctcaattcacttttaaaccactctgacttgcattctttttttctaatgctaaagaaatcggttcctgctgccaaagcacatctcaactctctgaaaaaaagcaccgatgtatacgcatcggcaatagctaccaggagtacccaagcctatagagtttgcagagacaccatccaaccatcaatggccaaggcacaagaatttgcagatcactattggcaggtagcaatgcacacacccagcagccttttcatctcattctgtggttaacctactaaagtctcgctcaatcactctgaatctgaatctgaatgattttatccttctaggaatccaagaagttcaccacaccatacatcaccaaggttgtcgcagcatctgaacctcgtctgtcaagagtatgtgccgtcctcgaaccttacacgaggcctgtcatatctgcttggagaaagcttgttatgtcagcaagtgtaccccatcgccaggtaagcctttctaaccagttaaccctctcacaattcttttgctcatataactcagggatcttgtcgatgatgctacacaggttcagaaaggaatcaaacacttcgtaaacgataacgggctgctgaaatctgattcggccgacaggttcgcatggttcacggtaagcttcttcggtagtgtaatctccctcctcaattacgcatcctttggaacacatgaattttacacagaattttgttcataccatataaaaactctcaataatccccccattccggggggcttttgccatgatatgcaactctcctgcgcattcttggaaaaacaaaaaaacaaacagaaattagtttctcatgctcttccagatctcaccgttttgagctgtttacactatgcaggcatcagctttggtcgctctaccgatgttctacacctacaagatgctctcagctgctatatggtgagatgagacctaacctaattgtcagtgccttcctaactgaaccaacattctggagtggtgattcgactggttgccggtttagctaactgatggcgctgatttgcaggaggaaagctgtggcagcacagggcagtggcggcacaagatcaaaaaaagcctcgaaccgcaggcgcacacagagagtggacagctagacttctagaagtgttctcaagttgagacattagtactgggacatgcgtttctaaaggcataccgcaaaatcctttatattttgatatgaatatataataggaaactacggatagactgaaatgcacgcataaatcctgtacatatgacgttcatgtgtcatggttgctgttaatatggtctgacatggtgtatatatggatttgattttttttttaaaaaaaacacactgtacgcagccgccgtatgtatcatatatacgcataaacacgtatgaacgtacataacatatgtaccactatgtttttgaagattcgactcatatattttaagataatgaaattatcgtatttatctcgttgtcgatgtatatcatctatcactatcactggaaaaatacggatttggattttctctgtctatgataataaggttttggtttgtttctaagtttgggctcgattggaatcgatcaaatcgaagaagagccggcctcacgcgcgcaactacacaagaccaaggacgacgacggggtcaaatgcgttctgttttggtgaaaacggaggggatgatggagacaataagaatggatttattggtaggaatacgtgacgtgatattatagggacactttgagattgtctgttgggaggtcgtttgttttttttttcctttcttgggtttttttccgtcaaaacagttttctatttttagaaaagaatatagataaaaaagaattaggaaatatagataaaaaagaattaggaattaaggatgcgtacgggaggatgggttatattttttctagggtaaattggaaccatgccattataattttgcaaagtttgagatatgtcatccgtatctcaatgacatgtagaacccacatgagtcaatgacatgtagaacccacaatgggtcagtatgacatatctcnaattttgnnnaattataatggcatggttccaattttccttttttttaacacctaaaatgaaactgaattagcacatgattaattaagtataataaaatacttaaaattaaattaatataatttgttttcagattttctataaacgattaaacgagagtcggaaggtgcagcagagaacggagccagagttttgtaaaaaaaaaaaagaaaataaaatctagccgtcatatagtaaaatacaagaggcggtttttttatttccttttcttccgtttactcgtcgcggtcgcaggggcggggcagcgttgccgcgttcgatataaaccctccccggcagattcgcgatcggtttccgactcctctctcgcgccgagcccgagctaagctgcgcgccattgtagctagctttgatcggcgtcggcttgttggggggaaggggcttgtgtggatctcgcggcggattcaccgagcgattcgcctttttttccgtttgatccgattcggttcggttcgatttcgattcccatccttttggtcgcgggttctgggatctcctccgcccgcgcggcgtgcggcgtccgatcctgcgccgctgccccggcggccctcccatctcggttcgaattcgagctgaaggtattcgttcgttgttcttctctcgtagcccatccttcccctccctcccctccgcgctcatcgtgctgtagattttgatatccatctgggcttggattgagattgggtttatttttttgccccctccttccaattattaaccttctgttcccgattttcctgtacgtggtgcagcactaatactagcaatttgtaaatttcccatgtcaggtccgctccttaatagtgtgttgttttttggctanagcttatcttcttgttatgatagatagcgcatgccttcttccgtgttggatcataaagatcgatttttttattttttatttttttgctgtttaagtgatgcattcgtcataccttgtcgttcttgttatgtttcttgttatgatctactagcacccatgctttccatgttggaccacaaagatccttttttttttactgctgtttaagtggtacattcgtcaaacaagcttcttaatgttccaacaccattgagtggagcaaaaaaaaaagaggttatcgtctgttgaataccaaaactcatgtaatctgatgcccctttactgttgtgtcaacaattctgaaccaaactgtaactagctttcatcggtaaatattaataagacacaaaagatggagaaaaaccagacaaagtatctcccatctttttgtaacatgggaacaacattttcacaatagcaccttttattcattttgcagaagaactgatagtagcaagaggtgtcccccctcaattctagctctgaattgcaggaaaagctggtaaaatcttagggtaatgggagtcaagccttcacagtgaagatttaatagatgaaggcacaccaattgtggcagttacctatcaaggatatgaagtctgctcctctccctcgcggacgaacttctccgaaaaaacatt

SEQ ID NO: 27716 - DNA, 25842 bp, Oryza sativa
  unsure (1)..(25842): unsure at all n locations
gggagtaccaattaatagctttaattaaccaaataattacagttttttgaaatttactctatttttttaaaggaatgagtaattacatcatcccgtaaaatccactgcagcctttttatattgtgtacttgtatttgtgtcaaccagatgatagatccaaatggaattgccaactggtctgtgactcatgttgactggtctgaagggaagtggcatccgaaagcttatcgggcaaatgatgttacatacgagcttctgaagaatataacagtatgttcttcgtattactgtttatcattaataatataatagcataattcataatcttacttttaacactgtgatctttttctttgcagtcaattgacatgagctaccatatcaccagcgatagcaaggtacctctctctctctctctctctctctctctctctctctatctatctatctatctatctatctatctatctatctatctatctatattttgtatctttattttgcagtcaattgacatgtgtattagctttattttatatcttttgaaagtcatatattttggtagttaattcccatacttgttcattgatactttgtctatgacttatgatccacatgaatttaggctattttacatatcgacagtaggaaggtgttatctctagaaatggctatgtgaaattgattatgcttctgagcacctgagatcgtgttagttacattattaacctagtgtaaatttgtaattgctatgcaaaattagcagtttctagaaaaaagggtgctattcccctgtggttctctagtcctaaagtcagcaaaccaccaaataaagatactcctactaggcttgtattttttttttagataaatgccaatccactgttcaaatgatctctttccttccatcttccatgtgtcaccgttctctatatgaaatacatttttacccaacatactttttgtgattcataaaaggcactaatgcattttgcatgcctgtgcagaaagtggttacgcagaggccttgcttatggaatggagtgaagagaccgtgttacttgtttgcgagaaagttctaccctgaatccataaaccgcctcatgaactcattctcaaattacacccgtttttgagttctgcagagttgcatgggtaccctacactaaaaaaattcctccatactagtggatatataggagatattctgttacaggaatctttgtaaattggaagagaacagcagatttattaacaatagctggtataggaatagggagaggagaaggcatacgccgcagcattagggtggttcagatctccacggtcaggccattgccactcctgaatacaaatttctttaggttcaccttgttttttgctagcctatttctcttgatttctagctgcagattctgtcatgtacatgaagcttattgtataactaggggagaagtcattattgaggcccatttttattgatttatccataaagctttggcaaacctttgtcttatcccaattgttcatgtttcgcgctgactcacacattcctacgctttctaacgggatgattggacaacgctttctaaccggatgggtggacagattagtcacgattgcttaaaaataaatcaaatattgggtataaattaaaaaatagcttaaaatatacctcctttattttttaataaaataagtcgttgaacttttttcttcacaatggttgacctncnnnntattcaaaaaaaattacgtaattataatttattttgttatgagttcttttatcactcatagtactttaagtgtgatttatatcttatacatttgtataaaatttttgaataagacgaatggtcaaacatgtgagaaaaagttaacggcgtcgtctattaaaaacggaggtagattatcttgattatgatgccgttgactttttaataaacatttaaccattcgtcttatttaaaatttatatacaagtataaagaaatttaaatcatactcaaagaacatttaataataaatcaaatgataataaaataaataataattgtatttttttaataagacaatggacaaccatatctaaaaagtcaatcatacaattaaaaaacggaagtagtgctatgtattgatgtaaaaagtttttttaaaagaaaaatcatactttagtgtagaacgaataatccatatatctataaattaattgaatatctcgtggcatgctccgagctccagttttttctttaaaaaaacagggaaatgatttcaaattattcagaaaaaaatctgcatgaatattcttttttttttaaacaaaagaaataggcaaggcaggcttcagctatcagcttatcaccacacacagacacagaaggaaatgtcggcttctgcggcgcccacgcacatccgcttctcctccgccgcacctccatcggccgccgctctccggcggcctcgccgccggtgcgccacgcccgtccgatgctccctcgccgcagcgccgggtctccgggcgccgcctgagctcatcgactccatcctctccaaggtgatgctgaaacatcatctctctgctcttcttgggtgcactctttccggattcctagcttctgctcagtgctcggtttatgcaatcttgtactccacattagaacacatttcttgactcagaaattaacgagttctggtgttccatagtactaattttaacctcaattagttttttcttatcttacaccaaaaaaattcggatttttgtataaatcctggagaatattccttattattggtttccaattacttacctttttccttctgtcattttcagtttcttgtatatatatattttttatttatcagactcgtgcaagtaaacctccgtcagcaattcatcatgttaatttgatgtcttaattgccttaacatgatatcaacaggtgaagggaactgaccgtggagttttgctgcccaaagatgggcatcaggaagttgctgatgtcgcactacagcttgccaagtactgcatagacgatcctgtcaagtctccactaatatttggaggtattgaaagagtgaaattgccccaattctccaaataatatctccaaaattgattgtgtcactgactgacaaccagtaaagtaacaacgagcattacattgaggtttgggttgtattacaacactgtaaacctcatgccatcctgactaattttcttgcttattgcacttgacctgacctaccagagtgggaggttgtgtactgctcagtaccgacatcaccgggagggctctaccggactcctctcggccgcctgatattcaaaaccgatgagatggctcaggtggtgcaagcgcctgatgttgtaaaaaacaaggtgtccttctctgtctttggtttcgatggtgcggtatctctgaaaggtaaaaaacagacaccatctgtcaactcattctctattcagactgggcgtgacaaatctgcacagcaatactgaatgtgatctcatgaagttcttgttatgttgggcatgacaggcaagctgaatgtgctggatggtaagtggattcaggtcatattcgagccaccagaagtgaaggtaggctccctggggtttcagtatggtggcgagagcgaagttaagctggagatcacctatgtcgacgagaagatcaggctgggaaaaggatcaagaggctcgctcttcgtcttcatgagacgatgatatgagggcagcaggcaatgtttgtaccatcatgtcctttgagaccacaagagggtagcaccatagcactgatgctacgacaatatgtttgtgtgtacaatactgtattctgttgtaaaattcagaggtcatgttggctagtagtgttcttcagacctccgaattagagattgtattgtcatttccaatcaaaatgacaaaatgtttgtagtttttgtgattaatgtgatggttaaattgtccagactaatgagcatggttatggatttttggtgaaccctgcaatgaaattgctgctcctagtatatactgtatttgccagaaggtttcaacatttttgtaggcaactattggtaacggaacacttttggatctacgagcaccgtcagatctcaattaagaggtcaagattgttccaaacttccaagtgcatcagtatagcggatatgccgcctccggcctgcagtaacgtactctatggagacagaacctgtacagtcgaaaagtcgcctctcgagaaggaaaacgccttcttggaaaaaccgtcttgttcttctcctcatccacggcgagggggcgtcccctcgagctcgcgggtctctcgtctcctcgatggcggtgtcgccgtggagctgccgctgtggggtcagccgctcccccggaaagagcagaggcgcaccggcaccttcttctcctggtgcagtacctccccgctccaactttttcttcaccattttgctatcgcgagtctaagtgtctaattgtcctagaattcctatttcttagattgttttgtgtatgcttaatttatcatggattttgtggtggttttgataattctgagctaaggttcctactcttactttgggtgtgtgcagacaagagatccaagtactcggcacaatcagtggtaaggagtgcaaaaaattcccccctttgatgttcgtttcttctcaattataagtatttagttttcgcttttattggtcactgcgtacttgctaattcctcgaaagctggaggctgctggctgatcttagtggacatatataggcgagaacaacaggaaactgcttctgaaacaaggattttgtatcagtagattcagcactatatctgaacattttttctgaaagtgctttccatgtcacagaactaattttcccatcaattaaatgaattagagaaatctgaaggggttgaaaccttctgccaaatacatagttttcgtaatatattctccatatgaattgcatagcaaaagcaacggatgaatgtctaataatgtttggtgtttgatatctcttgtggtcatgtttgaagagagcaatgcctatgcgtgtgctaacagttggaaagaagaggtctcgaggggcacagctcattgttgaagaatacaaggagaagcttggttactactgtgatattgaggacacacttatcaaatccaacccaaaactcacaaggtaggatactctatagtcgattcatattcattcccaaacgctgtttatattgtatagtcctagatattagtagaaagggttttgattggtagctttacacatcattccattgacgttggtagaattgagtttagttctctcaaagtcaaatatattttactggagggagtagttattttttgttaagaagttgatcactgatgctgacctctgttcttctttttcctttcagtgatgttaaggtgcaagtggaggcagaagacatggcaatgatgctgcagctcaagcctgaagacttcgtatgtttcagtacctccttatattctagagatcatatgtagttcatcttgtagttttcgttatctgtgtattagtggtttgacattgatgtgcatatttaggtggttgtgctggatgaaaacgggaaggatgtcacgtctgagcaggtagctgatctggtcggggatgctgggaacacggtacgctctgtaccttgattcataaatttttatacatatttgtgttaaaagttcaaacctgctggaaattttgagggataccatgtttcagtaatgtgtgttcttcaaacgttttaggggtcgtcaaggctcacattttgtattggtggaccgtatggttttgggctacaagtgcgagagcgtgcagatgcaacaattagactatcctcaatggttttgaatcatcaagttgccttgatagttctaatggagcagctctacaggtgagcaatgagcctctccatccatcaccgaatatgctttgataattccaatggggccactctttagtgctgggtaatctacgcaccaaatggcgttaggcaggtacaaccatggaacattccaaataagatagatcgatgtaacacatgatctatctgtgagtaatcatgttcatgcatatctatcagcggatagtcctgttaattctgatatcaactattcactaggggtcatttttttgcagggcatggactataatcaaaggacagaagtatcaccactagccactagaattgagttgcattggcgtcatgttgcgcacttgaacagatggaaaattggaagtgcaggacatggagatcgtaattcataaacgcatcagctttcaggtgtagactatagtggtcatgaattcatatttgtattagcattcatcttaagaccactacatgcacaaaacaaattacttacatatttgtctgcttggtcagatttggaggcttggagcacacggcgcatttttgcttggtgattcactgattctacaacaaaggcacaccagagggtcgaacattggttgtaatcaatgcagcgtataggcattgtagtccgtagattgtatagcgcagagatctcccatatatcaatttttcagcagtttagacaaatctttgttctgcttatactcgcgaaactgctattcatgtacaatgctttcaattgcactccaagtgagcacaaagcaacgaaaacgctttacaagaagatcaacagacggacagtttacagcatttcactatgttccaccgctcagtgcaaaatggtggctttgtgttagtcctgaaagcgaaaagtatgttataaaatcgagctatatcatgtttagcagaatttacaacagaagattatagattcttgtggtgagtagcaaatcaaacctcatacggtcatatctgctaggacatgacaatcaacaaccaacacatacaaacagttcaatcacattttacatacggtctgttgacggctgcagaatatacatacttctgcccatggaaagacccaagttcttcaagtcatatatagtcatattattctagatagtgaaagtggtaactcccagcaagtcatatactcatgccgcattagaaacaaaatataacaatagcacttggaagaaaacaatattaacaacgccaccattttttgttctataacaaactcttctttgtgctgctttgtaccatttttctgttcacgcctatctcacaataaacagttacattgccaatggaagattaggcagtgatgggattagctctagtcattgtgctgaaagccagggagaagtgatgcaacaaaccctacaacaatcaattggacctctttaaagacgcctccaagccaattgcgcctgttcccttctccatcgacttcttgctggttctcattagcagctgctgcccctggttcctggttctctgcagcttggtcattgtttgctgggtctgcaagatttccccctgagaagcaaaatgatattttataagaacaaacatatattgtcacttcaaaaagaatgaatattattttataatgcctgctaaatgtgaaatatcactagatgctgcccgttaaatcttgaatgagaaatataacttctcaatattgcctgacaatcagaaaatagcctggtatattagactaggaatctaggaggcaccattacacaaaccaagggatcaacaagacaggtggactaaacatccatcctattttaagtatttgtaacattattttgcaatatctatatgttcttataccatccaagtttttagaagtgctttaaactaacagtataaacctctattaaggatttggcagcagtagaaattttttttacaatgtctacatggtcaaacggtgaatctggtggttgcaatgatgcagtaggatatagtacaatattgaagtgtagtttaagatatctaccaggcggttgaacattgccatcattctgggcagctagcggagcacgattctctgggcgagctggagcctgtggaggacgagcagcagcacctcctgctcgctgcagccatcttagtaaaggtgtaattgcgccagtttgatatctgcaagagatggaacaacccaaatgtaacgacatacaatgaactaaacaaaacaagtcaaaaaaagcgattgggcaaggaagtaagcagggcactcacaagtaaatcactgaggcaaacagtatgagaagaaacagcctttgttttgatccttcctggctaaacagaaagacaactgctgctaacttgatgatcagggccaagtcaagctgaaaagcaaagtgaaacctcctcacaacaacttgtctctgagggccatgttgttgcctagcatcctgtgcttgctcttcaccagccacagcaccgacactttccctaacaatacaaaggatggtataagcaaggaaagaataaactcactactaactttgtggaacgcacattaatgttctgcaccatttctaggaacccccaaatcagcatgataaggcaataaacatattatgaaacagcaaaggtttagttgttctctcaaaaaaggtacggagtagattttaggattcactaacatgggcaataaatttaaacttttgagctgtcactcattattaaccaagtcagatagtaatggaaagttcatggcatcgtatagaaggcaagaatgtatctacatttgaggaataaggttaaacatcaatatctcattttggcatcaacatatctaataacataaggcagatgaatggagttcttcagcatgtgctgtggttcataaccacagacgcatgagcttctgtatacaaatttgctgagttgggcattaatcaaagtaaattcatagataaagcagcatgacatataaggaactcatgaatattttcgtcaattcatgggttgccaataggacaataaggtagatgaagtataatttaatgaaaaccttaagatattgtcacccgtgaaaagagctttgtgtttgtagtagtcgctgctcttactttacttacaaaaagccctaccgaaaaaaaaaactaggcatcccgatctcaaaaccctttctaattttgttccagatttcctccctactatcatgttgattatggtgaaggcatgtgaaacaaatgctcgagattctaggcagtgaattcgtatgccgtaacagattgctcaggattaggaggaaaaagcttacgttggaatcctgtaagtgagtggcatgagagtactccccatgaattgattctgctgtatggcatagatccctggaccctgagcctgatcatccaggctctgctgaggatgcatacccgtcataagcatagggtacatcaccggaaacatcaaaggagccccatttatagcgccattctgcattatcatcatcagcagcaacatgaatataatcatcatactagtcaataaccacaaatatttttcccccgatacaatagtctctaccaattacatcaaaacgatccgatccgagttgcaagaatctaacacaatcggagactaaaaggggtttacaattatgcacccaactgcatcaaaacctcgaccaaacttccaacttggacgagccaaaacacccataagaacccccaaatatcccacctttccgacaaatcacctgtcatataatcccaactcccaccaccaccaccaccacccccgaatccccactaaatctaggcaccatcgaacaagaaccggtcttcccaactacagttccacgcggtgaaccccagacagaaaagaaaagggaaaggaagaagatcactaacctggggaaacccgactggttcgccggccgtctcccccgccaccggcgccgccgtcgaggagtgggcgcggctctgggtttgcgcgtcggcttccgccatgggagacgccgcgagagcgagctcggtgttctgcgggttcgatctgacccacccaaaggatccacttcttctgtggatggacggcccagattccataatccacgtcactggaagaacccggaccgtccgatcaggggagccgggtagactttcacgtcgcttgaccaatttctccctaatagccactgaccggtgggaccaccctttcagccatagcaagcgccatccatttggtcactgacatgtgggcccatctcccaccggatatatcttcttcgtcttcttcttccgggaaacagatcccttcactctgtgcggtctgcagttgttccactgacttgtgggccccacttttgtatgacccacatgtcagtgacactgcacatagttaggggagtctcttctacttcttcctcctcttctccgtctcgactcttccatccgcggctgcttctcccgctctctctctctctctctctctctctcagccatggctcgcctcctctcgcgaaccctagccttggcccgcgcggactccgccgcggtgccctcctacggccgcctccatgtccgtggtgtctcatcgaaggtggagttcatcgagatcgacctgtcgtcggaggacgccccctcctcgtcgtcctcgtccggcgtcgaggggggcggcttcgggccgcgggagatggggatgcggcgactggaggacgccatccacggggtactcgtgcggcgggcggcgccggagtggctccccttcgtgccgggaggatcctactgggtcccggagatgcggcgcggggtcgccgccgacctcgtgggcaccgccgtccgcagcgcgattggcgccgcctggaacgcggaggcgatgacggaggaggagatgatgtgcctcaccaccatgcgcgggtggccgtcggaggcttacttcgtcgaaggtgagttgagttcgatcgaattaggcaattagcatttctggattgcgaaatggaagttgtaaaggtatttagcattttgtttggattgcgaaatggaagttgttgcgttgtttttctgtaagtagccttggttaggagcaaaccgcgggtgtttgtttgattggtgaagcattggggattcatgattgtttaggttgagagtatagtgaatagttgaagtatgaaacaactgtacatggattaccttcccctcatttgcaggttgaaattagagtattacggtattttagtagtttattttggctttggagtgtcatgtatgaaccatggttctaatagtttttggttcatcttactagtactccttttccttcatgagcttgacaggaagaaaactctacacctagtttggcttcgcaaatttgatccacaactattttagtactagttaattcaaaacaatttagacagaggttccagtaaatcttccatccacttgattcatgcagatgctaaacctggatttctctgcattaatatttgtttgtgagagttactaactaatctcaatgtcagttatacataaccatatcatgaggcatcagaatttcttccttccaaatgtagattctgtaattacctcagtaacaggagcactcagcttgttgttttggcagaactgaacttataacaggcactttctaatagtttgtacggctgtacgcgatgactgacgagttaaaatgagcctaaagaacattgtgttggtaagtttaggttgaactgattttagaatttatgactgggttgctacatatatagtttgggttcaattgttcatgccctatatgattcgttttcttgcaaatattgagtgttcatgccctaattgtgcatggtctagaatagatagaaatactgagttgctaacattatgtgtttcagattgtcttgaaccagcagttgttgggtgggcctcatgcttggggagttttgtgtatatgggctgagtttacctatggctgggttgggtagatttcaggttttcagtttatatcttctccatgtgtgtacattgtgaacctttagtattggaacctaaatgatttttctctacacgtagcattatgttgaatacttcctaatcagattaattacttctgtttaaagggaaattttctcatccagtggagagttcaagaaaagttgctactcaaactgatgaagaggaaagctaatttgtttgcatcactttagcaggggtaagttgtttcacattctccaagaaaatgcttactatcactactttctccttgtcctatactccaattgttgtgcatttgtgatatgacttaagtaaaattgccatatgcaccagcacctggcattgcaacagtgttgtttgttgtaaaaatgctaaactatgttaagtgttttaaagtagacataacagtacagaactgttcagcttggtggatacgtagcccaatagcgtgcatttacaaccaaataaaaaagaggaggtaacttgatgtgatattactgttttttgtgtggcaactggcaaggccccttgctgatccagactccaaattcatgtcccaaaacaccttatcccactatacagtgtgcacctggagttataagagatcaggacatgaaatctaacattctaaactgcatctggaataagctttgcttatcttcaacttcattgaaagacaattctttcaatgaagttttttttttccgtcaaaaaaaaacttcattgaaagacaattctgagcctggagtgtttatattgtgcagaccccctgagaaataggaagcttggagctgtcgagttctgctgatgttgtacatacagacagctatgaacgtgagcaccagcgtgtcatctcatcagtcgcttcagaagatgatgtgcccagtgctgttactactatcaaaatgccatgaacatggatccgtgtattcctgcaacacagtgccttgcgctatggtctttttttctgagagcttgtacttgtacctgtagaatgtagtgtatgcatcaagctgctgctactgaataaaagaaaaaagaaaaatatatgttgtgggttgggctgaatgcctgtaccccatgagcacaggatgctctcgatcattgagcgtgctgtgcacgtcgtgggcctccaactaaaactgtaatcatccttgggcagaagacggcagaaatcttgaactttttgttttgtcttgttcttcggctgataatgctgcttcttctgataacaattgcccctggaaatgctaatatgtaagaagagcactgctatacgtactaactttctttttaacataactctttacaaacaatgatatgagctgtttgatttaactagatggaagttaagcaagatgtattcacatcatacatgtagtgttagtgaggaaaaaaaaagtatgtatggactttttcatgtaagaaatggcacatctattttccttgaagaaatggcataactcgtgacacgtacatgctacttggcccggaaatggtagagcttagtagtgatgtagattgctgaatggtgggttaagagttaagacgcaatcgtcaagaggaagttcgatcacctcttaatgaaacagcatcttgcattcagagttctgacgccacgttccactgaagaaaatgacgctagctcccaactccaacacccagctgctccactcgaagacctgtactgattcttgcagagctcaccgggatcgtgaaccgtcaactaatcgaatgtgggttcgttcgtcaggtgtaaacgtcgcggttggtgccaaggccggtcggcgctgaaataccatcaaatacgtagtatgacggtgccgtatgaacaaaaatacatcatatgtccttgctaactctcacattaccagcattgtggtgttacatccatgtcaattgttgcttggatatcaatcggatctcgtgtagttgtgtaattatgagaaacaacagtgtcatccatctgctagtctctccagcatttctcctttggaatagctcatgcatgatgcatgcatcattgggcttcccataagagagctatggaagctggcgccatgttcgctcacagtaccgatgcccctccctttttctctttagtggttgttggctgatccaatcatggaaccttcacgttttaatttgaaccgttttggaatgtgaaatacaaaagcaaaaagatttgaaaagaagttcaggcaatggaaagagacatgcacatatagttctattatccatgggccatacgattgagtgcattgcactaccatttgcccaacgttctcattgcgttctttgggtttttgttcagtgttcacaacttcacatcccccaatagatcgatagatgctactagtacatttttttctattggagactacgaacttcacagagctggcaacttggcatatccaaatccaatgggctatctttcactacaaaatttgaatatttgtatatgtgtttatgcctgcacattcggtgaaaagtccctgtttccaatgcatatatataacactcatactaatacataatgagttcatccccagtcaactaactcgtgtgtcttatctgtcttttctccaatcttttttctccccctttgggccgcatgtgccggagggagactctgttcgtttgttaggggatagcgaaacagattgaatattgcacctggcagctgtatccgtagagccatcgttttctcactaccaactctccgacagtttagtctaatctagtttagtttttatcattttttttcttccaaacagtttaagaaaacagcgaattgtcacactgagttttgtaggtgttagttcaaaatttaagtggcagaaattatatgactgaaatgaaaattatggagggagtagaattgtgtctgaagtctgaacatgtttgtgatatcttcagaggcctttatatatgcccaactttgagaatcatctgtgatctgtccttttctggaggtaaccatcataatatttcacaccaacaccagatcatcgcatcatgctctcatgttagggctttgtctcctcccctgttctattgcagggcttgataaaaataactgcactgaacttatctcaacagctgcatacttctttctgagtttttgatctttgagaattggcacagtaagctggctgcctttggccttttcttccctgacctttcttcttgtctgttggtggcctgatcctccggccttcaatttatcatgccatgcctagtgtctttgcgtagccttaacattatccttcaaatttttcataaaggtgaaactgtactcggaacaccttttttcctttcgattcaccatcctcaaattattaggggaaaaaaaggagatccattgatgcaatatgtactaaatgaacaaaaaaaaaagcataactagctcagtaactaggttatcctacataaaccgaggttgcaggatttggttgtcacgacgtgccaacattgagagtaggaggtgagggagtgttttatctaggtttatgggtagtgatctagtcgacggattgatggttccttacatttcttatatcatttttattttagaactcgtgggtgtgagcgtatttgttcgcattctagttatgcatatgtcacgagtattttcgatatatttgttgtatcaacttaatgtaattgcttgagttcaataaaagcttccatatatcttgaaaaagaattaggtagttttgtttatgtaaaactttggctctaccatgtgccaatcacggtgcatagtttctggggaagaaaacgtatcattaaactgatgttttggccggtcatagactaaatgaatattgtaatctcttcattgtcggtgcatgattcaatattgctcgatgatgaaaaacgtgtgatccggtgattccttctgcacaattgtcggcttaagccaatatgtcctaattttcatataattattaagagaaaatttcagctgtcggtccttagattatttctttccagtttgactttcagcatctggtgttctactgttttctgaactttagagaagatgccattaactaccaattgcatacctagaggaggtgtcttacagccagattttatctcattttgttgatacaagttagtttcaaatacactgctagtttggtgataatcaccctatcgatatacaataatcctgacaaagggaccccatgatgagatacatttgcgtcaaatctgcatatgtttatctagattcagcaaaacggaacatgcatatgcaattggtcatattccagtggctggaattaaaatcagatagaccatgcagagatacagtagtgtaaccatatcagtgctagctgctgtgcatgtacactgttaggatatttggatgtaccaaaatacaagcccatgatacgatgacccacctacagtgcccataacgtggtatgtcttgtccgagcaatgtaactagaacaaccgtatgcttattaccaagtggatttccctacatttatctcaggtagaaattttatctcatgtaactagaacaaccatatgctattttttattctgtgcgccaaactagatttgtcaagaaactcagtggtgtgagattaggtacacaatctcaccacttaagttcgctctttgttgaaaattatgatttctccctctgttccaagaaaagtaagattttctcgcgtttaaaatttatcccctaaaaagttaatttacaatccttacctactttggttcacaaatcaagaagtattaaacaggttttattttttcaatgcccctaatctattcaaccgacaatactattttccttttagtgatggacactttggtctttatcttatattgtactaatttgataactcttttttggtgacggtagtatagtaaataaatttcttatataccactaaaattttatttatcctcttgtttaccactcattctctcaatgaagccaatgacaaacaaaaatctacaccaaattttaagcagcaaaataaggaagaacatcgttgttcgaaaatgcccccggacaggcattggatgcgtcttgtgtgttgtggccgcagcacaaagccagaaaaggctgacgaatctgaaaactttggcacgttagctgctagcatactccgaggttccattccagctacaatagccaaactgaagatcatctaaccagatgtgttgtcagacacaaggaaagttgaaacaagatctcctgagggccacaaagcgaaaagtgcccgcaatactcctacctacactggatatatatgatcataagaactagtgctcctacattcatgcagttttgagtctacatttatctgttttctcaaagaacataataattagaaatgtaatagatcagtaaacaaagatgcatcgatttttcttttgttttaaattttatttattttagataatggataactggtttctacattcaaaatagatgtatacatcatgatttgttttaaattttattttttgataatagattaaaacctggcctctacatctatgtacacaactaatagtgtcatgatttgttttttttataatggataaaacccctgcctccacatccaatatattgtcatgatttgttttaaatttattttttaatatataatggattgtaagtttgtaacccggcttctacatctaatgtacacaaccagtagtgtcatgatttgttttaaatttgatctgtacgataattcctgagatctgcggatcagaacacagctagtttcatgattcataatgagttaaaaaaaacttattatatataggtttgctctggtccatcagatagtaccttgcagtactggtaccgcatggtaccgaaatcatccctgccgttcgctcgcaaggggcatgataggaacctgtggaaacgcaccgctcctgcaccgtgtgtacaaccaatcccctcgagcgttttcctttctctcttccccgaagcgcaacatcgtgcggtgcgactccgctgattcatcccgtggagatgcgccgtcgccatcgttgttgccctactcgtcgacggcgcagcggccgggggacggggagaagaggaggccccgtcaacctgtacgcgaaggggtccggctttcctcgacgctctcaagccatctggtcctcggcgccgccgtgattctcgtcgtcgactgttgagattaatccttgtgtgctagattagtgtttgttttatttggttagttacatatccattgtgtgatcatgcatgtttcggcctgattggaggctataatttcctttccttgtaatcgcatatttaagcaatacaagagtcgggaaaaagctgcctagttagcagcaccaaacaagatggtgttcattcctatgttcgcgggagttttgtgtgtgtgttcttgccggcgacgtgagttttgtgtgtgtgttcaccgtgagcccttcgccttgacggccggaggtgttctcaacggcagacgcggcgccgacttttccaatggacgctccgacatcagccgctgccgcttccgccttggagacgagctcctcctcggcggtgccgagcttgtcgttctcgacgcggtcatctggggccgtcagctgcacacttctcttctccacgctggcggtcgccgtggggaaaatttcaccggtgcggagatggagatggagagagaggcggcgtcggacgaaacgatcaaagtggataagacagaatcagccatgcgaaaatacagaaatacccttccacctccacatcctaatacagtgccactacaaggacgagttggtacctcgcggtacctagcgatgacagccgttggatcctatccactcaacggtgacgatttgataccgctttggcctgctgtacggtaaaaaaaactctattatatatgctttattagtagtgtgcggctctaaacaagctagttacctagctattatgagagatcttaaaaaacacaagcacaccggccgattgatgattgtctccaccaccttacatgttggaaagcctagcattgtgcaaaatcttcagtccttcaaagctcacaaacaactcactttgtcagtttatttgtcttaaccaagaagccaaagataaactttacaaatctctctctctctctctctccaagatatactacattactacaggacatacacatgtacatacatccctgtgatgatcttttgatgcaaatgaggcatgcagctaattaacaaatacccctaaaacacacatcccatcaaacagcatgcagcgagccagtgtcagtctgtcagagcatgtatgtgttgcatggggctactctaattaactagctagggctacccagttagcaaattaattagttgatgaataataatagtagatgatgccaaattaggtggcaccaaccaggcaatgcatgcatgagatgagagaggggccctactaaaacactagcagctcagttcagctcagctcccctaaccatgtgggctttgagctcactaatcaccctgtatcatcatatcatgaccgtttggggatgaagaggaaagaacaacaacccaccctgtagcatcacgtgtacacgtaccgtatttctggcggtcgacaggagccgaccgttggttaccagcacgcataattctcctccctctacctcttaatcatctcatctgcaatttggtgtcctcttaacacttgatctccatcgatcgatgatcatgtcgttggcaaccatacatccgttcttcagagatttgcatgatcagggcgggctcttatttgattcatctgcaaccatcgatcgagttcaggtacatcacagtacaaactgaagtgcagttgtaagatgtgatgtttttctccgagactttcagtgcaatctactcaaagatggcagtgtaattaagcagggttttgtactgcctagaggattggagttatgattaattcatggtcgcttgcaagcgattatgaattcgatgatcagttggacgcattggtacacgattcttaaatccggtcgctttctgaagcatggagcttggaggctggagcaggagctaattaagagcttgtttggtttagtaccctaccaaagtatttgtagtgccaaaacttagacatgttttggcactaccaatattttggtagggtagcattttaggtgaatggatttggattgatactaattggaagccaaattttatattatactcaaaaaagttctagaattatgtcaaattaatcatgggcattaccattcacttggcttcaaaccaaaccattacattcactattcaaactaccaaacaaattggtagggcacattttggcatcaatccaaaatggccctaagtttttttatttttttgtgtcagctggaggttgctttctgaatctgtttaatggcctcctctttggagagtgagagagaaaagaaacaaagagtagttgagacaagttgagttgctgttaggagttgtagcaggcactttgtgctttgtgtggcttcccttttgtagttttgccctttggaaacccccatattgggaacctgaactgaccacaggtccaggggcattgtggtcattcaacatagtcagttgaataattgatcgtgtatgccatctgtttgagcggtatactatgggcatattcactttgattaaaaaaaaaccttactaagttttggcattaccaaaattttagcatagttgctgtcggtgatatgggaccgggagtatcgtgaccagaggcttgaggcagacacaatcgcccacgtggcctggcaccttcggggcgtcgggcccgagggtgaggtgtccgccctcctcctgatttccccgagggggggggggtcgggtgactcctgccccggccccgagggccgaggcgccccgaccccgagggccgaggcgccccgaccccttgtggagttagcgccacatgaatgggttgggtgaacacggtgagcctcacctaaccacatttattgcggtctggtcgaacgtgtcacgctgcatgcagcgcagtgcagcgcgttcctttatccggtctgtgaccggtcacagaccggtcagatcacgggttaggtggcgactggcggtctgacgcacgccttgccccatcccgtcaagacgaaagcctctaggcactcgtctcaagccggagctagcgtgtaatctcttagagatggcacgttagccctggttagatttataccaggcttcatcccaaccattacagcctatatgttgtatgaagaagggcgaacatgcagattgttgaactgacgcgtggaggacaagaatgaccagtctgacactggtcatgtcgtcggcagacagccacgttcccacgacgcgcctgccttcggcagaagtggaggtaggtgtgtgccgtcccgtcagaaggatgttcggaggacaaccgtgcaaatctccgtccatttatgaagagaagaaaagtccagtttggaaagagaggggtgcatgtggtatccccttgaagtataaaaggaggaccttgcccatagggaaagggggatgatcttttccagattcggaacttagaacaagtaagaggttggctcacactttgtagctccctcatacacagatccaccaaaacacaggagtagggtattacgcttctcagcggcccgaacctgtatacatcgcccgtgtctcgcgtttcttcctagctggcgatcttttcacataccgagagagcttgagatttcaccctaagcccccggccgaaccggcaaaggggggcctgcgcggtctcccggtgaggagccacgagctccgtcatctggcgcgccaggtaggggataccgctcggggggggggggtgtgcggcacaaccgcatgctcgaaaagatcgcttccaaagagccccagactaccgcggagctttttcagctcgcagaccgagtggctcgtaaggaggaagcatggacctggaacccctccggttccggagtggcagcttcggccgcccccggatccgccgctcagacagggcggcgtgacaggaggaggaagaagaggtcggtccattccggcgacgagggtcatgtcctcgccgtcgagggcgctccgcgggccacccgaaaggggaggccagcgagcgacaaaaagaaagaggctggtactcccgccagggagcgcccagccggcaagtggtgctccgtccacaacacctccctccacgatctcgcggactgtcgcgcagtcaaaaacttggctgagcgaacgaggaagtgggaggaggacaggaggaaggaacgccgtgagggcaagtcgccggcaactccctccggtaaacggcgaagtgaggccaaacagaaggcccccgctgttgacatcgatgacggtgatgatgacctaggtttccaagaacctggggccaccattgccactgtcgatgggggagcgtgtgctcacgtctctcgccggagcctcaaggccatgaagcgagagcttctggccgcggcccctactcatgaggcgacgtgccgggcgcggtggtcggaggttgccctcactttcgaccagaccgaccacccaccgtgcgtcgcccggggagggcagattgcgatggtggtttcccccaccatctgcaacgtgaagttggggcgtgtcctcatagatgggggagcggccctcaacatcatttcccccgcggcttttgatgccatcaaggccccggggatggtgctccagccgtcccaaccgattatcggtgtgacgccagggcacacatggccgttgggtcacatcgacctaccggtcacctttggtggatcagccaacttccgcacggagcgggtgaacttcgatgtggcggacctcagtctgccctacaacgcggtcctggggaggcccgcgttggtgaagttcatggcggcggtccactacgcctacctccagatgaagatgccgggccccggtggccccatctctgtccatggcgacctgaaagtcgcgctcgcttgcatggagcagcgcgcgggccacctcgctgctgcgtccaagcccgagggtggtgacgagaggcttggcacctccgcccccaccgccccgaggcagcggatggtcacatgcgccgaggtcccggtcaagggggttgccctgggcgacggcccatccaagaccacacggatcggtggtcttctggatggcaaataggaagacgcgctcgtctccttcctgcgggcaaacgctgacgtcttcgcatggagaccggcggatatgcccggggtccccagggaggtgattagcaccgtctcgccgtgcggccgggcgcaaggccggtccggcagaaagtgcggcggcaggccccggaacgtcaagccttcatccgcgaggaggtggcgagacttctggaggccggattcatccgtgaagtcatccatccggagtggctggcgaacccggtggtcgttccaaaggcgaacggcaagcttcggatgtgtatcgactacaccgaccttaacaaggcatgtcctaaggacccttaccccctgcctcgcatagatcagattgtcgactccaccgcggggtgcgaccttttgtgttttctagatgcatactctggttaccatcagattcgcatggctagggaggatgaggaaaaaactgcgttcattacccccgtaggaacctattgttatacatcaatgcccttcgggttaaagaatgcaggtcctacttttcaacgtactactcgaatttctttgggtagccaaatagggcgtaatgttgaggcttatgtcgatgacttggttgtaaagacgcgcaaccaagacactttactctcagatctagcggaaatttttgaaaatctccgctccgcccgcataaaactgaaccccgataagtgcgtgtttggtgtacctgcgggcaagcttctcgggttcttggtctctgcccgaggcatcgaggccaaccccgagaagatacgagctatagagcggatgcgcccccccagcaaacttagggatgtgcaatgcgtcaccggttgcattgccgccctaagtcgtttcatatcgaggctgggagagaaggcgctacccttatttaagctcctcaagcgctcggggccgtttacttggacggaggaagctgaacgtgccctcactcagttgaaggcatatctcagctctcccccagttctagtcgccccggggccaaatgagcccctactactctacttagcggcgaccccccaagtagttagtgcagcgttggttgtggagcgcgatgaagacaatcttcatttcgcgcacccccgccctgtgttgacttggcccgggagcgagcagggaggagaagcccccgagtcgaacggtggcctaaggcccctgacgaccggagtcggccctctgcccgcttgtcagacggtgctgggtgcccccgaccctcaggaaggccccgaggccactgcgggaatgccgcacctatcgccctttggccccgaggctaaccctgtgctgactcgacccgggagaaagcagggagaagaggcccccgagccgaacggaggcctgaggcccctgacgaccggagtaggccctttgcccgcttgtccgacgacgccaggagcccccgacccccaggacggccccgaggccactgcgggaaggccgctcctgtcatcctccgaccccgaggtcattggcacagaagacgagtgcgccccgagagcccacttggacgaagaacgccccggggatgcggcccctagcgaagaggatcggccccgccgaaaggtgcagcggtctgtctactttgttagtgaggccctccgggacgccaagacccgataccctcaggcccagaagatgctttacgctattctgatggcctcgaggaaactgcgccattatttccaggcgcatcgggtcactgtggttacgtcttaccccctcggtcaaatcttgcataatcgagagggtacaggacgagtggtaaaatgggcaatcgagctttctgagttcgatctgcactttgaaccacgccacgctatcaagagccaggccctcgccgattttgtggcagagtggaccccggctccagagaccgtttcaatccccgaggccagcacggacccctctcagctgcctcacaccgcccactgggtgatgcagttcgacggttctctgtctctccagggcgccggtgcgggggtcacgttgacctctccgaacggagacgtcctcagatacttggtccgtctcgattttcgagcgactaataatatggcagagtacgagggactccttgccggactcagagtggcagctggactggggatccgccgcctcttggtgttaggcgactcccagctggtcgttaaccaggtctgtaaggagtaccggtgctctgacccacagatggacgcttacgtacgccaagtgcggcgtatggagcgccattttgacgggatagagcttcggcatgtacccagacgggataacatggttgctgacgaactctcacggctcgcgtcctcgcgagcccagaccccaccgggcgcctttgaagaaaggcttacccagccgtcggcgcgacccgaccccttaggggagacggatgcgcctgaccggcccccgaggtccgtcggagtccaggcctcgggacccgaagggagcgctccaagctcccttagattgattgcttggatctctgagatccaagcatacctcacagataagactctacttgaggaccgtgaagggagtgaacgtgtcacaccccgaagttttcctcccaggccaaaatttgaattttcaaatgaccccaagaaaatgcaggtgaaatcaggataaaaccctaagaaaacaatgcaaataataatcggattggacatgtggaatttttcttgagttctacatgtcgaaattcattaacaggatttttagtggaattttcagagctcta

SEQ ID NO: 27717 - DNA, 18057 bp, Oryza sativa
tgggcgtgatggagcggggcgggccctgcgacggcctctgtcgcttccggattcacctaggcacgagaggggactgcccgtcgcccgctggggacgggggtgaaacctgaggtgtggtgtgcttggctagagggggttatgcgaagggtcctgtcacggcctctttccggtatgtcgtggtggcatgtcggcacacggaaacgtgtcgtggggctgtgtcttgtgggtacagttgtacacctctgatcagagtaaaactattcgaatagccgtgcccgcggttatgggcggtcaaccagattcaccgtgattagtctcaccctagtgtaatctgttgaacttggatagtttaggtggatggttgggcctgttgcaacgtgggttagcgttggacagcggatgtttaatactgcttaattattacaactgttttcgcattaaattcctgtttataaatgccagtatttatgcaaatgaaccactctagctcttctttgttaattccctgcatcatacccctattccggtatgacttgctgagtacagtgggtagtactcagtcttgctctacttttcccaaccccagaggtcgggtatgtgtcagatgaaggtttccccgaggagtaggcttcgtccgtgccatcgaggatgcctgtggagtggtgttcccgctgcagtttagtcaaggcttagctccagttatctttcgttttccgctgcatttatgtaagattttacaatgtttgtaagacgtggatctgtatgtcaacattgtcgtttgtgtaccccggctggtcctggacggggattttaatgcacattctgcttggaattctattcgggaatttctgagcgtgacaagttggtatcagagccaggttgaccgtaggacaagccaaatggaaagacctaagagccctctgaatccttttcattgcatatgttctttgcaattggattttgttccgggaaaatggggatctgttcttgtggttcaagggaaaaatcttggtcgctcgtttaaagtgagtttttcaaaacgagtcagtctagggttttagtaaaattattgggatttattcgtcagtcagttgggatttgatgggtgaaatgcattcggtcctagctcggtatcatgggttgcaaggtatttatgctttgttcgttactattattatgtatctaatttcccattattttatcgttatgtgagtctgtcttacttattcgctctcatgcaaaatgatctatgcataaaatttcgcttctattcgattctcttatttgagtcttttattgctttatttaaatttggatttgagcatgcattgatcctactcctttgtcttctctagatggccggtcacccacccaaccaccgcggagaaggcatgatcgactttgtggcagagctggcacgtatgacactggtggtgggctaccccgacgcaccggagtacacgaccattccaccgctcagtggcgagcttcctcaccgtgtccgcttggaggtccatggctacgtggggacttgcctcgctaacatggcgggttgaggcatctggaggcacagcagatcacgcctgtcaggaggcagcctacttgatgatggccagactacgggagcgccacaactacatcttccacgacacggcgtaccgctaccaccccagtcgagccaacggtgatggcgtcagctccttccgtccgacagctggcgagaacgacaccacctttggtcacatgtgtgctgtgatgagaggattggataggatgcactcggacctgcacaaggcgaccaaggccttgaatgatgggaagctcatgaggatcgtcgctctgaaggacgagatagcgcgcctgaagaaggagaacgctcagctaaagggtctcccagcaccaggaggagtccggatccgcactacgccccgtaagaggacgactgcacccgtgcgcatccagcttgcgcccaggaacccacctccaccagcagctcccgcagctccggcagttcccgcagttcctccagctccagctccagctccagctcccgcgttcactctctccttcgctccagcatcagccgccagaggtccagccagtggtaccggaggttggttgtccgctactcccagtggcagcgacgagactgatctgtcaggctccaggagccgctcagagggaccaggtgacgagcaggaggacgctttcgactccaccgaccgcaggagccgttccgagcattaggctcgttttcccattagtttatcgattgtttagtttctgcttgttagtttgtgtgtttaggttgcttgtttggggtcagtcgacggtcgatatcatgtgcctatgatatggctgtcttaataaggatttttgcttgcctttttaagtgttttaattcagatcagaacaattgcagttttaattcctatataataaagcttagttcttgagcatctgtttttcttcttttccccgcctgctcttccctccagatggtctacaccaggactggcaaccgcacgacaggcgagggcagcaacggcgaagaacgcgctgatggcgtgcaccccaacagcgattccggcaatggtccgccaccacttcccgagaatccgacgcttgcccaagttatggcacatcagactcagatgatggcagccatgatgcagcagatgcagcagcagcaccagcagatgcaccagaggatgatgcagcacgccgaacagcagcaccagcagtttggtccccctccccctcagtccaagttgccggagtttctacgtgtcaggccacccaccttctccagcaccaccaaccctatggaggcaaatgactggctccatgcgatagagaagaagctgaatctcctacagtgcaatgatcaggagaaggtcgctttcgccacacaccagcttcagggtcctgcgtcagcttggtgggacaaccacatggccacccgcccaccgggtactgaagtcacatgggcagagttctgccgtagcttcaggaaggcacaggtgccagacggggtcgtggcacaaaagaagagggaattccgggcgctccatcagggcaacaggactgtgacagagtacctccatgagttcaatcgcctcgcgcgatatgcaccagaggatgtccgcaccgacgccgagaagcaggagaagttcatggcgggtctggatgacgagctgaccaaccaactgatatctggggactacgccgactttgagaggctggttgacaaggcaatccgccaggaggatcaacgcaacaagatggataggaagaggaaggccgctcagttcagggcacatcagggaagtcaccagaggccgcgcttcactcccgggcagcagggtggacctaccaccatgattgttcgtcaacaccgcccattcaaccccagcaacttccaccagggctccagtggcagccagaatcaccatggaagtcagcccaaccgcggtacagctccacgcccaccgatggcaccggcacagtcaggccagcccgcacaagccaagaaggagacgggagcaaaaccagggtcctgcttcaactgtggcgagcttggccacttcgctgacaaatgcccgaagcccaggcgtgccggaccaaggtttatccaggctcgtgtcaaccacgcatctgcggaggaggcacaagcagcaccagaggtcgtactgggtacgtttcctgttaactcaatccctgcaacagtactttttgattctggtgcaacgcattctttcatctcgaagaaatttgtcgggatgcatgggttaataagagaggaacttagcacaccgatgcgggttcataccccagggaatagctccacttcggttcaattcagcccttctataacaatagaaattcaaaggtcaccatttctagccaacctcatccttctcgaatccaaagacctagatgtcattcttgggatggattggctgaccaagtttaagggggtcatcgattgtgcgaatcgcacagtcaccttgaccaacgagaagggagaaacagtggtgtacaaatctctagtctcacccaagaaaggagcctcgttgaatcagattgagacgaaaatcccagtggacaccgaagagaagaacttgagaaaattggaggacatacccatagtctgcgagtatccagaggtgttccccgaagacctcaccaccatgccacccaagagggagattgaattccggattgatttggcaccaggaaccgctccaatctataagagaccgtacagaatggcggccaacgaattagcggaggtcaagaagcaagttgatgaacagctgcagaaagggtacatacgaccaagcacttcaccttggggcgctccggtcatttttgtggagaaaaaggataagacaaagaggatgtgcgtcgattatcgcgcacttaacgaggtcacaatcaagaataaatatcctttgccgcgaatcgacgatttatttgatcaactgaaaggagctaaagtgttctctaagatagacctgcgatcaggctaccaccagttgagaatccgggaagaggatattccgaagacggccttcaccactcggtacgggctatatgagtgcacggttatgtccttcggacttactaacgcacccgcattcttcatgaatctgatgaacaaagtgttcatggaatttctggacaagtttgttgtggtattcatcgacgacatacttatttattcaaagtccgaggaagaacatgaacaacatctccgtctagtactcgagaagttgaaggagcaccagctatacgccaagttcagcaagtgtgacttctggttgacggaagttaaatttctgggccatgtcattacagctcagacgaaagacttccaagtctattgcgatgcatcccgtcacggacttggatgtgtcctaatgcaagagggcagagtggttgcgtatgcctcgcggcagttgcgtccacacgaaggaaattatccaactcatgacttggaattggcagcagtggtccatgctttgaagatctggaggcactatctggtcggcaaccgctgcgaagtatatacggaccataaaagtctgaaatacatcttcacccaaccagacctaaaccttcgacaacgaagatggttggaactaatcaaagactatgacatgagtattcactaccacccgggtaaagccaatgtggtggcagacgctttaagccggaaaagttactgcactgctctatgcatcgagggcatgtgtgaggaattgcgacaggagcttgaacatctcaacatgggaattgttgaacacgggttcgtagccgctctggaggcacggcctacgctcgtggatcaagttagagccgctcaagtaaatgatccggaaatagcagaactgaaaaagaacatgagagtcggaaaggctcgggatttccttgaggatgagcatggcacaatctggatgggagaaagattgtgtgtaccggacgacaaggaattgaaggatctgatactcaccgaagctcatcagacccagtactccattcatccaggcagcactaaaatgtatcaagacctcaaagagaagttttggtgggtcagcatgaggagagaaatagctgaattcgtcgcactctgcgatgtttgccagcgagtgaaagcagagcaccaaagaccagcaggtttactccaacctctccaaatcccggaatggaaatgggaggagattggaatggactttataacaggactgccccggacatcatcgggacatgattcaatctgggtagtcgtggatcgactcaccaaggtggctcactttataccagtacataccacctatacgggaaagagattggcagaattgtacctcgcaaggatcatgtgtttgcatggggtacccaagaagatagcatccgaccgaggtagtcagttcacctcaaagttctggcagaagctgcaggaagaattggggacccgtttaaacttcagcacggcctatcacccgcaaactgatggtcagaccgagcgtgtcaatcaaatcttggaggatatgttgagagcttgcgctcttgattttggtggagcctgggacaaaagcttaccatatgcggaattctcgtacaacaacagctaccaggccagtctacagatggcaccgtttgaagctctatacggccggaagtgccgcacacctcttttctgggatcagacaggcgaacgtcaactgttcggaacagaagtattagcggaagcggaagagaaagtcagaatcatcagggaaaggttgaggattgctcagtctcgacagaagagctacgcggataaccgtcgaagggagctcacttttgaggcaggagattacgtgtatcttcgtgtcactccgctccggggagtacaccgtttccagacgaaaggcaagttggcaccacgcttcgtgggaccatacaaaattttggaacgaaggggagaagttgcttatcagctagaacttccatccaacatgatcggcatccatgacgtgttccacgtgtcccaactaaagaagtgcttaagggtacctgaagaacaggctgattcggagcacattgatatccaggaggacctaacatacgtggagaagccggttcgcatacttgataccagtgaaaggagaaccagaaacaaggtcacccggttttgccgagttcagtggagtcatcattcggaagaggaagcaacctgggaaagggaagatgagttgaaagccgcccatccgcacctcttcaccagctcctccgaatctcggggccgagattccgtttaaggggggtaggtttgtcacaccccgaagttttcctcccaggccaaaatttgaattttcaaatgaccccaagaaaatgcaggtgaaatcaggataaaaccctaagaaaacaatgcaaataataatcggattggacatgtggaatttttcttgagttctacatgtcgaaattcattaacaggatttttagtggaattttcagagctctagaaataattttaaccaattaaaattgagcaagcaatattttattccagggaaaatccttttcctttttctttttcttttccctccctttttccctccttttttttcttttcggatgggccgccggcccattcccctccttcctccccctcctccttgctgggccggccgcaggccgagggcccagcctggcagccgccgcccgcctcctctctcggggtcgccgacaggtggggcccacctgtcgggtctttcccccacctcccgccgatcccggcgcgccgccgcgccgaaaccgccgccgcacccacgcctccgccttctccgggccacgtcgaccacgcccgcgcgtgcgccgcgtctcccgcgccctttcccctctccctcccgttcgcgcccgcgcccgagatggccgggattcgaaaaccgaatcccgcctctctctcctccccactcccccgcgtcggccggcgaatcccgcctcttccggccacgtccggccctctctccccctatttaagcatcgccggcaccccctctcgctttttccccatttcgccgacccctcccgagctccccatcgcctccgcgccgtgcaaccacccgccgccgccgcttttgctactccggccgccgctagccgccgctaggctcgtcgccgtctcgcgccgtcgccgccgttagcttcgcggggtcgagatctacctcggccgccccttccccgtcgaggttcgccgccggagacccatccccgtcgtgtgccggcaagtggcgccatggccgccgccttcggccggcgctctcgccctcccacgctctgtcctctctctctaatccctctccttttgttcgttaggaggttccggagctcgtcccgccgtcgtcgtcgtcctccgtcggccgccgtcgtcgaccgttgtcggtgaggcttccccctcctctttctcctttttcccgtaccgtgtagccgcgtgcgcgccgcttagccgcgtagccgccgctcctcctctagccgccgctccccgccgccggtcggtcgccttcggtcgccgccttgcgccgctgccgcatgcgcgccgccgccgtgtgagcgccgcgccgccggcgccatggtcgccgccgtctcgcgccgcgcccgcgcgccccggccgcgaggtcccgccgccgtccgatctacccttgggtagatcggggccgtcggttcggccgccacgtggcgccgccgcccctcctttcccccgtgccgctgacccgtgggcccgcgcgccgccaccccctttctctcttccccggtcgctgaccggtgggccccgcctgtcggcgccgcgccccctcgctgacgtcagccctggttaatattgcgcaataaattatttaaggattttggttatagtaataaacacagtgaatcttctaaaattcatatctaattcatccgagctccgtttaatcccattcaagtctcagtaaatcaagaaaaatgtgtagaatccattaaaaatggttttgttctctgtttcagtagtcttatagcctgtttgcaatgtttgctttgtatgtcgctagattccgatccctccgacgctccggtgtacttcgagatagtcgccgaggttcctccagcagcagagcaaggcaagtcatgcttgtcacttgaacatgttgatcctatattgcaaatgctctattgttttctttcaaatattgcattgttttataatatcactatgggatggatacctattgttacagccatgcttttggatatcatgctcctttgttagcttgggttataacatgattagactttggactaggaattgcttagccatgcttagttcaactagcacacattggggatctcatttaaaacctagactataggtttataggataatgttggtttaataccaccgctccggtgttggttaattaaaatgaatcacatggtgggctgtgggtgcatggttttgctggtcgcacccatggcagttaaggaccggttcgcgggatgccctggaagaatttatcgtacttaccacaagccagcgtgggcaacggctgggcttgtagtgtagctttcctctagtcgacgcatccaggcaagggtgggcgtgatggagcggggtgggccctgcgacggcctctgtcgcttccggattcacctaggcacgagaggggactgcccgtcgcccgctggggacgggggtgaaacctgaggtgtggtgtgcttggctagagggggttatgcgaagggtcctgtcacggcctctttccggtatgtcgtggtggcatgtcggcgcacggaaacgtgtcgtggggctgtgtcttgtgggtacagttgtacacctctgatcagagtaaaactattcgaatagccgtgcccgcggttatgggcggtcaaccagattcaccgtgattagtctcaccctagtgtaatctgttgaacttggatagtttaggtggatggttgggcctgttgcaacgtgggttagcgttggacagcggatgtttaatactgcttaattattacaactgttttcgcattaaattcctgtttataaatgccagtatttatgcaaatgaaccactctagctcttctttgttaattccctgcatcatacccctattccggtatgacttgctgagtacagtgggtagtactcagtcttgctctacttttcccaaccccagaggtcgggtatgtgtcagatgaaggtttccccgaggagtaggcttcgtccgtgccgtcgaggatgcctgtggagtggtgttcccgctgcagtttagtcaaggcttagctccagttatctttcgttttccgctgcatttatgtaagattttacaatgtttgtaagacgtggatctgtatgtcaacattgtcgtttgtgtaccccggctggtcctggacggggattttaatgcacattctgcttggaattctattcgggaatttctgagcgtgacagaacgcgtccaacgcatttccaaacgctacgtgctgatagaagggaccctctatcggcgcgcggctaacggaatcctcctgaagtgcattcctcaggaacaaggcgttgagcttcttgccgatatccatgaaggcgagtgcggagcccattccgcctcgcgcaccttggttggcaaggcctttcgtcaagggttctattggccgacagctctcaatgatgcagttgatctggtccggcgatgcagagcgtgtcagtttcacgccaagcaaatccatcagccggcccaggccctgcagatcataccactttcgtggccatttgctgtctgggggctcgatatcctgggaccgtttaagcgggccccgggcgggtttgagtatctgtatgtcgcgatcgacaagttcactaagtggcccgaggcttatccggtcgtcaagatcgataagcactctgcacttaaattcattaagggcatcacggcccgttttggagtgcctaaccgtatcattacggataatggcacccaattcactagtgaactcttcggcgactactgcgaagacatgggcatcaagctctgcttcgcctcacctgcccaccccagaagcaatggccaagtggagcgcgccaatgcagaaatcctcaaaggccttaaaaccaagaccttcaatattctcaagaagcatggcgattcgtggatcgaggagttgccagcggtgctctgggcaaaccgaaccacaccaagccgagcaaccggggaaacgcctttcttcctcgtctacggcgcagaagcggttctcccatccgagctcaccctgaggtctcctcgggccaccatgtactgcgaagctgatcaagatcagcttcgcagagatgacctcgactacttggaagagcgaaggaggcgcgcggccctccgagccgcgcgctaccagcagagcctgcggcgctaccatcagcgccacgtccgggcccgatcactctgcgtcgacgacctcgtcttacgccgcgtctaaacgcgtgctggattgagcaagctctcaccaatgtgggagggtccgtatcgagtgatcggtgtcccccggccgggctccatacggctggccacgggcgacggcactgagctgcctaacccgtggaatatcgaacatcttcgtcgcttctacccctgaggggggggtcgagtgtcaggttttggctcgggccaaccccgcacccccctcgggtgtgcagggttggccgggggctaccacgcatgcacattcttatttctcttatttcagcatttcaataaaagcagtttcaatttcctaaaggttgtgtctgtgccgttttttccttttgaagaatcttgacttgaaataaggtcactcgtgctcaaccttgccctcgggggctcggttcggtcagctaaaatcgccaaacggggcccagaaccgagccgtgccccggggcgtggtgaacttcgggggggaatcggcaaaaacccacaatcgggtcacccataaccctcggtcaccacgttcccggcctggccagcctcgacatgtggatctccccaggcactagccccgacccgagccattagaggactgggacttgggcacgagcccttaaatcaagctaagacacaaaagaggaccacggcacagatcatcctcatctcatacgcatagcaaaataaaattgacacaaattttttcatcatttttgattccagattaagttaatctatacaaaaaagaggcatgaagaccttagaagaaagaaaaagaaaaaactggagtctggcgggggcctgggggctcagtccgatgcgcccgggtcgccggcctcgtcgtcacggtcgtctgcaccgctggcatcgccctcctcgtcggagttgggggcgaacgcgagccgaggggccgacccctcgaaactgtggacgatgtggtcggcggcatcccggacccgcgcgcgcgcgtcgtcctcggtcccgggagggaactcttccagcgccatccatggagagaagttggggtccctggcctggtaactcgctagtacgagttcaaccgctccttgggcgaggtccctcgaggatgacttgatggtcttctcgagctcctcggggagttgttggagagcccaggccatcttcgtgaggtgcggagcgaggccttccaggttggtggagtgcgtccttgtctggcctttccagaggcccgcttgccgaccggcgcgatccaggcgggagaccgcatcccaaagcatgccgggccctatttcgcccgccaagcggagggcctcggcttccccggcggatgagtctagcgcgcactgcatgtcggcgatggtgagttcggcagctgcgaggcggccggttaagtcgctttcgcccgcagccgccccgctgatacgcgccctcgcgtccagctccttttcccgcgcctcgaggtcggcagcccgctgctccagtgcggctctctcggcgcggatggattccaaattgcggcgtgcctgctctgccagcgctgcctcacggagggaaaggctatccgccaaccgttgcgccgcggcctcggcctcttcgagagctcgctcccgctcagcgagtgcgtcctcgcggaggcggagcgcggactcctcttcggcgcaggcggcctcgtgcaccgccagcgttgcctcccggatagcggcggcggcctcgcggtccgccaagcccctctccacggcgccggcgtgttcctccaatgccatagcacgggcctcaagggcctcctcgcgccgccgggacgccgcttcgatctccgttgcccgccgctctcgggcagcggcggtgtcaaggaccccttgggcggcgtcgagctttttctttagctccgcctcccagctcccgtgttgaaggcggagggtgtcctgcgcctcgatcatcgcggtggtggcaatgagggcgacctcccgctcctcctccacctctcgggcgatctctgccagcgccgctttgcgggcttcaagctccgaaacgtgacggcggtgagccttacggcccacctccaccatgacatccaccgagcgccgcccctcctcgacacgcgcccatgcggcctcgagctccgctcgttccgctcgcagggcctccacttgggcgctgaacccatctagcaccgcggtgtttgcggcggccaaggcctgcagaaggggctcggcgctcagcgaggcgacagaagacgaggagaagagccgccttggagagaatgcgacgcggctcggcccgccggaggacgcactgggctcggggatgtcccccggacccgtttggtcctgggcgtcgcctggggaagtgcgcccaggcgatccgcccgcggcctcgtcgcgagccgccccggaggctgtcgcctgagcgtcgcccgagggagtgggcccaagcgacgcgccagcagctttgtcgtgagctgcctcggaagacgccatcgcctcagcctgacgagcccgggcggcttcctccttagcagcttcttcggcttggcgagcccgggcggcctcttcagcttcccgaaggcgatctgcggcctctcgccggtcagattctcgcctccgttcctctgcggcccccggatcttcggcctcggactggccggacttgggatggcgggaggaacgtgacgggacatcgctgaagcaaaagaaaaaaccagaagacaaacaagatgggtaagagaaaacttgcttttgggataaaagaaaggcggtcgcaatgagagtgggacgaacctgcgagggggtcggttaaatgaccaccttggaggggaaatcaggtttccccgggatggttccgtctcccccatcttgcggagccgtttcttcttgcgctccccctcgggctgcgatgtcggcgcggccccctccgggtgccgactgctggcacgcaccgccccgccccctcggggaggagatgggggaggtgttcctcccagcttcctcttcccctgggcgtcggcagggcggctgctccccgagcccccgacgcggggcccagaagcacgaccccctcctggggtagattgttccccccggcggctctcgcccgcgccgtcgtggcccttaggagtttcctcctctgaggccccgacccccatcataatggtcagaatggaggcgcggtcgggatcgctgcagagggggaggattccttgaggaatgagagacgtctccacggagctgaaattcagcaccctttggaccacgatcttgaagtcctcgggagcccaatcccatctgactccctggtgggtccgcatgtagtcttcggacccggtgtactcccaggcgcctcgggcgcgccgttggagcggcgcaatccggcgacggaggtagtcaccgtacaccatggcccctgtgagcccctgggatcgcaggcccgccaggcggtcgaggacggcgtcatagtcatcccccagatctaccggcgcccgccagctggagacctgcgccgggggctgacttggaagtcggaggcgcgcttcgttggcgaggggggtgtagaaccagtcgctcttccagtcgtcccacttcttgcggagggcgcaggggatgtagcggttcaacaccggcccccgcggctggaagtagcagccaccaaccaccgacggcggcgacaccgactgcacggtgaagaaccaccggaacagccgaagagatgggcgcaccccaatgaacatctcgcacaggtgcgcgaagatggccaatgtcatcactgcattgggggtgaggtgcgccatctggagatcgtagaaatccagaacatccataaagaaagaagaaaatggcggaaccagccctgccattgcgaaggggaggaagaagacggaccgccccgggtagtctggtgccgggcgtccctcgcccagcatcactatctcccggtcggtggcagattccggcataaagcggcgcggcagcccggcatgcctctcgctcacgatgcgagaaggcggaagtacgcttccgtcgagcagagcggaaccccgagccatggcgccggagaaagggatgattgagagcgagcgcgtgtggcgaaggtagggcgcagcagagaaagagttagggctcaagcggcgaaggcaagaggaataatggcgaaaggaagggagcaaaacttttcctcggtatttttatacccttgccatagctgggcccggctcctcgtttctcgcgcccactatctcgctccctcgtttctcactatctcgctccctcgtttctcgtgcccacgcttccactaatcccattcgcccgcttgcggcgcatgaggtggatatgcgattgtggcagtcgagataggtcgtatcgtgcgcgcattaattacgctcgccggccgaagcgacgttaccatatctccaggcgaagcaaatcagctcacccagattcgtgcgctgcttaggtgatgtggcaagtcttaaagagaccgcccattatggacagccaagttaccattaccgatgtgcatggtttgagaccgttaggtttctgcgcaaccatgaaaaccggtcccacctgtcaccaggctttaggagtggcgttacgcccgaccgcttcccttgagaagggcgatcgccctggcataacgccgggggctactgtcggtgatatgggaccgggagtatcgtgaccagaggcttgaggcagacacaatcgcccacgtggcctggcaccttcggggacgtcgggcccgagggtgaggtgtccgccctcctcctgatttccccgaggggggggtcgggtgactcctgccccggccccgagggccgaggcgccccgaccccttgtggagttagcgccacatgaatgggttgggtgaacacggtgagcctcacctaaccacatttattgcggtctggtcgaacgtgtcacgctgcatgcagcgcagtgcagcgcgttcctttatccggtctgtgaccggtcacagaccggtcagatcacgggttaggtggcgactggcggtctgacgcacgccttgccccatcccgtcaagacgaaagcctctaggcactcgtctcaagccggagctagcgtgtaatctcttagagatggcacgttagccctggttagatttataccaggcttcatcccaaccattacagcctatatgttgtatgaagaagggcgaacatgcagattgttgaactgacgcgtggaggacaagaatgaccagtctgacactggtcatgtcgtcggcagacagccacgttcccacgacgcgcctgccttcggcagaagtggaggtaggtgtgtgccgtcccgtcagaaggatgttcggaggacaaccgtgcaaatctccgtccatttatgaagagaagaaaagtccagtttggaaagagaggggtgcatgtggtatccccttgaagtataaaaggaggaccttgcccatagggaaagggggatgatctttccagattcggaacttagaacaagtaagaggttggctcacactttgtagctccctcatacacagatccaccaaaacacaggagtagggtattacgcttctcagcggcccgaacctgtatacatcgcccgtgtctcgcgtttcttcctagctggcgatcttttcacataccgagagagcttgagatttcaccctaagcccccggccgaaccggcaaaggggggcctgcgcggtctcccggtgaggagccacgagctccgtcagttgccaaacattttggcaagttgccaaaattttggcaagatttcttatatagttaccaaaatttggcagcaaactaaatttagccacttttttggcagccttaccaaaatttggtaaggttgaaaatgacatcaaagtgaacatgccctataatttatcattattactgggatatttattctgttatctaaaaaactggaagctaatagatagttaactgatagtttgacaacccatctgatctgatggtgcatctttagataattttgatacttttgcattatccaaccatttcttccttgagggataatgagaagagacggagataatacggtgacaagtattaatgtatctagtggtctcctcccacaatcatgttaacattctttgttcgtctcgtcattattccactaccttcttaaaatatctgggcaatttgcaaatagatattttgataaaataaatataattttatgaaatttacttaactctatactaaaataaggaatcaagaaaacgaatgaccaaaatgttgccttccttccaaatactgtccaatgttgcgtatctttacatcgtgctatgtcaaggttccacccatgctttgacatagtgttgatcactgcactcgcttctcattctctatggtgctatgtgagatagattaaaaatgaagtcagagcatgcaaaacgagaaaaccaaccgtgtgtaattaattgagttataattattataaatttaaaagatagatttatttgatagttaaaaaagttttattttaaaaacataatatttcacagtttaaaaaatttacatcttaatcgagaaaacctaaaccaatctgtcgtaaccctcatcgggtgctcttccgtaacactgaatatgataagggccctttgaatcacaggattgaaaaaacgtagaaataggaaaaacgtaggattttgatacgagtgcaagtgtaaaatagaggattgcaaaaacacagttaagacacaggaatggccgtttgattggaccgcagaaaaacacaggaattagaggagaaatgaagattcataagaaagtttccatgagatagaacctcatgctaaatttcctccaaaacttgcatgtctttaggcattccataggaatttcatagaatttcgtaggattcattcctttgattcaaagtgccatataggaaaaattcctataggaatgaaatcctttaaaatttctatgtatttcctttgaatcaaagggggcctaaatcctcacatacccctcccagcccacaaaaaacgaagttagtactagatgtggcatattctagtataatgaatttgaatagaggtatgttcaaatttgtagtaatagattatgtcatatccaatact

SEQ ID NO: 27718 - DNA, 10204 bp, Oryza sativa
cccccccccccctcccccatccccttcttcctctctgtctccagcgcacgcacgcacgaccacctcgcctcctctcctctcccctcccctcccccacctcgcctcgcctccacgcgcgcgacgcggccggcgacggcgagccgcacggcgcgtgggcgtgcctctcctcagccggcggctagccctctcctcgcgcgggggcggcggcggcggcggttgttgctggcctcattccaccgccatccctcctccgtgtctcgggctcgactcggtggtgaaggtatccatgccattccttttctctctcgcagccctctcctccctggtggtggagactggccggctggggcgtgggagtgtctgcgcttgggcttcgttgtgtcggtggagcgagattccggtgggatttgggggggcatctgtcgctgtaactcgtaaggggttgggggtttgacacggtttcgttttttttttaagaaatgttgtttccagtgatgttgtcgtgtctcaaaattattcagaaattttttatgtagatttcttggcgtagtcagttgtttcaggggaggcgcgtctccatgaaatctctgcatgttttacggggctttgcctgtagcctgaaatttggggggagtgggaaaaaaatgtttcaacaaaggcatttcatatcaagttgttttatgctactgaagtgatgatggaagatgtgataggcctaccaaggccggaaaattttccgcgtcatgcatttttcgttgcgagcaaggggcattgtgaggttttggtaactcaaacctgcatcgtgtctctgtttaggagttctcccttccccacgccacccgtctttgtttttggtaatgtttaacctgttacagaaatggaaatagtgaaggatcagtcagctgctaattactaccagtagctgttaggatgccgctgtgccataatgcaaagcataaaaagagatacatgatgtactaagaatgaaaataaagatctgtaattttttttaaaaaaaatccaaaccaaagaagccccttagtttaccttttcttttttttttactgtaattagccctctgtgatgtgtggaagggctgttcatctaaaatctccttgatatttcataatcagtatgtgtgattcttacaattgtttttctttgtttctattagcatactatttgttccaagaggcacacataatataccgatatgcatataatgttcattcgcttttctatttgatgtctttgtcaggtcaggtgctgatgcaagatataggttgttctatgagaaggatagctgtgcacatcaagacccaaatataatctcacttggttgtactatagtggtggttgaacactaagatatagcttattctgttgtttcaaaaacatgggttcgaggtttccatcgcatcagcttagcaatggcctgtatgtgtctggccgacctgagcaaccgaaggagaaggccccaaccatttgttccactgccatgccatacactggtggtgatataaaaaaatctggagagcttgggaagatgtttgagctccacgctgtcaagtcaagaaaatctggtccactgagcaatgcaccttcgaggaatgcgtcatttggaggtgctgcatcaaactctggacctgtccctaatgccggggatcggtccaactactctggttctctatcatcttcagttcctggtgctagtggatcagcaagagcaaaatctagctccggacctctcaataagcatggagaaccagtaaagagatcatcaggtcctcagtctggaggagtgaccccaatggcgcggcagaattctggccctctccctcctatgcttcctacaactggacttatcacatctgggcctatcacatcggggccactgaattcgtctggtgctcaaaggaaagtatctggacctcttgattctgctgcatccaagaagacgcgggccacatccttttctcataaccaggctgttactaaaatcaccacagaagacagttactcaatcacaggaagcctttcgaagctaatactcggggcagtgggtgtgctctttgtgttggggctcatagcaggcatcttgattcttagtgctgttcacaatgcaattcttctgatagttgttctggtgctgtttggttttgttgctgcacttttcatttggaatgcttgctgggcaaggagaggtgtgattgggtttgtggatcgctattctgatgctgatctaagaactgctaaagatggacagtatatcaaggttacaggggtatgtaaaatgctgttgatttatcatatcatcctatcagtcaatactcctgctttattttcagatgagcttcttccagtttagaagattacatatgtatttttttttgagaggggagattacagatgtacagatgttggtacatagattcagtgcatgatctttttttctgagataatatgccaaacaattacttaagttatcatgtctaacttcacaggttgttacttgtggaaatttccctctcgagtcctcgtatcaaagggttccaagatgtgtgtacacttcaactaccttacatgaatataggggttgggactcaaaagctgccaacacccagcatcaccggtttacctggggattacggtcaatggaggtgagttctttttcatgaatgatagatacccattactaagtgggcattgagaataaattgatgcagtcaattacatcatggtatacaggctttattgaagaatattgaactttgagaatttgtttctctgatctctatgtaccttaacctctgacaatcccaatgcaatcatgacagcaacacgcagtggatttctacatctcagattttcaatctgggctccgggcattggtgaaagcaggatatggtgctcgagtgaccccattcgtggatgaatctgtcattattgacattgatcctgacaacaaagacatgtcccctgaatttcgaagatggctgcgggaaaggaatctctcaagtgatgatcggataatgcgcctaaaagaagggtattattttcttatttagttggtttgcacctagaatgcacaagctaaaattgtgatcttcaatgacctggtaaaatatcttagtgaatcactacatttacttcatcacctgcagatacattaaggaaggcagcaccgtgagtgtgatgggggttgttcaaaagaatgacaacgtgtcgatgcttgttcctccaccagagcccatctctactggttgccagtgggccaagtgtgtcctcccaagggacctttatggattagtcctgagatgtgaagatacctcaaatatcgatgtcatagcggtttagcaagctgggtgttggaacttagaagagctgctgctaaaaaagtgctttttaaatgttttgacttggagtttgtttcgtggaatgttagaattgagaaaaatgtacaaatgttggggatgattaaggttagtaaaaatagatgttaagctggggtttggatgtatagtcttttcttgtattttgtcctttcttttcacctattcctcggttatgagcactgaatgcttgtcttgtgaaatatgatggcttggttattactaccatccagctgtttgaagacttagtgaaattgggtaaacaactatatatgtttttttcaactagatgtatcactgctgttaaagcccttccatgttccatttaggtgtctatgttatgcatgtattcagcagcattcacttagcatacctatgtaccatgtctacacttataccatgcctgcatttaatctcaaatgtcactgactattgttgaagaaacattatttaaataatcctttgaagcaaatagaagtacccatgcattatagctgcagcctgcaggcaacactctggcccagtgaacagctacattacaattttgatgtaatgaatatatatgcatttcaatgtgagctgggatgctgggcaagggagttagctcaaaatggtggcgcatgccaccgaagcaatgcctgaagaagtcactgctcagggtacaggtctctctgtccagaattccagatgcagccatgcaagccattccaggctgccatctgtgggggttctttgagatgctcaacctttggccagtttcatttgtcaccacattgaatcaaggagcaaagcttgggctccaattgaccgagttctttgggatgtgacaccgttttaccatggctgtacctgcaaaggctgacttgtcaaggatatctaggattggtggtgaaactgtactgtcctctgaacttactggaacaaatggagccagatagcatgagacaaaactagaaggcatagctaattggttattcctctccctggtaaggtaagaaacttagaataggcctgtggaaaaacatttgaaaattcaccacatgccttaacttgtgtgagaatgcagcacaacacatgatgttagatatatctattaaaattcctccttttcacattcatgcagtatttcagaagaagaaaatcttttaatgatgtggttattgccatcgaagagaagcaaacctatggtatgttcagtttttctttttcttcgaaatttcttcattgcaccagttgcatgtaaggtgatcttaattaagaggcctaactctttagtagtagaatctacaattacgattttacaattgcgatcctacttagagacctccggttccgattcaagatctcgattgtaacaaccttgttgcatgagtcttcaacaaacaccgaaaattagctaataagaatctaccattaaggaacaagaaggacatggatgcaatccatcgcaatcaacaaaaagtacagatctccacaagcaagaattatgggacaaaaccttcaaagcatcccttcattggtgaatgactgaaaggtgatcttggtgccgaggggatatcttacagggccctagctgccgcacaacagatccagaatttcagaacaggtattcccttttcctcatgtttttcctccattttttcctatctgaattcgttcatgatctgtcaatcattggtgaaacagtccaaatggcaaatgatccgaacgaacagttggtcccggcagcgcaataacaacatagtaacatactaacatgcttgtgtatcaatcatcaactgtattttttttaaaaaaatatattactcagctaaagagtcctcgcacacaaggtgagagatgaagttacaactttcatccgtccaaaagtctgttaaagatttttttttttgctgggccagctaagataggccaaccaaatttacttaagattgaggaatatgtataaaagtctattaaaagattgaggaatatgtacaaaagtctattaaagactcacaccgggctctataagctaaagcataactactacgattctggattctattagccttcttgatcatgaactgtattataggttgtaagggaaacctctctactgggtaaccatggtcaattgatcgattcagcagttgacactatcatcatccagacatcatcatgaccatgattcagtgaaacatgggctctcatgtggcaatgcaagatccgtatgcatgaactgtcctgttgtgccgaaccagattatgaacttggaattgcagaggccatgaacaattgcagacggtccccaaggaggccaggaccaaagataccgatttactgatcatcgtcacttcgtcagtcttccgcgacgatatccccttattttcatgaccgtctgaagatccattgtgtggtaaaacacatcaaaagaatccttctcttgattatttgtgtaagggaacagacattctctggagaacatgcgtactatctgatcgaggaacggcaacctgaattggtgaacaaataaatactacacattgattgcgcaagaaaaatcaatgttgtgatctcttcccgacatcgcggatcggtgacagatgcgctcatgtgcacagtacggtcgtggaagaagacaagcaacgccgatgcctgattacatatggaggccaaattcgtgtaggtgaaattgtgcagcatttcatcaggaattcaggttactgaaaatcagaggatgcgaacacttttcatcacttcctttgagagcttcacgtttatactttataaccaaagagatgactcatcagtaatagcatgtacaattgtgcatgatgcaaatatccctaccatcttaataaaaacaaagtcgttctccttccattccctcctctcacagcgcgctcgcacgtgtagcttacgtaaccattggatctaggtccagttcttttcttcaataaaagttggttgaagattaagattttcgtgacacgtatttcaaactgctaaacagtgtatttcgtgcgaaaactttctatatgaaaattgctctaaaatatcatatcaatctatttttcaagtttgtaataattaaaactcaatcaatcatacattaataccacctcgttttacgtaaaaaacttaattttcatctttaagagaaaagaacaccaccctaatattttatcccaatcatagatacagtctatccctagtctgatccattataatcgttggtgcatgctactagaactaatagaacagaagaattttggattttttttttcggtaggagttgcagcagaagctccactgaagctttcgcttctgtacgtcggtcgaaatgccgttccagcccaacatatttcggcccaatatatccgcacaggtctgggattatattccggcccacgaatctccgcacgggtttccagcacaatattccgcacgtacgtgggattcccgctccggcccaatataaggcccgacactttcgaagggttaatctggaccgttgcataagattcgtacggacaagatcgaggaagcgggaaggtcaagcggaattttgtagaaatagccctcagaattactttatttcacccgtttggcctttccccctcttctggccacctcggcggttcgtcgccggcggcgatggcggcgacggtgcggttcgggctgctggtggcgatgttccaggccatgtcgcgggaccgcacggcggcgaagaagcgggcgcggctccgcgcgctcctcgaccgcgcctacgggcccggcggcagggacgactacttcagcgcgctccgcctcgtgctcccggggctcgaccgcgagcgcggctcgtacgggctcaaggaggccgcgctcgcctccgtcctcgtcgacgccctcgggatagccaaggactcgcccgacgccgtgcggctcaccaactggcggcgcgggggcggcttccgcaacgccggcaacttcgcactcgtcgccgctgaggtatgccgccacatttaccagttactatccctaaccaaaacatggggcatggcggcgtagtcgttgatgagtttatgaatttcccgcgtttgtggttcgatgagctgcgctcgattgagtgttttcttagttttgtttcattaattcattgggttgaatggatacagtctgtggtagcaaaaatctcattgagttaaagtatattcatagatagattgattgtttgaccgatacacgctttggatactgtgattattttcttagttttgtttcactaattcattcggttgaatggatacagtgtggtagcaaaaatctcattaagttaaagtatattcatagatagcttgattgtttgatcgatacatgctttggatattgtgattcggggccttatggtagcttcctgatgtttctcatactcttgtgtgctgctcaggtgctacagcggagacaaggaatgacttctgggggattgacaataaaagaggtgaatgacgcacttgatcgcctggctgcaactgagaataggtagcttatacataatacatctatttgcatttttactgtgccgtgcatcagtgtatgccttgaaagtgagaagttactcctcattcttgacaggtctgagaaggcttcgattctttctagtctgatcaagaaaaccaatgcccttgaaatgaagtggctcttgatgattattctgaaaggttgggttgctctacaagttgcatttctgcagtggttttggattgctgttgatgctttccgtacttcatcatagatttgaaattggggatcagtgagaagagcgtatttcatgagttccatcctgatgctgaagacttgttcaatgtcacttgtgacctgagattggtctgtgaaaagcttaatgatcgaagtcagaggcataagcgccaggtgatgatactacattctatgtctgcctgtctttgcctgcatgctgccattctgatgcataaaatttttacacggaagcaagtttatctccatgatatctctatgctgtatgaccaggatatagaagtggggaaggctgtcaggcctcagctatctatgagagtcaataatgcctcatctgcttggaagaaggtctttttatttattttttagcttatagtgtatcaatggaatatttagtcatttctaaggacactcacttttttcatatagtcatcttacaatttgtttggttatatgctccctccctcttcagcttcacggaaaacaagtggttgctgagtgcaaatttgacggtgaccgtattcaaattcacaagaatggggaagagattcatttcttctcaaggtaatggttccccatctatctcttgcttattattctgaaacggattggtttcttttgccataatattttctgtttctgcctgtaatatctttgctgtagataggctaatcctggtccactaatgtgctgtgtttatcaggagctttcttgatcactcagaatatgcacctggaatgtccaaagttattatagaaaatatcttggttgacaggtaaggtttactattactacctcgtcacatattatagctacttctagcattcaaaatttgtcccaagtataaatacttcctcctacttccctatgtcaaccaatcacaaccatctctcatttaatttcttcaccttctttctcatctcatccagtcacaaccatttgtcacctcaatcttaatccctccaaaaaaaaaggcagaagtagctataatatgggacggaggtagtactagtgaagattttttttttttgggggaagacaatgaggttttaattgtattctaacaattttttttctgggtgaaagtgagaaattgtacatttttttcctgaaaggtatcatcacatggcttagtctggtcatagacaaaaaaaaaagaagcaaatgaatgaattaccccctccgtataaaaatgtaaggcataatttgtttagttaggacaaggctttggccatcagtttgctttattagaatatagtttttatgacgcaagactgatgttattagattcatattgaaaattactttcttatgattatacttttgtgtcatataaatgatatattagtaaagcaaatcgttgatcaaagccttgccctagcaaaacaaaatatgccttatatttttatatggaaggaatattgtcaaagatcataataccaaggaattatttttgttacacctttttctgcagtcaacaaattataggaaaacttaaacatgttttgaatttcttttcgagttacaaactaattatgagaactttctccttagggcatgcttcaataggggatttttgatttgaatcctttgtgtaggctgtttcttactccctgcatccctaaataagtgtgtagttttagcctaagaatttgtccctaaaagagtgtagttttagagtagtccacttgacctctttaatactactacgtctttttcttcttatttttttgtcattggaccaatagtactccctcctcgttttctgtccatatcaataaagggcatggtagtcttttaatctcttccttaatatgtagttgactatctaaaactacacttatttagggaaggaaggagtagtagttagtataatacttgataacccattcttgattttgatgtgaatttgtactgaccctgcaggtgtattttggatggagaaatgcttgtttgggatactgtgcttaatcggtttgcagaatttggatcaaaccaggaaataggtttctggaatctcattggaaattgtagaattttgttttttatgctgtatgtctttatagtggact

SEQ ID NO: 27719 - DNA, 642 bp, Oryza sativa
tcttcagaaagatcttaatattccttatggtggtgatggttgggttttcctcacagaccaacaaaaggtattttgcagctcgttgctctgttgtagttcacttgtagtttatgacacttcacagtttacatgattaacttgttgtttctatctacaggggcttctaagtgtcattgaacatctatttccaaaggctgagcatagaatgtgtgcaagacacatttatgctaattggagaaaaaggcaccgtcttcaagagtatcaaaagagattttggaagattgcaaggtcatcaaatgctgtgttgtttaaccattacaaaagtaagttagctaataaaacacctatgggatgggaggatttaaagaagaccaatcctatacattggtgtagggcttggttcaagcttggatctaactgtgattctgttgaaaataacatatgcgagtcattcaacaattggattatagaagcacgattcaaacctatcataaccatgctagaggacatacggatgaaggtgactcgaaggattcaagagaataagaccaacagtgagagatggaccatgggaatttgtcctaatattctcaaaaaaataaacaagataagacatgcaacccaattttgtcatgttttatg

SEQ ID NO: 27720 - DNA, 945 bp, Oryza sativa
gaacatgaaagctgaggatgctttcaagagtacgtaacaatttatctggaattcactgagctgatcagctatacaccatcaggatcagaaagatatagctaattacaagtgattgacaatattatttggaattcttttattcagacctccaggtggcgatcaagtgcaagaacggcaatggtgagtacgagagcaaggccaccggaaagctcgacggtaccggcgtcttcagcatccccctcgacgccgacctccacagctccgactgcgtcgcacagctccatggcgcgaccaacgagccatgccccggacaagagccatccaagatcgtgccaatgtcagagggcacctttatcgccgtcgccggccagacccactacccatcagcgttgtgcgcatcggcgaccatctgcggtcccatcaagaagaagatcatagaccacttccacaagaagccggtgccacccaagccagagccaaaaccggagccacccaagcccaagcctgagccggagcacccattcctcgaccacatccacaagaaggagaagcacttcttcgatcacttccacaagaagcccgtgccgcccaagccagagcccaagccggagcccaagccagagcccaagccgagcctgcgcctgagtaccacaacccgagccctccggcgaagaattgatgaatatgatctgcattggatggacacagcatgtttgatcatgccgcagatgatgatcctgctcagcacaggagtgtaatttgtacttgattatcgggcatcagcagggatgtttgtactatttgcatatttttctctcccaaatgaaattatatatggtaaaataatttatttacatttagccagatttggtgggacgactgattattcaccatttagcattcaccttagcttgattcaagctactgggctcggccgaaagaaac

SEQ ID NO: 27721 - DNA, 2284 bp, Oryza sativa
tcgtcgggttcgcaagcccgcgggccacgcggtccaccccttccccatccaattccgccgtaggagtccgctttccaccgcgcgccggtgagctcgccatggccgcggccttcggccggcgattttgcccgcctcgctctccctcactaatctctctcggttgtttccctaggttgccccggagcccgtccaactgtcgctgtcgttttccatcactcgccgtcgtcgatcgtcatcagtgagacccctccccttttcccctctctcctgcgccgcctagccacgtcgccaccgtcggccgctcgccgccggtcgcggcctcgcgccgccgccgctagcgccgcgccgccgctcgccaggaccgctgggctggcttaagccgctcgcgcatgctctcggccatgcgccgccttcgccgtcagatctactcgtgttctttttatagtaaaaacatagtgaatcttctaaatatcatagaaaattcatccgtgctccgtttaagcccattcaagtctcagtaaatcaagaaaatgcaaagaatccattaaaaatggttttgttctctgtttcagtagtgttatagcctatttgcattgtttgctttgtatgtcgcatagattccggctctcccgacgctctggtgtacttcgaaatagtgtcgaggttcctccagccgcagagcaaggcaagtcatgcttgtcacttgaacatattgatcccatattgcaaatgctctattattttcctttaaatattgcatcgttttataatgttacaatgggatgattacctactgtctcagccatatcatttgttatcctgttgctttgctagtttgggttgtaacatgactagatgttggattagggaatgcttagccattcttagttcaactagtacacaatgggggaattacgttaatgcatagactccagatgttggattagtgccactgctgtggtgttggttaattaaaatatattaaatggtgggctgtgggtgcatggttttgatggtagcgcccatagcaattaaggaccggttcgcgggaaaccctggaagaattcctcgtacttaccacaagccagcataggcaacggctgggcttgtagtgtagcttccctctagctgacgcatccaggcaagggtgggcgtgatggagttcggatgggccctgcgacggcctatgccgctttcggattcacttaggcacgagaagggactgcccgctgccttgcgaggactgggggtgaaacctgaggtgtggtgtgcttgattagatggggttatgcgaagggtcctatcacggcctccttccggtatgtcgtggtggcatgtcgacgcacgggaacgtgtcgtggggctgtgtcttgtgggtacagttgcacacctctgatcagagtaaaactattcgaatagccgtgcccgcggttatgggcggtcaaccagattcaccgtgattagtctcaccctagattagtttaatggaactgattagttcaggtggtggtttgggcatgtctcaacgtggtgtagcgttgagcagtggttggtttaatattggctaattattacaactgttttactgctttcaattactgtttataaatgctagctttatacaaatgaactcttttagctgtcctttggttataccttgcatcataccctccattccggtaggacttgctgagtacagtgggtagttcttgctctatctcccaaccctcagagttcaagtatgcgtccgatggtggtttctccgaggagtagacttcgtccgtgccgtcgaggatgcctgtggagtggtgttcccgctgcaaaccaagtcaaggcttagctccagttatcttttattttccgctgcatttatgtaagacttttataatgtttgtaaaacgtggatctgtatatcaactttgtcgtttgtgtaccctggccggtcctgaacagggttttaatgtacattctgcttgaaattctattcgggaatttctgggcgtgacacgccgcctccatgcatcttcatgtgtgatttcctttgccttccacggagggagggcggcccgaggggtgcagactcggcggcggtgtgttaaccttcggctgcttgcctttgatgagatggcgacaggaagaggctgacggcaaaggccgccgtggagcaccggtggttggttcacggggaggcgcctcgccgacttcagattcacaattttttcacattcttttgaaaaaaatcaaaaccaactttaaatgtcaaacgagacgatgtaaatgtttg

SEQ ID NO: 27722 - DNA, 878 bp, Oryza sativa
acattctgctgtctttgccgattatcaggtgttctcaacccagttggtatcagctgcaccatctgctgctgaatcggctgaaccgtttgttgttgaatcggcgaaaccgtctactgttgaatcggctgaactgtctgctgttgagtcggcgtcgacaacactggtccggcagttggctgagttggtaggaacattgaggcaatctagtcttgggacagccgactaatattctgaccagcatgttgcggttgctctctagaaaagagacgaggattaattgtctgcctttgcaccgatgatggcgcagctggtgccggagtcgaagctgctgccgtcgactgaactggtggtgcattggaagtactctgttggttacctatcaccaagttcctgtaatttgggaagacaccacttggcaagtagactggccctgtgttctgatgttcagctatcgtgccaaccatcacagatttgaacatatttgttagtgtattgacgatctctccagattggttgatcaaggcatgttgcaccgcataatcaacttggtcatggaaattggtgcacctaggaggttcttcttgcacttcagcaccatcttcgccaagatcttcaaccacaccatcctgaagcccgtcacctttgtcacccaaggcatctacaacacatttaccaccttgagatgagcttgagccaacttcatcagcagcaaccactttcagcttgtatttctgaacaattatcccttggcgggtttccttgaatgagttcatgaacttgtcctttacgctactcatcatctgttcaagctcatgcctctgttcggacgtcagtttgtctagtgtgattggaataatgtttgtctcattgacctcaga

SEQ ID NO: 27723 - DNA, 6926 bp, Oryza sativa
tatttaaaaaagtcaatgtcgttaaatatttaaaagcggatggagtatatatcttcccgaattaattgctagctagcacaagtagtactatgtattaattaagtcaacttgaattatttgctaattatgtttattgctgtacatgagttgtctacagtataattcttagtgataatgacgtggaaatatagagacaatatctaactttacaacatgatatagtagtaaactgtttaaaactgtacatctctacttctgtcaatgtttaagcatagtcctcctcctatcctctcccctatcatgcgtgtgggcatggtctcgctccttcgcgtttacctaaccatcttaggatccatttttctcaattcattaaaataacaaatttctaatgatattatatggtccgatcagttggaaagcacgaacgtgttagtatttggaagagagcgcccgacagatgtatccatgcaaccaataatccacttctgcatgaaccaaccaagaattgctgcgtattggcagcttgcaatgaatggcattgaagcaggagaaggagttgctatcaaaatttgcattgtgttgccttaatcagattgtcgcctttcaccatgaatttaatagccatatatatatatatatatatatatatatatatatatatatatatataggtccagattatatatgcagaaaagcaaaagcacatgcagcctcgtgttaggtgaatatatatataaggccccgaacagattgatgaaacagcaaaaccaagtcaggatcaactaattataaatgtttttagggggctgtttatctttaattgagcaatgaaccgatatgtataattatatagagaatggtcccatggattggctgtgacaagcgaattgatggagcagatgcatcatatcgttgccattaattaaaggagccatctggattctgaacaaacacaatattgttaaaaaaaaaattggttgatttgtttatggtttgtagtttgatttcatttgttttagggtgtctttagatcagattttatgccctttttttacagaactaaatctgatttttcctaaaagtccttatatacttcttaattgctccacatgcccttgttgttcaatggacccaaatgactttgtcatgtcagagtgcatgcaagtctaatttgatcagtttagatccattaaagaaaacacagaacgaatacgatttagtaaaaatcatatctgaatcatgctgaatcttaccaaaagctccctgcaacaatgacgtcgatctcctgtttgtgtacgaggtgatctacaaaaccaaactgggatcagtagcctctcataaattaggccaaaacaggttctgcctcccaaatccatggtaacaaaatgtattaaacagaacagaagatcaggaaataccaagataagacagaagccattatgtcactatccaccagtgtgtcatcacatttgaggtaaatagataaaaagaaataaagaaacaaacagacaaggggaaagaacaaagtccaggtatactagacacaaaataactgatgaataaactcagatgacatagactgggttcgacttaataccataaaacaaattgaggcaacgtagtacttaaaatcctggaagtacttaaaatcctggaaccaggacaattggaaaatattagcaggttaataccataaaaaaactgaagcaaataacaaccatgtagtacatctggaaccaaatcaattggaaaatactctctgtttcacattatactccctccgtcccagaatataacaacctagtaccgaataggatgtatcctactactacgaatctagattcatagtactaggataccgtcccatccggttctaggttgctatattctaggactgggggagtaaaacattttggcatctccattccttttttcagtggcggacctacggtaggacatgggggtacagttgtacccccaatttttttttaacaatctactgttatttaacaagtataatattgtctgatagttcaaaacacctattcttacgcacaaaatcatgctttccaatagtattataatttttttcttagttatttttttattttctataataatcatttttatttgcactagtaatccatgttagcacttcatttttttctcactggacgatgcttttgtaggtctgtacccccacaatcgaaatcatgcgtccgccactatcttttttagatttactaacatactatataaatttgaacaaatatatgaaacacatacatggattcatgtacgaatctattaaaaaccaaaacatcttatagcgtgaaacagatgaggtattaactagttaatctcaaatttattagtatctcgatgatgatatttcacatggaccgatggactacatcaccggaatacaagagcaaagaacctgcatttgatgtttatgcaactttgttgaaagatactccctccgtttcacaatataagtcattttaacatttcccacattcatagtgatattaatgaatctagacatatatatctatctagattcattaataccaatatgaatgtgaaaaatgctaaaatgacttacattgtgaaacgaaggaagtaataaactgccaattcctgcacaggaactgtcagtaccaaacaaaaatggcatactaattaatttgccagggcagaagttttgaaacataaactggaaaaaaaaaacttaatcatttcatcatcgttcgataaggcacctaagaaggataagttatagaccatcaccaggaaagactaacaacacaagcgtataatgaggcacaaaaaaatggtagacaaccaaaaagaacataaggaataggtgctctgcaaattacagaccactaccatgaaatgatagacactagcaagtaaaatatcgaagaactgaaaagggcaatttgtttcttcgactacttaaggctaacagtacttccatctatggtcatgtattagcatatgccaaaaaaaaaaaaagcaccagagaatcctaagacaaagttacaaaagaattattcaaaattggggaggttggacaagttaaggatgctgacagtgagccacaagcaagcccacaagggagcacaaataagagtgacagtggtggccaaatgggccgcactgcacggacacggcccactcagacgtcaacccgagtaaaaatacttccctctcaaagaaacaaaagagtaaaatactcgttcatcttggcgcgcgaccaagaaagcagaattcgccgtcttcgtgcctctgtttggttaggttagaattggaggactgaacaaggtagtcagtctgtgtgtaactttgcactgatgattagtcagagtcttgttgttggctttagtcccacatcggtatttgatgacgggggagcacgacttaaaaggtgggggtggtcttcacccatcaaactagtcttttgggttgtgtaggctaaaaacctaaagttgtggagcaggtccaatgtaacctgggtggcccacggttggtgggtcaggcctacgcactctaacacttgtgttaggactgatgtactctgtgatcttatattcttctgattattcattacaatcgtatttatatttatgtaatgctattcaatttgtacataacaattcaaggcctacaaattatcagctttatcagcttgttgaatcttgtttcatgactgcttgttttttcatcttcagaaaagggactagttttgtagtttgtggattctgtccttgatctttcagtacataggagtgttaaaatgaaaaacatagtgacctccaaaagaagggaaaatgacgagtagaagacatgtatttgggtagttccataatgcacacagtagaaatcatttgtcagaatcagtgttttggcagaaaaggtagaagaacgcagagtactctgcattttgtaatataggcattggactagcatagaatattagaatcgatagtctcaggattggtgattgcattagtacattggaattgcaatcaggggaatcttattcttctgtttattcattgcaagcataggcagctgcgcagtgggcacagagcgaactattctttcgccttttactaaagaataccgtgtgctcgctgcaaatagcagcattgcaagcatacttgtgtagtattaagcatgctcaaataaatttgaaacaaattcaaggccatgtttgtttcattaattattagcatgttgagtccggcctcatcctcatgtgcttgcttgttaatcttcaatcgaagtactggttcagtagttatggattgtgtcctttcatcctcccttcagtttgtgagcatatagcaggaaaaaacttatgttcaaaataaaaaggaagaaaggaaaaacagaggggaattaaaggataggattattggtttgtcatgcaaacattcagagggaaacgttgacaaagaaataaaaagaacagtgtgacctatgtatatgaactagtatatgggttgtttcagccaataggttccatttgtcagaatagagtttttttgctgatcggcgagttgcttgaggtcctgccggagcaaacaagtcgacagttcaataaataatggtttcgtcagtgttggtttgtgagtcttcagcaaaacaagtattcagttagagaaaagaaagtctatgtcaataaggctggaattgatagttctgaagtcctgatcatagccgaattcatttgttggaacaggaattttgatataaataatactataatacaaaaaagaaaagtttgataaacctcgtttgttatatctagtctttttgtctgtcaaggtatagaaaatgtttgatttttgttctgaaggggaggatctctaatatattcagtcagtggtcagtgccaactctgataaataattgatgccattacttggagaaaaccttgtgaggattgtaagaaaccgagggaaaagaacattaaaactaaccagtcaaaataactgtgctgacaacaatcttcacttgatgacttcagtcatgtttttttactaattttattgaaggagaacaaccttttctttggggatccaatggtgtttttccacggtagtttctcacatgtgcttggttttagtcacccgcataacatctaaatcagtgtaacttttaggtgtgtcttctgtcatatagacttgcaaaaaacttcttaagaaaaaggcctgcttttattcatagcagtactaagagagtgctcttcatcctggctatgtaattgggaaccttttgaaattgtagcaaccctttgtccctctgtctaactgaaatagaggtccatgtccctgcaaatatgcattactgtacagcaatctggaaattagcacaggctgaaactggacagttcccaattgaagcccgtgctttatttgatatatttgcctacctatttatcatatatcttagttaatctaagtcgattatttaaatttacttatatcggtcagatcttttctagggttttgccagtatcggctaaattgttttgtcgatctagattagctattgtatctaccacccagaaaatcagtcaaagaattgatattatgtttcttttcatacttagtgctgcatcaattgggtttgacctactaagtcatgcttataactataatctctagcttgctttttgatgccaataagggtttcatcagggtttcaactgatgagttatctaggcgttgcttcggctcataaggattatatacaagttggatttagccgatgacaacaaaattttcattgattatcaaatcgtttggatttaatgacatcggagctccagtcgatgtatgttttaacctttggatcagagcttattccattatatcattattagccgattggtttctaccggtttacatcgttgtcttattatattatcattagccggctgtttttatataattatttactcaagtatcagaatatgcattggatatgtagccgacagttcaaaaccctatcaacatcggctggtatcgccccatcggcttgtcagccaagcgactctttagtgatcaacatatttatctatcttgtcagttgcaggatcaaactggctggcatgcccgcatatcatcaatatttaggacctgcactagagctaagcagatctcctaggccattgtgttcgtcgacttagttcgcgctaacacagatcagataccatcggccaagcgcggatttttttgtcaacaagacggaggagaaggtattgaccaagattgtaatggagatggatgtggcggtggagaccgtagttgcggaggagacagtggagatggtggagtccgaggattctcaagctacagcggtgggaatggatgccgctgctcacctgggaaacacgatgtagcgcttgcaccataatatgatggcgtgggatatctctcctagatttgtctacccatctcctatagggatgtccagctcaagatcgtcaaatccttagcagacccactccacctcgatctttgagtatcgaggtggatcgcgtcttgctggacttgtatggctatgccctccgccatcttcacgagaaacgaggttagttagtaacatatgcaccaattttcgcaagctacaaagcaggatgtgcaaactatgagcataccttgattgataggtccttgaagggaatatgcagctaacatggtgtctgttgcgtgatttcatccacggggcatggatttttcaatgatccctcagtttagggatttttcaaaatttggtgttagatccttcaggatatatctgttgtacaaatctttcttgaagcagttgagttgttgggccatcttttttagagtccaatcctttactttgttctgttctacttgagggatcgtgaagatctcgag

SEQ ID NO: 27724 - DNA, 2705 bp, Oryza sativa
attaaggagatctttgaaattcatggagaggtcacaaaagtcgttttaccgcctgctaaggctgggaataagagagattttgggtttgttcattttgctgaaagatcaagtgcattgaaggcagttaaaggaagcgaaaagtatgaaattgatggtaatgttttctccatgttgttatcctttatcattatttattaaacttgatcttaatctaggtaggtgctttgtgtggaaagcagatgtgatttgatcatttgctgcaatgattttatgggacctttgcagttaccaccactactctgtatattagtaacttcgaaatatggttgattagaaataatcttgtgctaactgaatcacagggcaagtgctggaagtatccatggccaagccattgggagacaagaagcctgatcactcgttcaagcctggaggagctccaaattttcctcttcctccttatggtggctacatgggagatccatatggtgcttatggtggtggtggtcctggattcaaccaggtaaaccaaactaaaccaagtggtgcttatggtagggttggtcctagtatacctaaataccaaacacattctgcgagaaaatccacatataaataggtataatacatatgtataatcttgttgggtcaaatgcttcgttctctggctctttttgtccatccactaaaccctcagtccacaaaatgacccattcttgagcatcgccacttcagctacagtctgcctataaggcccagtggcccacaatgcccaacaccaaaccctagttaaccaatatccagcatctctattcctcaattccccatttccagctacccagctggcagcatgggtgcacggtcacccaggcatggcatggttactgcggtcccaagtgccaaagctgacaggtgcccagggtggcagaacgtcgcatttgccaggaggagcagctgagcaagtagtgtgcctgttgcgcactagttgatctctggatcctgtacaaggacatgcaggtagatggaggagctagcatgtgcgtcttgattctaaatcctaatcttctctgtaatatgtgcatcttgattcgaaattcgaagtttctttgttgatacgtaaatgtgaaatcaaagtatggtacattgtttttttatggaaaactgtggactgtagacaccaaaacaaaaatagaaagatctgtaaccacatcagggcatgttgtaagaacactaacattgacctgtgacggtgtatcaaagcaatccaatagactgttcacttcacatgctcccttgatttgtatgtagatgatgaagttcttagtgttgtctaatgatgataaagcatcatattctgaagttgtgaaaaatgccttgagtctgttgaagattagtcaacatatattgatagtctgttaatgttcttttatacatggatcatgatttttttgcatgaactttccatttagttattagatactacctccgtcccaaaatatatctatttatagcatagtatcttgtcccaaaatgaagctatttctccacctacctcctctcaactaattaatatcattctccttcacccactttcttttttcaatctatcacaaccttcctccaatcattcccatctactttttattacttgtgccaacctaaaaaagcgcacatatgagctgtttgttaattgtggggctaaattatactccctccatcccaaattatagggcgccgctgccccctttttaaggaaaatcaaacttggttgcttttgactaataatcatactaaccatatctatactaagtattatgcatgttatatcactagatttatattttgaagtacttctatgtgatgctaatttcatatttgttgggatcatagaatggaataaaatactagtcaaagtatattattgaagacggtgtaaaaaaaatatagccttataatttgggacagagggagtagttttctttaacgattttgtaacacctttaaattaaattgcattgtcatctattgtacattgattttggtagttcatatactgtccttttccatgaaatatgctttaagtaactctgaatacccatgctagaaatcttgcatccaccactgcatattgacaatttagtcattgtctctatcaacatttttgttacagcctatgatatatggtagaggaccagcaccagctggaatgaggatggtaccaatggtgctccctgacggtcgtctgggatatgttctgtaagataatgctgtcctagagtcacaactcacaaacaagtcttaccatacatcttcatttcctaacagttctgtttgtaatgtcttgacaggcaacaaccaggtggaatccctcctccgcccccaccgcgtcggggtgaccggagggatggtggcagcagaggtggcgaagggagtcatggccggcgatatcgcccttactagctttttcgttcccttggtcctgccgccatccagccatcacgcaatgtgatggatttcttaacctaaagaaacaagatagaagcttgtaaccctgttccagcataacacctgcaattgcgcaagacatgtaccgtcttcttttttcagttatatttatctgtcatgcatgtggtgcttgtgacttgaaaacagtgtcttgaagctttgtatctcgcggtggcgtctgtagtggtaaaccgatggaa

SEQ ID NO: 27725 - DNA, 1517 bp, Oryza sativa
caaaaagttgccaaattgtggaagaagttaatgtcaactggccataccagagttattaaaaaaatgtgaaaggtcttactgtggaatttgttctactatttcatatgcatatgtctactgctggtagccatgcatgtcactgttaaacagttgaactagaaatgttcatgaaatcaggatgcatgtataactgactggagatcaatgtgtaagacataaaactcttgacaaattccaaattataggacaataactagcatgggggatttttttgctgttcaattttttggttacattttctggattagatgattttgtttttcattcattttaactaaaactaaaaaattattaaaaagaacttatataagagatactagtctaggaaaatccataggtgcgcgtactgtacatatatttcatgaattattcatcttaggttggttcgctcttaaaactgaactgagggggaaaccaatggggggtacgacagacaggcaagacttgttagtcaaatagttataagggtaataatatgattgaagtatgtacttggcaactcatcagtttaactctcaatttaaaaaaattcaatttatattagtatacatgtttttttatcattctctatgtttcagccatagcttataaataaaagttaattaagcaccaaattattttggttgcttttgggcacgtagcacgttttgtaagccgcaaccaagcacattctaagaattaaaagatactaccagcaactagattacttatgatggccaaaaatcactaggataaagcaaaaaaacgtctcgaaaattattcgtgacgtatcaacatcaggaaaattccgtcattgggactagtttgtcagataaaaataactttttctttaaccaatgctaacctcttacgatccaatggctttggctgatacagtgaatagtccgccacaacagtactgattaaatataaataaattatcttaccatatataactgcatttgatagagaagaaatagatacaagtacaaattaaaactcctgtcgatgaaagctaatgcatgacttcgatctcaaactgttattatgcagacaatctgacagggggcaggacggcatgatcaaacgtccagtgcggatcatattcatcagttctttgccggagggctcgggttgtggtactccggcgcaggctgcggcttgggctctggcttgggctctggcttcggctctggcttaggtggcactggcttcttgtggaagtggtcgaagaagtgcttctccttcttgtggatatggtcgaggaaggggtgttccggctcaggcttcggcttgggtggctccggcttcggctccggcttgggtggcaccggcttcttgtggaagtggtctatgatcttcttcttgatgggaccgcacatggtccctgacgcgcacaacgctgatgggtagtgtgtcttgcccccaatggcgacaaacgtgccctccgacattggcacgatcttggatggctcctg

SEQ ID NO: 27726 - DNA, 10826 bp, Oryza sativa
gggacgtgaccctatatatctgtagtcccggttggtaatactaatagggactaaagatggatttttagttccggttatttcacccaggactaaagattcctatctttagtcctggattcctattctcggttacaaaaccaggagtatagggggttaggaactgggggtaaagaccatttctccactagtgcttcttgctctgccaccacgctgctcacgctccgccgctgctgctgcttgccgccgtgctgctaagcaggaagagaggaggaagaagaaaggggaagaaagaagaagagggaaaaggggtagtttggtccaattttttctggaaatgcatccgaggggtaagtagtggtatcttttaaatatgtgtaaaattataatgatatatttccaaatacatgaatacaagtggcatatttcgaaactgataaatttttattggcatgtatccaattaaccctaatgtatttgcctgatataaaaaaacaagtgacttgatatattttgcaaatctctcatttatatatatccatatacatatgcttcttcccttcaaagttaagttcctaatatttctcaatgtatatatgtactcattcctacctccagtctggtgaacgggtgcggactgcagtttgtatagtaagtacacgaagatcgagtcaagcgagcggcgtagaggtcatgtgtaccgtgtacttacttattgatgggaaaaggaattaattttgaaattataattttaaaaaaaataagaacgaactgcaattttaagattttggacacatttatttaccaatgcttcccattggagtatgggacctctgtattttggcctatactttcagtttgaccacttactaccttaggtacttttttgtactcctcaacctcgaacttatgttgcgttcttaagttcactttcccaacttcacctccctcgtttttcgagtgcacatatttgttttacttgttttgaaaaagcatgttacttgttttaaaaaaaattatattagatcaacgggtaggtgaagaattagttatattataaaacaaaatttgaataccaaatatatatagctataatatagtattttaagagggaaagagtagatcgtagcaggtggacaaacacagctctgctatctataaatacacgcgccacagacaattggagcttattgaagggaaactaattaaaggaagagctgcagctactcctactcatatatctaggaaataagttcccagttaatgttgtacaacttacatgcgttcatggcattctggctacttgcagacctgctgattcttctggcttctgccgcggagagcatctccggccggcctgccgccggttgccagacacggtgcggtgacgtcagcatcccctacccgttcggcatcggccccaactgctcccatgggaagggcttcgagatcgcctgcgatacccgaacccgaaacggcagcggcgagttggtgccgaccctcgccgccgccaatggcaccatccatgtgcagagcctgtttgtagcgccgatcccggaggtcaaggtgatgctgccggtggcgtaccagtgctacaactccagcgacagcgtcaccgagagtttcttcggcgcggtagacctcaacaacacaggcgtgtaccgcatctccgacaaccgcaacatgttcgtcgtcattgggtgcaacaccctgtcctacacccagaacgggaacagtcgcggcaaaggcccttacgccggcctctactacaccggctgcgtctcctactgtaacgactcgtcgagcgcgcgggacagcatgtgcgccggcgtcggctgctgccacatcgacatctcgccgggcctcagtgacaacgttgtctccttcgggccctggaagcgtggcttccaggtagacttcagcccctgcgactactccttcctcgtcgacaagaacgagtacgagttccgtagcgccgacctcaagatggacctcaaccgaaccatgccggtgtggctggactgggccatccgcgactccgttacctgccctccactggaggtgcaggagaagaaaccggctgggtacgcgtgtatgagcgacaacagcgagtgcgtcaactccaccaacggtcccggatactactgcaagtgcaagcaaggctacgatggtaacccctacgtcgacaaggaccaaggttgcaagggtaagattaatgtttttattttattactcctagttaacagttttgctaaatatatagtgccaccattttatttttacctttcgttgtgtgcaccaaccctgttggtgtttaaattcattaactaatttttttttaccaggtttcatttgatcttttcactatttgatgtaggcgcaaaaaaagtgaaaaaacgtattgtgtattttagtaagcatctatatatacacggccgtgtgttgcaagtttcacaagttgcgtaattttgcgtgtgtgtgatatataggatttgaacgggaacctgttcttcaagtagcgtccttaccatctcacctataaagaactttgtgcatgcgggagagatgcttattcttttgacttcgcccctctaaaacttgtaatatataaattgcactataaatgatatcaaaaggaaaatttatcaaccacaaacttgtagatcacattgagctctacaatttcgatatagagcacagctccatctgagttcatttaaaaacataaaagtttgtttattcaacaatagatttgagattttgtaacgaatatcaggacccgtaaaaagtctcgaatgaaaaaacattcaactatatagttgtagagctctccaattttcataaaaagattttcatcatacgacttcatatatatcaagatactactcctttcctattgtagtagtgctattatttttaagggtggtattttcaagagaaccgcctcaaaagttaatttttgcgtgcctttccatataagaattgccaaaaaatgacatttatgtaggaagcccatctgaaaaaacttgtaattctatgaaaatgtctaaactttaaagatttatggaaagttcattttaagttcaaatgaggtgaaccaaagttatatatgacccttacaatatttttttatttatatttctgttagtataattgtttacttatcatttacctctatatgagttggtatgttatctaacgtgacattagtgaatgaccatactaaaagaaatgttctaagaaaaatattaactaagttttactataagaagtactagaacgatctcggagaactttagtttacctcaataggacttaaaatgaattatctataaatttctaaaattttgatttcttaaagaactgcttatacaaaaatagatactagagcttataaagatatttactacaaagttgtagatctagttaagctctacaattttaatatagaatgtctttatccaagatcgtttgaaatactcaaaagttcgttttcaaaaatagatctgagagtttgtaaaagaaatagatctaaacgtattatccaaaatgttgaaaaaaagtttcaatgtagatttcgtgaagagcgacaatttttataggggggttcctaagaatttgccagttaaaaaatattttatacgtggtttataatcctggaaaggcgaagccatcttcacacacgtgattttcattttgagttgcctgtcaagagaaaataaaaagaagcctaagcctacgattttttttactagtgacagtggatctaacgactaatagatatgatcctttttatatgcacagacatcaagagtggtgatgtgtccaacaagaagaaatatccctggtagggcgtgggcaacaacatcccaggggattatgagtgccactgccgtgtaggataccagtggagtggtgaaggccccaagaaacaagagtgcagcgcaaaattccctcttgcagcaaggcttgcccttggtacatatgcacctcagcatttttttaaaaaaatataaaataatatactatatatatgtcacattgagtttacaccaattcaatgatttcccattgactatgtttttaattgtttctacaatataccattcaaccaaacaaagaatttcttataatgcctaaaaatataagggttgacagttaattgaaaaaactaaagaaaaacaacaattttaaaaaattagcctcctagcacatgatataagaatataagtgtgtataagtttcatgctttttgcattttattattttttgtaaaatataatatgtctgttatttacatagactacttttctgcatcgtttgtatatttttatacaaatcatctttcatgtgctacacaaaatatttttgttattttgtttgtaagtgatttctctctaatgccacatagaatgacttttcaaaaaaaatacatgcaagaaattttgaaacataaacagaaaattgtatattgtgtaaggaaactgcactaaagattagttacagcaatatattgtgcacgccaatattaatataacattagttgttcacaataatatttatcaaataaaatgagccttcattcatactccctctacccaaaatataaggcacaaccactttttttccatgtctcacaatataaggcttgcatacattagccatcacctcttggttctttaaatttggtttattttaaatcatctaccgttaaatcctccaatcaaattgcttgcatgtatggatgtgatccaatcaagaaggtgattaaattatttcttggtctttgtgttatgagtggttgagccttatattttgggatagagggagtatttctattaaaaaataatactgcaactcatatatggatttgttatgtttgctaataagttttttttaactttcgtaggaatcactttgggattttccttcctaattgttgctgttcttttcacgctaatgatgcacaaaaagcgaaaaatgaatgaatatttcaaaaagaatggtggttcagtgctacagaaagtggacaatatcaagattttcaccaaagatgagctaaagaaaatcacaaagaataattcagaagttcttggtcaaggaagctttggtaaggtgtacaaagggactcttgaagacaatactccggttgcagtgaagacgtcaatcgaagtaaatgaagctcgaaaggatgatttcacaaatgaagtgatcatccaatcgcaaatgatgcataataacattatcaagcttttgggttgttgcttggaagtggatgttccaatgttggtgtatgagtttgccgctaaggggaatctgcaagacattctccatggtgatgccaacatccctctcccgttgggcttacgcctagacatcgcaattgaatcagctgaaggtctaaggtacatgcactcatcaacaagtcgtaccatacgacatggtgatgtcaagccggccaacatacttttaacagataagtttatccccaagatctcagattttggaacatctaagcttcttaatgtagacaaagatttcaccatgtttgttgtaggaagtatgggctacatagatccagtattccataagaccggccatttaacacaaaagagtgatgtatacagttttggagttgtactgctagagctcatatgtagaaagccaacaatatatggtgaaaattgtagcctcatcattgagttccaaaatgcctatgatcaagagaacagtgggaggataatgttcgacaaggagattgcaaatgaagaagatatcctaatcctagaagaaattggcaggttggcaatggagtgtttgaaagaaaaggttgaagagcgacttgatatgaaggaggtagcagaacgatttgttatgctgagaagatcaaggaagtgtggatagggaaattatagtgtaagtcctcaacactgtgagtagattactatcgagggaactcctaagcactttggtgccagcatcagtgcaagaagcagtgcgatgctttctgcaccagccactccacttaactagaaggtggacaataggaagataggagctacaaacaaaaatatgtattttgtggtaggcatgatataatcaatgttatcaatcggtgtcatttcatttaaagtaaattgtgtttttcaagtatgtatctcctatttatgttttctgtaatttgaatcgatttttgtgtattgtagtacaaaactgtgtaatctattgttgttgtgtggaactcaggtcatgttatatattgtctatggttgttttgattgtagcacgtggcttggaaatatttcattgatgtgcatgtactgtaacattgcttagctatatctaaagtaaaaaaagtcattatccttgcaaagattttagtgtaatcttgcatagtttacagagatagattggcttgccacctatgcattattgggttccaatatgtgccaagaaggaaatgtctaacatttgttctcaaaatattttatatttctatacataggcccatttggttgggcttaaactcctaaatttaacttcaggagttggatatagagtggagttgtggagtagcctaaacctagctcaacttttctagtttattttataagagcactctagttagctccgatccttttttttgtcaagcagaaaccttttggttgggctccagctccaagacaagttggagcaagagctagagcaagaggtggtgccatgccaaacaggcccatacaccagcaaaaatgcccatgcattacaatgtatcaagtcaacctttcgcttattcatcttctcatacattgcaacaagaaaaactaatataataattaaaaaaatcacatgattaggttaggtttcaatgtcaatatagttttgaagatgatgcggtgaattttttggataatggaataaattcaagcctttacttcaaataagctataaccacttattacaaattctctcaaagagagcaaacattcagaccatgtcatagcgacgggcgcatccggcaataacagatccaatatacatcgtcaccactcagaccaacaccatgtagacttctcgcagcatgactgctagcaggcaccacatgtaggcgtcagcgttaatgaaggaacgttaacatagagatcgaacgaagaaggcaggtagatcgccacaacccaccttgcagcacgggatgacttaatgttgacatccccaaccatgagtggcgttggacggttggagtctgatgatcattattggtggcactagcattatactccctctaacgttttcaatttttttctaagttaaacttatgtatatttgatcaaatctatagaaaaatatagtaacattttcaacataaaataaaccaatttaataaaaccaattatattcaatgctagatttaataaaagcaatttggtgttgtaggtgttgctatatttcgttataaatttaattaaaattaaataagcttaacatagggaaaaaaatcaaagtgtataatatggtacaacagcagcagccacagccatcagagggttcagggtatcaccgcctccgtgcatcttcatatgtgatttcctttgccttccgcggagggcggttcaaggggtgcagactcggcggcagctgttaacctttgactgcttgcctttgacaagatgatgacgggaagaggctgacggcgaaggacgtcgtggagcaccggtggttgacggggaggcgcctccctgattttagattcacaattttttcacattgttttgattagcattgtaatctgtcaaacgagactatttaaatgttgttggtcgacttaagtttatttaatcagattgattgccttcaaaattttataccaaatttgtttgtaacagaagaaattcgtccatcctattgccttacatcttggcaagcacgctacaatactcttcctggacagaggagcaatgatggggtaaaaaggagcgtcatcattcgtccaattaatggcttatcaaaacttgaattttaaaatttgattttaaagttggttttttgatttttttttcaatgtagttttatttttcagctttggcttttaaatcactaaggacacatgtagtaatttttacttgcaaatcattttttatccctaaaaataagctgttacggcttatataagcagcaaccaatgacccaaaatcacaagaagaaaaactggcaggtaggtccaactgtatgtctgcagataattctttcatcccatcggtttaccactacagacgctgccgcgaccgcgagatacaaaacttgaacacgactgttttcaattcacaagcaccacatgcatggcacataagtataactgaaagaaaacgacggtacatgtcttaggctattgcaggtgttatgctggaacagcgtctaagcttttatcttgtttcataattagttaaacaaatccatcacattgcgtgatggctggattggcggcaccaagggaacggaaatgaagatattgtatatggtaagacttgtttgcgactctagggcagcagagattatcttacagaacatatcccagacgaccgtcagggagcaccattggtaccatcctcattccagctggtgctggtcctctaccatatatcataggctgtaacaaaaatgtccatagaaacaactacaatgtcaacatgcagtagcagatgcagacgaagcaattgcaaacgaagaattatttgtgaatataatttttacatgtgtgttcttagcaaatctaaaaacaaaggctgaaaaataaacttcaatgagaaaatttcaaaatcaactccaaatttaaggttgaaaattcaaattttagctgataagcatcagcgaaaagatgaggcttcaggattcctagcatgggtattcggagttaattaaatcatgtttcatagaatttatataaagatgctagaaattaattaaataaaacaataatttagccccgcggatgaaaacagctcacatgcatatatatctcacaaatttactagatatctgataactaaatgcaaagttcatgcaaaaaatcatgatccatgtttgaaaaaacattaacagagtatcaatttgactaatcttcaagagactcactcaaggcatttttctcttcagaatatgatgctttattatcattagacaaacactaagaacttcctcatctacatacaaatcaagggagtatgtgaagagaacggtgtatgggattgcttttgatacaccatcaaaggtcaatgttggtgttcttacaacacgccaatttcatatattttttttcgcttccttaaactgccttcaatgcacttgaccacaatctctcttattccctgccttagcaggcggtaaaacgacttttgtgacctctccatgaatttcaaagatctccttaatcttctctttagaagcattgtctggtaagttcttcacatatatagttttcacctgtaaaagaaaaggccattcagacaaatgttcctagggaacaacaaaacaaattaaaatgatatgaaatttcaaagctaattatctctatgaatataaaaaaaaatcaacaagcgaagggtgccttgtacgaataggacaatccatccataacagaaacaaccttgcacaggttgagccagtggacagtggtattgaatcagtagaataacttccaagtcaaacactcaatctaaatagtatttcagatggctttaatctacatacaaaaaagtgtcagattgctttaatctacatacaccaaagtgttgtcagttatacaatccttaaagtgccatgtagaaactaaaatcatgaagcagcggcatcctggaaataaatcaataaaatgatggttattttggttcaacaatggtaatcagtagttccagataacaaaaactaatgtgaatgagaaatgattaacataagaattacaaaatatttcatgtttcttagatcattggccagttcctttagcaaattatggcccaaaagaaacaaatccaactcctcttttacaagtgagttaccccaataaaatacgcaatataaccagttttttttcccaagggaccctagttcaatttgcagagctgcagtgcatccgttgagcatagaaagcgctgacttttcatttacagtgtatactggggcagctgcagaagaagaatctgatgatgatgaacccttaggttcagcccagctgacggtcaactggctaccatcaaccttaaagtttggtgctgacaatttctgcttggcatagtctgcacaagcatggttataatactcaacaaagaggaacccacggttacggcttggatcatgtaaatcctgcaggaccaaaacaaggtctcaattagcaaattcggggccttcctagtgcaaagtacaaccatgaaatcacagacacaccttgaacatctcaatgttcacaacacctgggcccttcccctggattatgtttctcagctcgtcctcactcaaccccttgggtacattgccaacaaatagcctgtgctttgcctgtgacaatgagcaccgcagtgtcctcccctgcaccacggaccataccatccaacataagtgcaccatacgtgatgcaattagaacctctgtggcaacccagagagccacaataccttgtgttctttgtcatgcagatcctcaatagcacgctgagccccatccttgccggtgaaggtgacaaatgcgaatcctttgttctccttcgtctctttatccttcatcaacctcacctgttgtcatccagagcttcaggttattgcactatgtgttacagggatgcaaaa

SEQ ID NO: 27727 - DNA, 3056 bp, Oryza sativa
agggaggaaatcttaatcagaatagtgatgtggcacaggattttttcaataacttccaagatcgggttgattacgctgtgcatcatgctttgatcaatcagtctggggtgttagtcaatagcttatcaaacatgatgaagtcaatagccgatggttcaatagctgagcatcaggctgcaggcccggtttatttgcaaggaggtgtcttcccaaattatcggtctttgattaccgatgttcagccatctactcaggcggttacctccgttgcaccaacaacttagccaacggcgccggcaacaactcccctacctgcttcatcagcgatggcgccaggccagccggtgaaccctcggttgttaatgagagagcagccacagcatggcgggcaggttgtgaatcggctgacccaagatcaggttgctgccatgtttctgccacctcaatctgttgttgatccaatacatcagcagccgattcaacagacacccccaattcagcaggttgtacaaccaatccggcaacaggtcatgcaaccattcagcaaacaccaccaaggcagcagcccctacagccgattcagcagacgctgttaagacagcaaatcgttcaaccgatccagcaccaaggttcaataagcgcatcggccgggtttgcaacgcctggtggtcagcttgtacaacaatttttaaaccaagttgtcccagaacatttggttcaccacgtacagccgggtggcacagtaatgcctcaagttattcctgagcacttggtacgcaatatccagccgaaccttcataattaccaagggggtaacttgaattatcaatatcagcctccttccccgcaagcccaatatcagctaggggcattggctcaacctcagtttgcgtctcaatacggtcagttcgagcccatgcaacagcagtcacaaggggcagctcagcaacaaccgtgggccaatgtgattgctgacgtaatgagggaacagtttgggcttaaaccaaaagagactggaagtttgtatcggcagccttaccctgagtggtttgagagagttcctcttcccaattggttcaaagttctagacttctccaaattttcgggacaagatggtgtgtcaacttatgagcacattagccgattcttggctcagtgtggtgaagcatcggctgtagacgctctgaaggttaggttattccggttatctttatatggatcggcttttacttggttttcctctttgttgtatgggtcgatcaatagttgggccgatttggagaagcaattccacagctatttctacggtggggttcatgagatgaaattatctgacttgatagcgattaagcagcggcatgatgaacctgtgcaggagtatattcagagattcagggagatgaggaacaaatgcttcagcctgagtttaactgatgcccagttagcccgatatggcctttcagggtatgattgctccgattagggagaaattctcgtctgaagactttgatagcttgtcacaactgatacagaagctaaccttgcatgagcataggtctgcggaagttaagaaaagctctaagaaggttaatcatgtttgtctgtacatgtatgggtcggatgatgatgaggatgattctgaaatagctgcagccgaatgggtgaggagtaaaaaggtcataccatgccaatgggtaaaaagttctggaaaagaggagaagtatgactttgatattactaaagctaacaagatctttgatctgctactccgagagaagcaaattcaacttcctgctggtcatacaatcccatcggctgaagaattaggcaaaaagaggtattgcaaatggcataattctaggtctcattctactaacgattgcaaggtttttagacagcagattcaagtggccattgaggggggcaagattaggtttgattattccaaaaagccgatgaaggttgatgataacccttttcctgttaatatggtgcatacagctggccaaatagccgatagggtccgagcaaggggttttcagggaattcggtaaagattatcgacaaatatcatgaagaatacgatgatggttttgatccccattggggttgtgagttctttagattctgctggaatgaaggtatgagattgccatttattgaaaactgccctgggtgcagtgatatcgttgagagctcaagccgatcatataataggggtggtcgactaaggcagacaagagtttctgttcatcaaagattgggtccagtgaatcaagatcatggccaagaggcaatgtaatcaggaagaatcaatggtgtccttctggtattttcacgaagaatcagaagaacatttaataaatctagatttggaaataaatgtggatggaggaaacataagaatttttctatatgaacagaattggttgtagaatggtaagctctaaaggaaaagtgttgactctagggagatggtatttcatgtactctagagatgtttgggaaaggatccaaaggaaatatatcccagagcaacggttagaggctagagaaataaatggaggggttttgtaaaagtcaaaagaaataaaaaggagggttttataaagtttgaaataaagaaggattttataaaatttaaaagagagcatttaactttacaaataaaatttaggtccaaagtaaaagagattaaaagaaagtaaggttgcttcaaaggaaaagtcgagaagagcacaactaaaacttttcgcgaaaatttttccctgaaaatttgagtatattgcatcaacccttcgctcattcatcttctcatacattgcaacaagaaaaactaatattatagaaaaaatcacatgattaggttacgatttcgatgtcaatatagttttgaagatgatgcggtgatttttttggataatgaattaaattcctgcctttatctcaaataagctacaatcacttattacaaaattctctcagagagagcaaacattcagaccacttcatagcgacgggcacgtccagcaagaatagatccaatatacatcgtc

SEQ ID NO: 27728 - DNA, 3917 bp, Oryza sativa
gcacatctacttcctcattttctcccccaaatgcctagtacatgagcagaaaattcaatgacaatatgttcaagcttaatgagaagataaaaattccaactaatagaattttcctatgattgatcttgtacacattttattcttgactagacttgttacttgtgaacaactatctatgttagggaaccttatgcatctaagtagatgataattgagatatagttgagatgaaggaaattcttgtgttctatctcatgacaattggggatttgtttttaaaatcaaaaatttatttggaaccttactcctcatatgactttattcctacccaacaaggccatacaccaagccattaatgatgaaccttatgcatgtgtatgactacctgtaattatattgagctttaccaaatttttgtgactcgtgttagatgtctctcatgctctctcgatcaaggttgcacaaccactatgttatccatataagatgctaagcttctacactggaagttggcaccattccatccatttcgactaccactgaaaaagaaaaaccaactttgatgaataaattctccattcaatttatcccttcttctcctaagaaaaatccttggaaaagaaaaagaaaaggagggaaaggcatggctattaaaaaaatatttctcttcaaaaatatagagcaacatggaaaaaaaagaaagaaagaaaatggccatgccccctctacaattatgaaggagaaaattggagaagcaggtataaataaaggagaagcattttctttattttccatttttccacacatatcatacactttccacccaaaaattagcgatctttgtttcgagagtatgatcgattatcttcttgagtccatgtatttgattttgtaatatatatgatgaaggtatgttccgaattatgcctaccaaactccacacatacagcctttagaataaggaataatttcagcaaaatatgccttggtaaggatccacagacattacaaaatatccgagtgatcgagggtaagtcattatgatgagaaaagctggtttgggaaaatttataaacccccaaaagtctgaagtagaatacgaggaggaccagattcaagactgttccatttatcaatcacccaggatagtaagatagccaccgctgaagttcacaggtacaagaatagttttgaataatttatgtgcttctattatatattggataattttattctgaaatttatctctaacctttactcaaggacgagcaaagagctaagtgtggggagtttgttggcggctattaaatgccaaatttatgccgtcaatacctgcataaacagaaagaataaagtatccaacatagtgattaggtttatttctaacatattccacgagtgttggtgcatatgtgcctgcaggtaataaaccgccgaagttgggatgaaaatcagacttaagtggaggtgaaatcctatccatacaacgagtgggccaataactacacaaaacatcaacaaatggtccttccactcgaagaaatagatatgggaggctgaggaggagcaacaggccgaaaagtgggcctattgggccatacatgggttcggccgaaccactcccacagctgtctgatatgcggcttggcagggacagtccagatgactccctaatggcggttggagggtagaatggacatttcacatcttcacttcactcacacactccaagcttgagctgaattataagaggctctattgtactttattgtatactagattagagagagagtagagtacaagaagtcagaggagttccggaattgtcggtaatcctcttcttatttcttttgctttgtttaactactctgattataatagaaatatctttcgagtaatttagttttgcttggtgagaattatctcttggttagttcctaatcagcgtacgagatcatcgttcactataatccagcaaaatatagtgattgctttagtgtgtacctaacattaaagtaagttattaattgcttagacgctgtgtctaggtagttattaatcgctccgtatcccacagtaggtgtggggtgggtgtagaggtggtgacagccctcaagatcactgaagtcctccctaactaggtacgtagtagagcgatatctgggagtagtaagctggccagtgcccgaagtatcgtattaggattaaagttaagctttccatagacactgtttctcaccggtgaatccactctatcctttgcttatccttagctttatgtacttggacgtacctggtgaagagccgacacagacgttccctgtggaaatcgatacctgagaatactcctgggtgaagtgttacatcggtatatctctataaggttaagaaataccaacatggacccagtcatgttccctgaagcagattactaggttggacagatacgatctacaatagccaatctaaacaattccttcttggagacaattggaccaacaacctagcgtccttcttgttccccatctcaaggagaagagcaacatggagttgggaatgtcaatgttgaagatgtccctagcgaacacctgagtttagacccaggccgtaatccccataatgcattgccaagaagaccaagttggaaaaccccacttgccgaggtaatcgtgatctttgcgaccacttgaacaggcggagacgggaatgacgagaacaagacggacgtcggccatcaccaacgttgttctccacaacgataacagaacagcgatggcaatcatgaagctatctaaatgaggaccgagaccgactggattggcaaagctgcaaggacgagaacaatcaaggctggagaagtcagggtgacaatggccgaggtcgaaaacaccacgataacaacagacgacgacgagattcacgttcccccggttctcggagaaatcaaggacattggcatagatccagaggtcgtactcccgattatagttatccttcgttgtcttcatcatcatcgataggtggctctcgaaggccacgaggacaccaaccacctctcgtacctggaggaggatgtagattagctaaggtatctaccaccttgaaaatcagtcaaaggcttgattgtctagatgtttattttcatacttagtgctgcatcaattgggtttgacctactaagtcatgcttagaaccatgatttctagcctgctttttggttgccaataagggtttcatcggggtttcagccgataagttatctacacattgcatcagcttataaggattacatacaagttagatttagccgatcgcaacaaatgtttcactatttatctaatcgtttcgatttaatgacatcggacctccagccgatgtatgctttaatctttggatcagtgcttatcctatcatgtcattattagccgattaatttctactagattatattattgctttattacattatcatcagccgattgtctttatatcattattttttcaagtatcaaaatatgcattacatatatacccgattgttcaaaaccgtatcgacatcagctcacattgctatatcggcttgtcagccgatcggctctttcttgatcaatatatttatctatcttgtcagttgtaggatcaaactgacctgcactggagtaaagcagatctcctaggtcgttgtgttcgtcgatttaagttcgcggccaacacagatcgggcaccgttggccaagcacggatttttcgtcaacagtttcatcgagaagttctccatccagagtggctcacaaatccagtaatgtttcccaaggccaatgacaagtagagaaggtgtgtggatttcattgacctcaataaggggtgccacaaggatcacttccctctacccggcatgatcaactagtggactcaata

SEQ ID NO: 27729 - DNA, 1545 bp, Oryza sativa
cgatgttttttgttataccaagatgcccttcgagctaatcagtgtaggcaacatgtaccagcgcgagattcaaggggctcttggtgacctgatcggccgaaatgtggtggcctacgtcgacgacgtcgtggtcaaaacaaagacaagcgacaagctgattgacgacatgagggaaacattcaacaatctccgacgacatcgactgaaattaaatccggagaagtggacgtttttagtaccatcagggaagctgcttagtttccttgtctctaagcgaggtattaaggcaaacctagagaagatcaaggcaatcgagaacatgaattcgcccacaagactcaaggaggtacagaagctagcgggatgaatggtggcactaagtcgattcgtggctaggatgggagaacgagtacaacctttcttcgctttacttaaaaacccggacaaattcgagtggacacaggatgccgagaacacgttcatcgcgctcaagtggtacttgtccaaccccttgtagtcgttgcccctcagccaatggaagagttatttccttatattgccgccacaccctattctgttagcactgtcatcgttgtcgagagggataaagcacaacacccggtgtactatgtcaacgaggccctccatgacgccaaggtctgatatcctcaaatacatagactgctctacgttgtaatcatgacattgcggaaactgcgccactacttccaggcccataaagtcacggccgtctcttcttcccccctacgtgcgtcgtgcctgcctggcgctgtcaaggccacatctctgggtcatcctgcagcatgcctacacatcgccatcgggcctcgtcgtgcgtgcggtggtcgagcatcgccgtcgggccccgcatcgacttgttgctctccaggtgcacgacgcacctgcaccactgcacgtcgccgtcagccccgcatcaacaacgggatttcaccgttgatgttgctgctgcttcaagccgtggtcttccagcatcttgcgaagttgccgtcgaggatgacgactcgctggatattgtcatctctgctgcttcaccttgttggttcccaccatccgcatgaagttgttgctgtaatgatgccagatcctgccggcgtggaaagggcagcacgcccgcttcgttgactgaaacaattagcaagcagctagaagaaatctggagcagcaagccgctgaaagaaatttgggatttttttccccttgtgttttctgttttttctctcttgttgatgcaggtaaatgcaaatgatttgttttatgggatagctggttacatcgattctggttggaggacggatccaatggtgcacttgtgccgagagatttttatcttcatcatggacatttctaggttagaccaaccatccagaagcctattaacatttttttcatctaacctataaccaagccaagggcataacggacattttcaagcaaactaaccagtcaactaaagaacaactaacggtaggggtatagaagagttcaaggtgaaaattcggaggt

SEQ ID NO: 27730 - DNA, 908 bp, Oryza sativa
gcacgccactttaattgacagttaggctagtacgtttgaatcaatgctttccccatttaaggctggagatcaaggacagcacactcgcactgcttattctcgctagatggccaataaattcataaacgtgcacagcgaatccagagtcaatatttcatgtgaatttatgtttgtcctttgtggttaacttcatttaggtagagaaataaaaacaacaggcagatattacagtacacatcgtgccctgctaatatgcatgcgatatccaataaatgaacccggtcacactttaaaaaaaaaactcctgcggatgaaagctagcaagtacattatatttcaatgtataatctcacacgggggtagaaagcgttattctgcggacacactgatatggcacgaaatcatacaagaccaaacgtagataatgtttagtgcttcgctggtgggctagggttgtggtactcaggcgctggctgtggcttgggctgtggcttgggttccgactttggctcaggcttgggtggtacgggcttcttgtggaagtggtcaaagaagtccttctccttcttgtgaaagtggtcgaggatggggtgctctggctctggcttcggcttgggcggctctggcttgggatccggcttcggtggcaccggcttcttatggaagtggtcgatgatcttcttcttgatggggccgcagatggtcgccgacgcacacaaagccgacggatagctggtcttgccagcgacggtgacaaaggtgccctccgacaatggcacgatcttggatggctcttgcccggggcatggctcgttggttgcgctgtggagctgggcaatgcagtcagagctgtaaaggtcggtgtcgagagggacgctgaaagcgccggagccgtcaagcttgcatgc

SEQ ID NO: 27731 - DNA, 3341 bp, Oryza sativa
ggccgccttctttgcggagattgttcgcctgcacggtgtgccgctgaccatcgtcgcgatcgcgactctgtcttcaccagcacattttggcgagagatcttccggctcgctggggttcagctgaatctctcctcagcttttcatccccaatccgacggccagtccgaggtgacaaataagatcattgccatgtacctacattgtctcactggcgatcgtcctcgacagtggcttcgatggctgccatgggcagagtactgctacaacacgtcgtaccaatcgtcactccggacgtctctgtttcgtgttgtcgacgagcgcgagccgccgacgcttcgagcttacgagccgggctccacaaggttgccggcggtacaacaggcgctccaagaacgggatgattttctgcgcgccatccgtgatcgtttggaacaagctcaacaaacctacaagacagcatatgatggcaagcaccgagtgttggagttggcagtaggcgcttcgtttgcttcactgaccaggtgcatgtctagctgtcaagaatcgcgcatgaggcgacccgagtgcaatgtcccatatcagattacgcagcgcatcggatcagtggcctatcgcctgcggctgcctccaggtgctggcttacatgatgtttttcatgttggattattgatgcctttccgtggcgatccgccggaccatgcgccgcccctgcctccgacgcatcatggtgatgtttgtcttcaacctgcttctgtgtcgcaaagtcgtttggcacgtggggttcgagaggttcttgttcagtggaaagacaggccggcggctgaggcgtcctgggtcggattggatgattttcatgctcagtatccagattttcagctcgcggacgagctgcttctccaggggggagagatgtcatgtggggattgcattatgcacggcgccgtctcagagttccgccgacacagccgtaatgaggaacagtcatcggtttagtctctgttcagtttacgagtttgttagtcatctttatctctccagttgttaggattctatccctcagctcccttataaattgtaagctgctttcgttggaagtaatcaatcaaagttcagattaatctagtatcagttcctgccttgccggtgcggtgccgaacacggctcctccgcgccgacgaggtccaggaccacgttctgttacagcctttaaatacttcctccgtcgcaatcctccttccaatctcctcgtccgtgacaacttggtatcagatttctctggttccgttcccatggcttccactcaagcacagctcgacgaaatcgccaagaacctgacatccatggcggcccaaatctcagacttggccaggaagatgagcgtcctcgaacctttggttcccctggcgcccaagctcagcagtttgcctgaccgcgtcacacaagtccaggcgtccgcgttcgagtactccgagcaagtccgcgccctcaatctggccgtccagcgcgtcgaggccagccatcgctcgtcgcccgtgccagagacgtcggggtccgctacgcacgcgccgcgcggcgctccgccacccaccggcgacaatgacaagcagtcgggcgacgactccaccgtcgacaacagttttcttcctcgtgccaagttggagtttccaacttacgacggcaaaggcgatccgcttccctggctgaatcgctgtgagacgttcttccgtggccagaagacaccggagtcacgtcgcgtctggtatgcatctttgcatcttctcggtgatgctcagttatggtactacagattgtaacccaattccggcgaaccatcgtggcagcgcttcgtcaagttggtgcacactcgctttgggccacccatgacggacagcccgctcggcgaactcacgacactttggcgcaccggcacagtggacgactacatcaatagcttcctcgccttggcttgccgcgacgccaaactatccgagaaccagcaggtgcaattgttcacggcaggcctcgtcaatcccctcaagacagatgtagctctctgccggccgagttcactggacgacacgatcatgctcgcccgggcgtatgagcagcgggttcaactcggcacaacggaccccgtgccggctcgctctggccgcacaccacggccttcgctccctgccctgccggcgcccgtgtccgccgcatctgccgcgtctacggcgccggacgccgcgtcatcggcatcgaccagcaaacagcccctggtgtcggctctccctcgcaagcgcttgtcgccggcggagatggcccaacgccgttccgagggcctctgctacaactgcgacgagaagtacgtggcgggacatcgttgcaagaaatccttcgtcgtcgaggtcatcagcttcccagaggaagctgaggagaacaccgacggcgcatgcgctcacgctagatgagcctagcatctcgctgcatgctctggccggcgtccgcacgcccacattcaacacgatcaaggtgcaggcccgcatcggcgcaacggacctcgtcgccctcctcgactccggctccacacataattttatcagcgacgttgccgcccgccgcgcccgtgttcccctggaaccgcgccacggcctcagcgtcgcagttgcaaacggcgatcgcatcacctcgccaggctgttttccgtcccagcgtgtcaccatcggcgaccacactttcgtcatcgatttctacgcgcttcctctcggcggctacgacgtcgtcttgggtgcccaatggcttggctctctcggaccgacgctctgggacttcgccaagcagtcccttgccttcggctcacccaacaatcgcgtcatctggaccagcatagacgcacctgcaccacctctctaggcggccaccatcgacggcgcgacgggcgaactcatgtccgagctgctcgacagctttcaggacctcttcaccgaaccacaaggcctaccttctgagcgccatctctgccatcgcatccgcctggaacacggcgtctcagccgtcgcggtgcgcccgtaccgctacgcccacatccagaaagatgagttggagcgccagtgcgacacgatgctacagcaaggcgtgatccgcccgagttcgtcggcgttctctccccggccctactgatcaagaaaaggaatggcacgtggaggttctgcatcgactaccgcgccctcaacgacaagaccgtcaaagacaagttctcgattccggtggctgaggagctgttcgacgagctgcgaggcgccaagttcttcaccaagcttgacatgcgttccggctaccaccaagtgcggatgcac

SEQ ID NO: 27732 - DNA, 3857 bp, Oryza sativa
ccaggccgtcctggactggccgtgcccaaaaatgcgtgcgcagttcggggcttcctcggcttggcgggctactaccgccgtttcatccgcgactcggcaccatcgccgcgcccctcacgacgctactgcggaaggaaggcttccactggtccgagacagtggcatcggcgtttcgacaactacaacacgcactcacggcagctccagtcctccagctcccggatttcaacaaggagttcattgtggagtgcgacgcatcgagctcaggtccgggcgctgtgcttcatcaaggcgccgggccggtcgcattcttcagcaagacgatcgcgccgcgccacgccaagctcgccgcctacgaacgcgaattgatcggcctcgtccaggcggtgcgtcattggcggccatacttattgggggcgccgcttcctcttagaccagcgcctctccaccgtccctcagcaccagtgggctagtaagctcctcggttttgactttgtcgtggaatacaagccgggctccacaaatgtggtggcggacgtgctttcacgacgggacgaacactgtaacaccctgaaaattcgaccgacaaaaatctaaactctagaaatatgggccttcaaaaactttttaataaattgcatcatgctgattttgttcgatcattttatttgattttgatttcgaagtttattaatcgtgagtaaaggatagttaattagaaatcaaccctaaaaataaattggtaaaatgaatataaattaaaaaaaaggattaggtggggatagaagtaaataaaatattgtcgcgaccatatttggatcaattgaatttaagacgataattaaccctaattaagacttcaaataaattatataaataatatatgagtaatattaatctagggtgaatccattggttggaataacacacatgttgagtaaatgcatatatgcaaaaattaggaattttggaatcaaatttatatgggaaatacactaaaatcagtttaatagaaaaagagcactattcatcggccgccaggtgttcgacgtggccctagcccagcccctcctctacccctagccgcgcgccgtctcgtcgcctcgcgccgcgcgcccgccgcgtcgcgccccgcgccgccgtcgtttcattctcttcccccttcccctctctttcttcctctccacgccctataaaaaccccttccctccatccccaagcctccccacacccattccccatctttcccctccctctccccttctccacgcaccgccgccgtcgtgccgccgcgccgccgtcctcgtgctgtcgtgccgccgctttagtgcctccgcgccgccgcccaagtgcgccgcgccgtgcgccgtcgtcaccgccgccgtcggtgagccgctgccccccctgtttgttgccgtgccgccgggtagagagagagagccgagagagagagatgtagggagaagccgagggagagaagaaagaaagaaggagagaaaccgagaggaaagaaagagagagagaaaagagaaagagggaaaaagaggagagagagaaaaagaaaagaaaaaaagaaagggaagaaaagaaaaataaaaaggaaataaataggaaattagagggagattagggaagtgtagaaaatttaaaataactagaatttgattataggattaatgaaaatatcgttaggtgaactcctactatttaaatacctaaagtactagaatttgattatagaactaattatttacgaattaaacaattagatgaatccttatagattgctatagatcatttttagtaatatctataggagatcaattcgcggtaataatttagatgtaattaaataaatataggaattatcataaattattatagattatttttgggtaatccctataagtaatcgattaacggtagaaactagggattttagccgtgtatcatatttagtcatttagtcatagactaaattaggtcttataatatttctaggatttcgtccgttttttagctcgcgatagaaatttctaacctattatatggatgtaatgctcgggtagattaaattaaaaacttatgacaacaaatatttatacccgcaaaatagtttaattcgaaattgggtttgctttagttcgcgaatagtaaaattaatataaaggaattgactttcgctttcgactttcatttggatttatttgggtttttatttgaattctaaccgaattcaaatcaattttcgcacgtaactatagagcccgagggagccgcggatccaggcgaaggtcaagacctacaagatctcgagcaaggcaagtcatcactattccttgatcacgttgatcccaattgtgaaattaattttgtttacaaataagattgcatgcaatgatgaacatcccacttgtgattatgccatgccttgttattgtttatcttcaattccttgtaaccataattacgtatgagtccctagtcaattatgacacttgcttagagaatgctattctagaatcttgcatattcatatttatcaaatgctatatgcttgggcaattacctttgggaaggtaattgagatgcggcatgtggaggcatgagcaccacattgccatgataatggtgacaagaaaggaattaaaaacctatgttttagaccggggcggatggtggatttgggtggtatccgggaaaggctagtaccgtccccggtcaattaaggaccgagccatgaagttaagcatgaaacgacctcgtacaaccacatttctcgaatggggttagacctagcggagtaaatagccgagcggaggcagtatccatgcatagtggtttctcatgtgtatggcaggggctctacaatggtgtcgccattgctaggactgtcgtgtgttgagttgagcctagttataacttaattacatgggtgtaaaacttcccttcccgggtgcgccagaactcctctcattgctagaaaccgtgtacgcctagagtgcatgaggatgaaaagttcatggagcgggtactgccaatgcgaggttatcgaaaggctttgccgtgacgcgtctcatgtgttgagacaaggctcatgtgttgggcagtcatggagtgtgggtaaagtgtacatccactgcagtgtgagtaaaccaaaactattcgaatagccgtgctcgcggttattgagcaccgggacatgtattacacttggctagtctctgaattcttaacttgtgtgggatatgttattgcatgatgaaatttctatgctgcggagtcacttcttgagataggggaaagtggacgtcctcagaaaaccataacgactcaatggcgggaagctatccttgggatcacaatggatggtggacagaaccgtcgttgtttaaatacaaacactggtactaaaatttgatcagtcaatgctaggtcttaagtttgtgaaaagaattataaaacttgctttgcacaaaagaaccaaagccatcctttgaaatacccctatcatatgtattgttgatgtggcggcttgttgagtacggttggtactcacccttgcaaatataaaattaatcagaagcgggagatgaagcttcggagaacccctatgcctactaccaggagggagaagaagacgatggtgcccaataggtcttagtacggtcgttgcctgtgcaatggcatgccgctgcctaaattccgctgccttatctaaactctgcttttggttgtattccggaccgctcggtccgatgatttaagataatgcctgcgggcttatgttgcactaatttctagtagactctcgtgtatgagcatttggtatcccagctataaattactgtgtacca

SEQ ID NO: 27733 - DNA, 1009 bp, Oryza sativa
atcagtcttgttcagtcaggctttactcaattccttaactgatactaggctggcattagcatcccctctatttggagcatttaagtcatactattggcttttccataagtatctagagatcagccaaattttataggctgtgattagcagtcggactcatattggtgtgttccttctaagatgttttataggccaacatctctactttaagaaaaatcactcaatcacattaatgtatctccaacttgccatacagaccaggagagaactacatcaaagaaagaagcctttttaaggtctcttctcccagctacctaataggatgtttcgccaccctaatttaccagatctttgatcacataggacaggttaccactattgtgtagctcaagtatgtctcaagcccatctcactcgatgcattgtctgtcacaaacccgtatggctggtccatatagctcacctcctccaactccccattaagaaaagttgtttcaacgtccatctgatgaacgataagaccataagaggctaccagaacaaataatactcaaattgtggtcaagcgagcaactgatgaataagtgccgaaaaaaatcattgccttatttttgggtataacccttggccataagtcctgccttatacttttcaattgtaccatcaggcctaaactattttcttgagaactcatttgtatcctataggtttgcagtcgtatggacactcgacaacttcgcaagtaccattagacgtaattgagtccatctcactgcatagcgcttccttccaatagtcagcatcaggagatgaatataccgagatgaatatacctcttctatggttcttggagtatcatccacaaggtatacaatgtattcatcatcaaaagactttgcagtcctttatctcttactctttcgagtagctatagtgttatcctcctcaagatttttccacaggcgttgttcatcgtgttctatcggcacaaaagactcggggataaaata

SEQ ID NO: 27734 - DNA, 3170 bp, Oryza sativa
tcatcatcattactcacatagttcacaacattattacatgggtcatccaacattattacatgtgtcatccacagaaaagcggtacaaacctcggttgtcataacctttagcaacaaatgtttcatatttagacaggacacatttattggactcaaacacaagtttaaaattttaaacattgatcgtgccaacacatgcgaaccgttctgcatcagcaaggaggaatctctcctgacctgataaaaataaaacagggaatatcaacacacaaccaccagtatcaacccaccacttaggtgaatgaaatacataacgaactgtaggtaaaaaattaccataccaagatgttactcctccatcgctaataaccatgtttgcagattttttgaccttgcgatcagggcaatacttggcccaatgacgacttaacacacacacacaaagcagttatcctttgcctttctcttgccttttttttttaaaattggttatagccttgggtttgatatcatatatgactttttttcataaaattagttgtagccttgttgtgggatgcttgagcattccttttctgcaccaaatgctaaaacctccctcaaactttttgtcgcggttgttctttgctatcaccttctcctcaacacccaaagaggcaatgagatcaataacactgaacacttgcctcatgtgttttagacaagtagcaaagtccaaccaatatgtcatctatcacaaacttgtctagcaactcgtagatgttgttctcaagttcctttggtagtgcctgaaactcatgagcttgttttactatagaacggtcatcgacgatcttatactcatagcaatgtttcatgacatacaactcactgccagtatcgaagactccgaacatggcctcaagtgcatcccacatatcctttcgtgaaggcatgtgcatgtacacttctactcttttgttggctaatacacttatctatgctccacggaacaagcaattcgcgaactcgaacttagcctcctccacaggggagagaccgtacgatcgtcttgccctatgaaacaaagaaatattgcatagccgtcaaccacaatagtgcacgtgccttctatctcttataatttgaaccatcaattgcatgaggtttaagtgatgcagcaaaggcaactaccaaaaagacctgtcaagtttttggattgttgaaaatataatcataatctctactatcataaaattgaagatatttttctggtattttggtaagtcatccgtgcttgagtcggttttaatttcttgtttcggttttaatctctactcctcaaaatccgtaatttaaaaaagggcgaaaaaaatcacacggaaaaagaaaacgcccataaaataacatgaaagataaacagggaaaaaaacgtccgattcgtaccggaacgaaaaaaaggcaaaaaatgctgggtaaaacaaaaaaaaccgaccataaaaaaatgcaggacattggcaaagtacttcagatataacatgtactactcactgtagttatgtggtacttctattcaattaatcatctctcagtacacattgcacaaagttataagttctcacccgtagtttacattaggaccagttcgattattgtacttgtaacgatgattcatgctgtcatgcatgcataaagcggtgcgtggatcctacgtatgccagccattaatggataggttattatcatttatattctcttcgtctcaggacaaaccaacttaagatataagatgctactcaactaaggtcctgtttgtttcagcttaaaattattgtaatctagactattaaatcagattactctaagcaggattataataagctgacataaaataagctacgagttgtttgtttctctagattattagagtcatctaagggtagtgggtcattagccacttaataatctggaaaaagctcctctagaggagattattggattatagtaatctggcttatagattataataatctagcataataatctacttgtttgttttagcttactcctaataatctagattataataatcctaagctgaatcaaacagggcctaagccaaccaaagggggtgaatggttggtataccaaaaaaccgaaacttttagcggaaataaaaatgacccccaaattcgacggagatcggtctgaccgcagttgtccagccggtctgaccgcgcctgtgccgtcggtccaaccggtgtagaacgatcggtctgaccgccctgagatcgcctttacgccgccggtctgaccgcctttacgccgctggtctgaccgccgtgatgccgccggtctgaccgccggtgtgtcgctagttagaccgccgaaatccggtgaaatacaaatcgaagaactcttaaagtgggtgactactttattgattctctctgtgtttacaaactcatactagaagtcctatacaacttaggaaaccctctagtacaagaaacaaactttacataaccactcataccaaatttggactcctttcaaattcgactccgcattccatacacacacaatacctccatcgtataccatatggaatcttcaccaaccatgtgtattgaactctagccgtagtatcccgtatgatctctgaccaccacggacgtcgtcttatccccaagccgactcttagtccatcaccgcaaatactctcctgccatccgagtcacctacacatagaacaaacaaagaaatcatattccgagaccaagctatctccaaccttgactcattagtagcaaacaacagtattacatacgtatagtatccatctagaagccataatcatgaaacaatcacggatatccaaacaaacaacccgaaaccgaaaccgacacagagtccgccggtcagaccgcgggctgcaccggtctgactgcgcgatacacgccggtctgaccggtagcacatgcctggtctgaccggacctattccagcagtacctgtagatttacctgtgaaatccaatcatctcctaaaccacttggtgaataaattgtaaatatcaaaaccaataatctccgatgccaattgttcatcacagaataacaatcaaaaacacctttaattttacagttacatagtctagtataacgaatctgaatatcatcatgtccagat

SEQ ID NO: 27735 - DNA, 1963 bp, Oryza sativa
aatcgcgtgcgatgggatcaccgtccgatatcccgatccaacagataatatcacatgtgtctgttagggttggagtcaccatcaccactacggaattttaaagcagtagagattattgcagcctagttcaatttctctgtatatctctctctcctgtttctctttctcttcgatctctcgtttctaacgatctctttcctctgtacacaggccaaagccagcccagcccaacccaagccgccatcctccccactccccactgcccacgcacggggacaccgcttctgcttcgtcttcaatcctcggacgtttttcctccatgaaagcagcaacgtatccactaattcccatcacccatcctatcatctccctcatcaatcttactgtttaatgccaaaaatgaaactacctcgatgagctgaatccgtttctcaaacttctggtgacctctctaccttcctcctccacacacaccactgagtatgaatggccgtttttttttcttccaatctactcactaatcccttcctctcctgaatcaattttgtcgaagcaagatttcggcaataataaaaggggtggctatcaagataggaaagtggatgggtttggagaccaggaattttatacaggttcagggccttcttattcaaaaagtaataccctactcctgtcgggggattgatccgccgagtatattattgatcgtatgatctgggtgaaattcgtgcccctagaggcacccggacccctccttatataggggaaggggtccgtattacaaaatacagtccatatccctaacggaatatgtagttacagataaaatacaatcgtaaccgactaggatctcagatattttcttgacatacaagtttacattttaacctgagtccttctaaagatattctatctacacatggcaccccatacccagtcggactatacatgccgtgtaggtatggggtatccataatctccacaactaggttgtttacctaggaatagatgtcacctcctttcagccatatttctatctaggtggcagcctagtccgattacttggcctctacatagtggctactgcttacttgcttagcattttctagaatactgaatagaatttagaaataatatcatgtcttagccaacaatatgatagtgtcaaagtaagggtatggaaactggtggcattcgatattggaccgaatgagcctgaatagtttaattttgaattagaatgttattgatttcttatagatgtatttattctgcctggttactgactagtaataggtccggctaccggtcactggccggtaaacattatttggattcaaatatttccagtaagttctggtaaccagcaataaccaaccaactaccagcgttgcaaaggagacctgcatttttgtattgggttttaaaacctcggttcaagcgaaaactcaattacttggagatggaaccatagcttgttagtgtttgagttttgtcaatttattctaaattttacttggaaactatgtgtagcaggaatagtaaatggtctcatttatcaattctgcatgataagtgcatgcttaagtttgcttgttctcttgggtagtgtttggttgatgggatgggatgggacgggaccaacccacttttagaggtgtttggtttaggggtgagtggaatgggttggttcctagagaggaatattcctctcagatccgggaccaagccatccggaaaaatctggcggacgaactcatcccacctgggatgagcgcacggcgtgaggtgccgcttcgccccgctcgctcgctcacgtcgtgctctgctcctctgcccatcgtgctcgctcgctcgacgacaacggcgcgctcaagcgatggccacggccgatcccgtggtggggagggcggcggccgcgcctatcccgaggtgggctcacgcgacggcggcgaatcccgcg

SEQ ID NO: 27736 - DNA, 1661 bp, Oryza sativa
aacttcataaatattcaagcaaaagtcattgagcaacatgacttcaattgttccacttgcaacaacaaattcatcagttctattttctcttgcatgtatagactccaaatcacatgagtagcaacatcattcttcatatcagatgacaagtgattagccaactgggacatgttcaaccaaaaactctgtttctcttcttcctctgaaacaacggccatgaaccttactggtttttaagctgctatttcgacaaccagatctgccaactgccaaacaagctcattcatctagttttctgtgcaaatttctgttgctacaatctctgctctattgttttctgaaacatgtatcccacagggcgactaattagccatagaattaaaaaattcaatacattatttcaattggaaattttctagacagctcataaattttagaaacaatgaatacccataattttaggtagtatttccagaaacatgcagcttcagtttaggagaccacatggtggtcgcatcctggcggcgatatctgcagagggtcaccgccttatggcctaaacagcgaggggctccagcagatgaggcagggagaagaggtctctacctgcacgctgagccgcccctcctcctgcgcgtttagttgccccctcgcgctgccgcacggcgctctcatgcctgcttgctgctcggtgcccgctcaccgatgaaattagcccgccgctgctgctgttgccatgacgagagagccagggtttggtatggagaatggggtaacacacatgtaagggctgtgtggctaattgatgttgtatttgggggtataacaatccttttattctgtaaatcatttttcattccctttttcttttctttaactccctaattcttggcacacctaacaaacatccaaaccaggggcaaacgggagcttcggttacaaaagtgatggcaaaatcataaagtaaaaaaagaggggtaaaatcacaattgtgtttgaaaataggggaagaacacaatttccccatttaatttacattgagtggttctcagggatgtcagggactcgtggctgatgtttcagaaagtatttttggccaccactattccttgcaaagcattttgttccatgttgttttagcagtgaaaccgagactctgaaaatgcaatgctctatgctgctccctccatcccaacatataatgcacccacaattttaggaaaatcaacatttgcaaactttgactaacagttaaagtgtactaataatataatgtttagtgtcatgcatgtgacatcattagattcataaaaatatttttcatatgatgttaatttgtgtagtttttgatgatatatgtatgaaattaatggtcaaagttttacattgaagacactgcaaaaaaattatacgcctcaattttttgggacggagggagtattgaacttgatcactaaatctgaatacatgatactctagttacattccttttgttagctagttctgtctgatttcaagaatatatttagatatcttaacattttcttgagaccaccaaatgtccctgtttggcgtgtttttttacacaatttatgattttgtttccgattgtcaataatgaatggctaacaaccttcttatgcagttattggaattctaga

SEQ ID NO: 27737 - DNA, 1070 bp, Oryza sativa
ggtatgctgaaaaggtgttttttttattgtagtatactgctgctagaactgcataacttagatatggttaaaatatttattgactgcagttgcaaataggaaagccagtggtagttcatcccagacagataaggattacattcaatctttaaagggtttgtatttttctaataaaagcaaatcattttacatttattaaggaaaaaaactgacataatcaaatatgtatgttacagcatcatacccagaacgatcgtactactgacctccgacatatgaatgcccattttgtggtgccatcttttggtatcaagagagagttaaaaccctctctgctgtctcgaaaagaaaaatagtttacaacctatgttgcaaaagtggcaaaattgaattgcctcctttatgtcctctacctgaaccgcttgcaactttattgaatttcaatggtgatgcacgttccaaaagatttttgagacaaattcgatcatataattcgatgtttgctttcacctcaatgggtgcagctattgacaagtcaattaataatgggaatgcgccttatgttttcaaaatcaatggtgttgtgcatcacagaatttgtactcttctgccatcacgaggtgcaccacctaaatttgcgcagctatatatctatgattctgacaatgaaatccaaaatcgattaaatattttcgaaaatgattgcgacaatgctgatagaccagaccctgaaattgttagcgccttaacacgcatgtttgataccaataatgaacttgttaaaaatttcagatatgctagagaccgcctctctgaacatggtaatgaaaaaataactcttcgctattaggctgcaatgctaaagatgatgtgcagtataacctaccaacaagtggtgaaatagctagcataatagtaggcgatttttcagcaaaagaatataaatttggtgtgcttgttcacgataaagatcatggaatgcatcaagtgttttcattgcatccatcatatatggctttgcagtatcctttgctatttccatatggtgaacgtggcttccatctaggcat

SEQ ID NO: 27738 - DNA, 2192 bp, Oryza sativa
aacgctatgattgcaaaacttagatcacaaaataagattgtgctcgctgttgcctcatcaggtgtagcatctctcctactacctagaggtagaacagctcactcccgatttaaaattccaattgacattgatgaaactagcatttgcaatataaaacgaggaactatgttgcctgacctcctcattgaaagtgcacttattatatgggatgaggctccgatgacacgtaggcactgttttgaagcattggatcgcacattacgtaacattctttctgaaacttgtcctacaaattcaatcataccttttggaggaaaacctgttgttttgggtggtgactttagacaaatcttacctgttgttcctaaaggttcacgcctcgctgttattaatgcatcaattacaaatttagacctatggaaacatgtgacgttgttatccatgaatataaacatgagactgttaaatccaaccctaccagaaaacacaataattgaattgcatgaattcagtacatgggttctagctgttggtaacggaacattgcctatgattgcaaaagaaggtgaagctcaaccctcatggattataattcccgatgatcttcttgttgtaacagatggtgacaaaatcgttgctattgtcaacgaagtgtatccagactttcttgcatcatataaaaaccctacatatctatcttctcgtgccattgtttgccctgcgaatgcagtagttgatgaaataaacaattatactattgatttactcccaggagaatcaagaatatatcttagctgtgatacaatctcaaaatgctcagagcaaattccagatttcgacctgttatacccacctgaatttcttaattcaattaatgcaactaactttcctacacacaaacttgttttaaaggaaggtgttgttgttatgcttctgcgaaatttgaaccaatcgataggcctttgtaatggaacaagattattagtcactgctttaggggaaagaattttacaatgtacaatactaactagatcaatcatcggtgaaacagtttatataccaagaatcacattaagcacgtcaaaaatgaaatggccttttacattacaaagaaggcaattcccagttcgagtttgttatgtaatgactatcaacaagagccaaggacaaacacttgagcaagttggcatatacctcaagaaacctgttttcacgcatgggcagctctatgttgctatttcaagagcaacaagccgaacagggctcaaaatactgattgaaaacgatgacggatcatgtggaaaccaaacaagaaatgttgtttataccgagatactttctgctacaatggaagcggtgtgccctcactgccatattgcatatattttatctctatatttacctacattcttggtgtcacattgggcatcatttcctattgcaggcttggccgctccatgcgtagctttccctcctcagctaattgcaatggcttttgtatataaattttggagtaaatatattgtactcacatgtagtatatgctgtatcactgctgcaccaataggctactagatttctatgtgctgttttctcacttgcttagttcattacagtgatgcttcatatttacataaactaaatatcttcaatatttatttgcagccttccaatggcgtacgtgcttatttcagaccttatgtatggggacactgataaacggatcaaagcgagggtatctaggcaatgggactaccatgatctgaatgatgaaacaaagatctaccacactgatcttgtcttgctggatgaaaaggttatagtctaattaacactcatttcttctttattaatacttacatacaaacatggtactaacaaggtgctttatatacacaatatgcacggcaatagcatccatgttcaaatctatccacctgccatgattaagcttaggactcttctacaggaagggaaggttactactttgactccttctctgtcagatatgcaaacagaacatataggccagttaccaaccctttgatgatctcattcactaaatggacaaccttagaagaatgcattgctgcttttgatgattttcctgccataactttttcattgacaccttttcaagacgcccggtctcttgcggacagaaatgctttctatgttggtataacctcttt

SEQ ID NO: 27739 - DNA, 2068 bp, Oryza sativa
ttgaagaacgcaggagcaacctaccaacggatgatttaaaggtgtttttcaactcagatcggccgcaatgttgaagcttatgttgatgatgtagtcgtcaagaccaagaagaaggatgatctgattgcggacatagaagaaacttttgcgaacatccgcgccttcaggatgaaactaaaccctgaaaagtgcatcttcggagtactgtcagggaagctgctcggatttatggtgtctcgtagaggcatacaggccaacccggagaaaatcaacgccatcctcaacatgaaaccgccgagctcccagaaagatgtctaaaagctgactggttgcatggcggcgctcagccggttcgtctcacgactcggcgagtgggggatgccctttttcaagctgctgaagaaaaccgacaatttccagtggggacccgaagcacaaaaagccttagaagacttcaagaaacttctcactactccaccagttttggcctcgccacatccacaggagccgctactgttatatgtgtcggcgacctcccaagttgtgagcacggccctggttgtcgagcgtgaagaggaaggccatattcaaaaagttcaatgaccaatttatttcgttagcgaggttttggccgactctaagacaagatatcctcaggttcaaaagttattatatggtgtcttaattaccgtcaggaaattatctcactactttcaaagtcactcggtcacggtggtcacatcgtttccacacggggatatacttcataaccgcgaagcaaacggatggattgcgaagtgggccttagaattgatgtctttggacatatctttcaacccacgaacttcgatcaagtcacaagctttatctgatttcctcaccgagtggaccggtgccaagaagacatgccggaggaaaagatggaatattggactatgcattttgataggtcgaagaggcttacaggcactggagctggggttgttttaatttccccgaccggagaaagattgagctacgtattgtggatacattttcctgtgtcccataacgtggcggaatacgaggcgctgctccatggattaaggattgcaatctctctaggcattcgccgactaatcttccgtggagactctcagttggttgttaatcaagtcatgaaagagtggtcctgtcttgatgataatatgaccgcttatcgacaagaggtacacaagttggaagataaattcgatggactcgagctcacccatgtcctccgacacaataatgaggcagcagacagactggccaattttggctcaaaacgggaaacagctccttcagatgtgttcgtcgaacatctttacgaaccaaccgtgcccagaaaagaaacaattgaagccatggatactcaaggcgtaagcatgattgaaaccgactggagagaacctctcataagatttttgaccaaacaagaactccctcaagacaaaaatgaagccgagcagatttccaggcgcagcagactctacgtcattcacgagaccgagttgtacaagaaaagcccatcaggaattctgcagcgctgcgtatctttggaagagggaagacaattgctaaaagatattcattcaggcatctgtggtaatcatgctgctgcacgaaccattgtcggcaaagcttatcggcagggtttcttctggcccacagctgtttccgacgccgacaaaattgtgcgaacatgtgagggttgtcagttctttgcccgacaagctcacttaccagctcaggagttgcaaaccatcccgctgtcttggccgttcacggtttggggtcttgatatggtcggtccattcaaaaaggcagtcggtggttatactcatctctttgtagctgtggataagttttccaagtggattgaagccaaaccagtcatcaaaatcactgcggacaaagctagagatttcttcatcaatattgtacatcggtttggggtaccgaatcatattattactgataacggcactcaatttaccggcggagtatttaaagacttttgtgaagactttggcattagaatttatta

SEQ ID NO: 27740 - DNA, 1926 bp, Oryza sativa
attcttggaatattgaacaccttcgtcgattttatgcttgggcagttcgtttgtatctttcctctttgactactaacttcaagtttttccttgaagctttcagtcggggggatgctataataataatggaacatgatttttatcaattcaatttgcttacttgatttatcattgccctgcttgattttttggcttagtcaatgagactgaaagttttttaataacttttgcgagttctaggctcaataaggtttgacaaacacttttaagaaatcagaggctaagttagaattgtctagcacaacataaattcatcagtattgtacaaattgatcttccatcatcatcagaatcactgttactaatcagtgtcagttctttcatcatcggaattatcagacccagtcggccgaaggtcggcatcttggaatctctcaactacgtcagcagcaatcttgtcagcagctttttgcgcatcattgatgaggtcgagggctgtttcttcgctcgtcccgtctgcaaacccatcaatggcgtcggtatcgattttggggtataaagatttggtcatggctaatgccatgcttgctcccatactcccagcctccctgatattcttgaagtaagtatccagagcgactcttagcttgtcaaagatctcggaagcgtcaagtgtactcggaccggtgttattgaagaacatggcttggatgagtggggtagcggcattagcgactttatccctggctccttcaagcctattgatcttgtcaactaagacatcaaactgtgcctgggacttgattttgcgatctgcatcaatagattcatatcagcgaacggctataagaacatggggaatcaattatcattaccttcatcatcttttaaggccgagtccctctgctttgctaattcggccttgtctttctccagagccttgacctgcttctctaggtcggaaatcctagcagcttgcactgtaatatttttcggttaattgatatcacaaggaaggcttcacgaatacgtcagacagatatggtatttacctttggacgaaccactcaattcatagttggattcttgaagctcggagattctattcctcagatcatctcagtttttctcgcgagctccttgtcctcatgtagctggtttttagtagattcgagagttccaagatggggaactaatttctcaagagttgtggttttcgcctcattcctgagatgaatcctctgcaatatgaatttatcggcgtttcagcaagatatggaaggggacaattaaagctatgcacaaatggacttacatttacaatatgagtggcctggctgagtgtcttttttagcaagcatacttcttcatcttctttctgcttgcttatcacgatttcttgaggttgcatatcgtcgtccaccacttaattaggatgggagggcgcgagtcttcagccgcctgtatacggggaatttcttcttcatcaccaatcattggtcctaatgtatccacgtataaaggttagacgattgattagagtcatttggatcaacacggtttcgggcaaggtgtttacccgtgatgatttccgaacggggacgagtcgactcttgcgtcttaacgggagattctggcgtcgggtcactgctggtgtcttgtttatgagggttgtctgcctgagctccaacttctggaatctcttggcttggtctagtgcccgactggttttctatcgggggctcctggttaaccccggctctagcctcggccgactcgtttccggttgggggttgatcaccagatcatacattatcggttgctggctggttatcactcggatgatcctcagcggttggctcggtttcttttaagtttgttcccgtgctggtcgggtcagagtcttttcccggaggatctatatca

SEQ ID NO: 27741 - DNA, 1218 bp, Oryza sativa
aaagtcaagagagtctggatcttcacgatttggatcatgtttgctgtcaaactcaaaagctgtgcgggatctctctttgattggagctaaccggctttttatgaagtgccgcgtgatttgttctccttacaaaccctgctcctttagctttatcatgcgctccatcagttccactgcttgggcagcctcatctcctgtaggcaatgaattccatgtgtcttggtagaccgtagggagacaagaatactcgggaagggctggttcaggattttgaacgtagaaccagttggcgtgccagcctttgtttgaggtcttcaagggcatggagaagtatttttggcttagtgttcccctgagttggaaaccagcgcccccaacaacacatggtttgctcttgtttggctggggcttgaggaagaagatgcggcggaacaaggcgaaatgaggcctaatgcctagaaaagcttcgcaggcatgaataaaattggagatatgcactatggagtttggattcagatgatgcaagctaatcccgtagaagttcagaattccccggaagaatcttgaggttggaagagaaaatccgccatagaagaagtgagagaataccacgatctcatgtgtatcgggggtcgggattgcctcgccgaacgctggtcgccacccgatgatttccttcgccggaagaacgccgtgcgccaccatttcttttagattctcttccgttacatcggagggagcccactgactctcgaaactttctctctcttctgccatggatgcaagttgaatggattgatttggtccaagatataggtggaggggaatgaggaatcaatgcggtggacatgcggagaggtttcgtgggattttttgagaatggattggggcggattgatgaaccctagctttgacggtgcggtttgatactgtagcaaggagtggggaaatggcgagagtctcggcggggaaaacgaagcgccgcttggactttggtactttgttagggtatcgggagtgctaacaggcctaggcctgtccagtacttcaggccaatattattaccaggcgtggcccattgtgatccttaggaacttaggcactttttgctttagcaatttgtgctcacaatgatgtgacccgatgctgctaaaatcctttttaatgcgattagataattctttagaattactacgatgcaaataaaaggtacccaac

SEQ ID NO: 27742 - DNA, 615 bp, Oryza sativa
actttcttttccatatagtttttcccctatatatttctcataccttttcattggcttaaaccttcttagtgcgtatactgtcgagttccagaagcgtgggctgccacatatccactgcttagtttggcttgcagcatccactgctgatgtgtcagcatctgtaatagatggcttcatctgtgctgagatacctgactatgacacagatcgtctaggatatgaattggttagtgagttcatgatgcatggtccttgtggcgacgcaaacaaaaattgcccttgcatgaaaaatggcaaatgttgaaaacattatcctaaggacttccaggatgaaactattattgatgaatctggttttacaatatacagacgacgaaacaatcaacgatgcataattaaaaatggaattgcattggacaacagatcagtcgtgccatacaatcttgaattgcttaaaaaatacgaagcacacattaatgttgagtggtgtaacaagtcaaatctgattaaatatttattcaaatacattacaaaagggcatgatcatgcaaagatatactttgagactacttctaagacaggaaatatgtcactaaatcatgatctagctcctcg

SEQ ID NO: 27743 - DNA, 4495 bp, Oryza sativa
ggcccttcccaatttggagaccatttcccaaatttattatcttttgaaccaacaggcagaattgttttccacattaattctccaatttgaaacgatttttccttcacctttttattgtaagctttagctactctcaatttatctttctcaatctctctcaaagctttcaatctttcatcactaacctcatctattccgtccatcattaagttgtgataatctactgccgacaaattattttgtctggccaatctaagggcgtccagattcacctcaacatgcaaaatggcctcttgcccatatactaattcaaatggtgttacctttgttgcaccatgcttagatatacgatgagcccacagtgcctcagacaaaacctcgtgccatcttttaggatgttcctctattttcttttttatcagcctaattaaagttttattgcttgactcggtctgtccattggcctgagcatagtatggtgatgaacaaagcaacttaattttaaagattccgtaaattcacgaacttgatgtgacataaatgatgatccttgatcagttgtcaaggtttgtggtatgccgaatctatgaataatatgctctaaaataaaatcaatcacttctttatgggtcatattttttagaggaacagcctctgtccactttgtaaaataatctgtagctactaaaacaaatcgatgacctttggaagaacaaggatttatcggggcggatgaaatctaaagcccatccacgaaacggccatggtttaataataggatgtaacatagcagcagacggctaattggatatcaccaaatttttgacatgactcacaccctttataatatgtaaagcaatcttctaacatagtgggccaataaaaaccagctctccttaataaccatttcattttatgagccgactgatgtgtaccacatataccttcatgtacttcacccatagcaaccttgcttggtctaaacttagacattttaaaagcaacccatctacagatcggcggatacaaatctccattaagtaatatatattttagggcttgacgccgaagttttctttcgacagtctgactagggttctcaggtaactggttaaaggttttctccaatcatcaggatggaccacataaatcttaacatgctctagcatcggtctttcaatcataaacaatttacctctactgactcgataacgggatgcttgttgcgctagattattagctagaacattctcttccctagaaatgtgtttaataacaaaatcatctaaatttgctatgatctccaaacatttctccaaatacatattcagtgatccatcaaagcattgataattcctagaaacttgttgcacaactaataaggaatcaccataggcctctatattctttacatccagggattctaaaatttgcaatcctcgcaaaagaggtcgtactgggcttgattattggtgcaaaaatattctaaatggacggatgtctcaaaaatattgcgtttggtgaaattaaaacaacaccaacaccgtgttcctctctacaagctgagccatcaaagtaaagtttccatgggcatacagacgagtaactaaccctcttcatatcatcattaatcctatgatcaacaataaaatcaacaacaatctggcctttcatggattttaaagattcgtaagccaaatcatactctactaaagcataagcccattttcccattctaccacttagaatcggcttttgcaacatatattttatgacatcggtctgacaagccacaacacaagtactagatagtaaataatgccttagcttggtgcaagcataatataaggacaagcataatttttcaatgaacacatacctcgtttcagctcccagaagtcgacgactcaaataagtaacaatatattcttttccctcaacttcttgtgtcaaaacagcaccaataacaccctcttctgcagcaatatatagccgaaatggtatcccggccttaggggctcttagcaccggagaagtagacaaatacttcttaatttcatcaaatgcttactgctgttctgccccccaaacaaattcggtctctttttttaaccgaagtatgggtgtaaatgcattaactttgccggacaaattagatataaacctcctcaaataatttaccttccctaaaaatttttgcatgtctaacttacactgcggcgctgttacttttctaatagcctctatcttggcagggtctatctctatgcccctctcatgtactataaatcctagaaatttgctagacgacacaccaaaggcgcatttaagtggattcatttttaaaccatactgacgcatcctctcaaacgctaaacataaatcggctaaatggtgatccatacattccgatttaacaactatgtcatcaatgtatatctctaatataacaccaagtaaatcatgaaagattaaattcatagctctctggtaagtggcaccggcattttttaaaccaaatgtcataacgacccactcaaataaaccgacaaaactaggacaacgaaaggccgttttagacatatcttcttcggccataaatatttgattataaccagcattaccatctaaaaagctaatcactctatgtcccgatgcatcattaattagcatgtcagctatgggcataggatactcatctttaggggtggctttatttaaatctctaaaatcaatacacactctcaatttcccagtatttttcttttcaacagggacaatattggaaatccattgtgcatacctacacggcctaataaaacccgcctttaataattggtctatttcttctttgatccagtcgtacatattagaattaaatcttctaggtggttgcttataaagcctaaacccagatttaatgggtagccgatgctctatagctctcggctaagtccaggcatttcatgatattcccatgcaaaacaatcgacatactctctaagtaaaccaattactttaactttataatcggctgtcatgttttgatttataaatgtcggtctaggaatggtgccatcacctatatcaactttctctaaagggtcagccgacgaaaaaccttgtcctaatttttctacttcatcaaaatcatcaatagcctcccaaatatcgttcttatttgaccgatattgctctgcacgtttttgtaaccaatctaaattgctttctttattcatttataacatcacactactgagccgagctgcagaagccggctttatagacacgggtacaaaaccatccttagtgacaataacataatcataatcagaaagatctaagcctgttaaacactgaatattaccatactgccaatcaactgaggcatcggctaaagcaacgcaagccgaagtatctgcatgaacaacctctacatcatcacctacccactgtattaaagtttgatgcaaggtagaaggaacacaatggtttgcatgtatccaatcacgacccaacataacattataattaccttgcacctcggcgacgaagaaggcagtagggagagttttgctcccaatagttagctccatggaaataatgtccttagcttctgttggctctcccgtgaatccattaagtgtcaaattagcttttagaagctcactgtcctctctgcccaatttcttaaaaactgaatatggcattaagttcactgtagctccaccatcaaccaacattctagaaataggcctcccattaatatgccctttgatatacaatggtttcatatggcggctcgattcatcaggcttttcaaaaataacatctttaggagcaagacataattgtgcaatctcttcatcgacgaccctaaattcagaaggtagtgtaaaaaccatattaatatccattctttctggaagcggagagccatctctaattaccggggaaccacattctaacagatcatgctcttcatcactgttttcttgaactgaagctgcaacttgtttcgccctccattccctgcgaacacgtaccatgggttcaggattgatatcattgaaaatttcttctctcatcttctcagccttagactgtctcaactcttgtgcgcgtaatctttgcagcctccgcttccgagtgtgtccaatatctggagggcaccattggagctgtttacctttgccgggctgcatagacacattttctccacatgaaccaccaccacaatcagctgctggcactgcagcggaagaactgttcatttcggcaggcacggctgtgattgcggttctgttcatctgggctggtactgtagcagtcggagcactgttcacctgggcctgttctgtaacaaccgcactactaatcactttctaactcacatgtgaattgcccgctcctccactgatcattttttgcctgccaaaactgcactccaatttcctcctgaatccccaccttctttcacacgacgccccttatt

SEQ ID NO: 27744 - DNA, 1176 bp, Oryza sativa
gaaagatcaacttggaaccgaagaccactttcaataaccgtagttacaagggaatcaataccagctaagacttcaagctgcattgttctgtagtcattttgaatagcatcaatcttattgacaacagtttggatctttggcttgtttttgtccagtaccacctgcatgtcaaatgttagagcacaagaaaacatactcaagaatggaagctatcatgcaattagatattacctgagcaataagcttcttgtaaggtaaatggtcatccctcaagttcaagtgtgcaatatgccctactgtctcaaaccctgtaggaacgattattccttctgggagtatttcctctaaaatctacaaaaagtaagattcaatcaaaacagttaagcagcagaaagtgaacagacaacgagcatggtgcataagaatatttatttttttccatgtgaagcaatgttgatcaacatatctaatagaccccacaagtaacaatgtgatgacatgctaatacagtcctcatgctcctggaacatacagtttaatatctaaacatttcggtagatcaaaccattatacagcatttggattgaaaacaaaatctgtggagttgaaatttgtgctgcctaaaagttaattagtaatcccacaattcatatttgtgcctcgataatgcatttgtacgactgagttttcaattgcatttctatgttgtcacatctttgaagcaagaacagagtagaccaatcatctatgagaaaactgggaccagactctgatcttgagacaattcaatctaacctgtacagactgaacttttggtctgtatccggtatttgcaaaggcagtgttacctggacagtacagaagcatcagatactgacacaaatgagaagcttgaaaagaaagaattctacagactttgaagaacttgaaaacaatacagtaaattaaacaagcattattttaaatctacagaaattggataattttattctagaacaaaaggtaagccacaaggggtaaataccattagaactaaaaaaaggggtctcaaaggaactgagcatagcccagttggtaaggaggtaaaatggttcatcttacccacctgggtcagattgacctaggcacctaagtatcagccacttgtgacacatgtcaaacaagacaagtagtctg

SEQ ID NO: 27745 - DNA, 1431 bp, Oryza sativa
tgttcttagcatatatataatttatggcttccagatcaacagacagaagcccagaaggttgaaaacacaaaatgaatggctatttactgcacatagtcaaaccaactttgatgattgatcctttcaatcaatcgccaactcatgatagtagttggctcacacttctgctaactgattctttgtgtttaaatccatgtgtatcctataatattagggattagggatacaactggagactagaacatctcaaggacaacactggcattagataacaaaggaagccgttggtataatgacctaatcaaaaaaatgcactggcacaaaaaacagcaaatacttggacaaaaataataacaagagatgaagagaactgaaagaaaatgatgcttagaccatcaactgtaaacaggtggcaaaatacctcattcattggccagtaattgtagaacaaggtcaattggcattgcacaagctcgtaggatgaagatccatccttgttagtttcatggtccaacacaacctgaaaagttggcttaactaaaactagtaaacagattccactgaaagagaaaatctacaaaagtaagatatacatcatttcttcatgtatcctcttggtatctattttgtaataacttcataaaccttgaagataattttgcaaaaaagaataaaaaataagctaccatttctgggtccaaataaggtaatattgtgtcaaaaccagtgaaatacgtaaattaaaattttaaacaggctgaaagtgtgattttcctcatctggtctcgaaaagaatagttagaaagaaaatactgtctagtctggtgagttcttgtgagtatcatcaaggtagaatgctgaaccaatttggccagcgcacacccaaacctcatttgatcacagttgaatccacagaatcattcaaatagaaacttttcctaacctatgtgatttttatttctacaactgcaactatgaaaggctatttggtgacaagaattcatcaccttgacagcctccgggaggtcatcaaccctcttgttggcatagttctcgtccaggagcagcaaccgggtgggacctcctctccacgtgatcctcccgaacccctcctccccgaccaaccccatccactcgtcgccgtgctcctcttttctctctccgatcacctccaccacatatactttgtctttagtatcccttgccgtagccgcagcctcgccgcctccttcatccttcttccccttccgtttcctcgcggggggccgcgacatcttggcaaggttggggaattgcacgaagcctcgggcgttgaactcgcgggccagcttctctcggcgagccaccgcagttggcagggatgaaggagtggcgaggcttggatggggaacccgggaagaggacgccgccgtcgtcgccgggttggcggac

SEQ ID NO: 27746 - DNA, 2550 bp, Oryza sativa
agcatttacatggtctaacttacataatttgttattttggttaaagtgagataatatacagttagttcatcatgacataaggatatgatttgctaattgctacccttgcaaacaaatgtattttttctcttcctaagaatagtttttctttctttttaacacatgtatctttggctacgtatttctaggtgatcctggaaccacccacaagcttggaataatatggttgcaaattttatgtatatattaaatgtggtctgtcgttggggcatgtgtaaattttatatagccattgtttcttaagagtaaaataagacaccagttattaaaattctgtgtggaatatcattgtggttattaagctttgaaaatacatagtatattaagaccaaattaatttgctaaatatatcgttgcaggtctaaaatctaatacatcagatctttaatgctaacagccggatataaagaaagtagataaaactaattgaggaacggatgttgtgattaattgaaaagtagatgtaggtggaaaaaattgaatggtgaaagtttgtgattgaccgagaagagaataatggtggagttattatgttttatgacaaattttaaatattagaagttgctatattttaagaagtaccactcaacgatacatttaggagcgtcaagatagacattgtattataagctcctcaaccaaccaatgtaaaagttcgaattaaaggcttcttcacattgctaccacttttaagttttaaccctaataatttttgttctgtaagtatgaattaagagctcttcaccttgcttccacttttaagttttaatgctaataatttttggtgttatcgataacaaactaaacataatattgtatcatcactctaccaaaatttgacatttcaaaagtttcttctcacataaatactagtaattttttttggcacgaatactgtaatttttgataatgctgcaaactaaacatataatgctacaaactaaacatatctaacattgccaaaatttagtaatactaaaatatgccaaaatttatgaatactaacttttggtttggtttattttcgtgacaaactcaaccctgaattccttaacttcacgttgcgcctaggactgacggttttcgttaaccgagggactgcactgcagtccccattaccgttcaccgttaacgggcccgcaattcaatcgatttgttggtcagcccatactgtgccatctcaacgcagcagctcagtagtcaaccaaatgtaactagtctcttcttaccggaatccccacaccttctcgccacggtccgacgcgcaagcgcggcggcgctcgctctcgcggttctcggtgacggcggcctcgtcccactcccgcccggggatgaacggcaccccgttgcgttgccatctctagtcgcgcatgaccacccgcgccggcgcacctctcgccgtcttcctcgtctcgtccctcaagtcggccgccgcacgcctcagccacggcgagcagctccacgcgctcgctgccaagtcgggcctgctcacctccaatcttttcgtccgcaactccctcctcgccttctactcccgcgtcgcccccagcctcgcctaccacctgttcgatgaaatacccccgctcctccgcgacgccaccgcccacaacattctcctctccgcgctcgcccgcgcgggccgcctcgaacgcgcgcagtgcctgctcgcggagatgcctcagagggacgcggtctcgttcaccactgtcatttccgccctctcgcgctccggtcatcctagcgcgccctggccgtcttccgcgatatgctcaccgaggccgtgcagcccaacgaggttcacttgcggaagtgctcacggcgatggcctgtgaccacggggcaccagcaccagttggtgctgcccatggcgttgccgtgcggcgtgggcttgatggatttgtcatcgtggccaccaacctggtccatgcatatggagcagtgtcacaggttccttctgcccgttccatattcgagctaatgccagatagaaacactgtcacttggaatacaatgcttaattgctatgtcaaggcaggaatgattaacatggctgctgaggtgttcggtgtgatcccagagagggatgaggtctcttggttgacaatgatagatggatatatgtgtgcggatttcctactgcaggctctcaggacatatgttgcgatggtgggtacggtgggcataagggccaatgaggtgatacttgttggtttggtcaaggcatgttctcgacattccgctgtctcagaagggcaacaactccacacagtcattctaaagaatggttttgacgctcatgcatttgtacaggctaccctgatccattattacgggtcttgtgattttattgaccatgcccagatgcaattcaaattgtcagacaagtcacacgtagcttcctggaatgcccttatggctagcctactcagaaggaatctagtgcatgaagcaaggcagctgttcgatgacatgcctgagagggacaccatt

SEQ ID NO: 27747 - DNA, 711 bp, Oryza sativa
actgtcattttcattcacccactaaagaatatacaagatggttaatttgttataggccgtcctcttaacatgcaatgtaatttggctttgcaaacgccacagatactggaagggtaaatgatgcacaaagcatccattttccaggagcaacgagccgcactctatgcatttcaacatcggacacgttctcacccagcctcaaatttatcctctgcaattcaaggggtgtgtgtcaatcgataaacagaactatgtatacaacagttctaacttaaagaaaaaaaattttggtaatactcgctgcttacctcatggaagtcatattcaggatcttctgctttggagaatccatacacgtgtatatttggcattacacaagaaggcacagccaaatggtggttccatgagattcctctgaacacatctggggaaacagtgaaatcataaaataattaattggtcctgtgattagcctaactgtcaaaattcccatccaaaaaacatcggctgcatattggccattagaatggacaggtaaggttagaactaaatttcaatgttcaccctttttttgcataaatatactattttttttaaaaataatagaatatacctgatttgccaggtggcatgacaacactgctgttgccgctcggcagcagacggtgtcaccatatggccaggtaaaaccgaccacctgatgtccctaac

SEQ ID NO: 27748 - DNA, 543 bp, Oryza sativa
catgcgccattgccccgtctttttccgagccaagactgggttagccagccagtcgggatgaaggacttctttaatgaagcccgctgctaacagcttggttaattcctccttgatcgcatccttcctgtcttgtgcaaaacggcggagtcgttgcttgaagggtttggcgtcttccttaacatgtaaagagtgctcgatcacctctctaggaataccaggcatatcagatggtttccatgcaaagatatctttattattttgaagaaaggtgatgagcgcgctttcctatttacaatctaactcagcgcctattacagcagtcttagtaggatcagagggatctagtggaatcttcttagttttgtcgtcgccttcttcggtctttgacagcttggtcgcaggcacttctccttcgcttgccatggtcgcagccagtcggatgtctttgcgagcgagagtgatctcgcgggtctgggccatctcgcaactttctttgtcacatgtgacggcttccttgatgtcgctccgtagtgatatgacacc

SEQ ID NO: 27749 - DNA, 724 bp, Oryza sativa
atatgcgtgtatctgatctgtacttcaagtcctagagggcagactacctgttagcttcgtacgttgtttcgggccatttatttccctccggaagaatattctttatgagtttcaataactcacaaaatgccttgtcagtcacaccatttttttgccttccattgaagaattccagcgtattacctaactttttatgccctgttcacagcctgggtacaagaacattttgtggtccgttaacatacgctcaaatttcgtgacctccttttcactttcgtagtccttctttgcgtcgtacaacatccgacaaaaatcatctgcactgtcattttctgcaacaggcccgcctgtcgcgcctgttgtattttcttcaaattcaccgaattgagcctaatctggaatgttgttatctttttcttcattttcaaccattggaaactgtcaaggttacgggtagggtataccctctacccttcgatatacgtcacgtatcgatatggtatgctcacgagtatacggacgtgttcgtcatacgttaaggaaattcatcatggagttcacaggtagaaggagtcctattcggtcaaaactgggtcgtcattgtgtcatgttcggtccggcttctccgagtcctacttggagacagttgacctgcgatataaaaggaacccctcggaaggacctaagcatcgaatctcagagccaacacatccaccacagccta

SEQ ID NO: 27750 - DNA, 1010 bp, Oryza sativa
tagtccgcacatcctcaaatacaaagcacttccctagttagatgtaggttagacttcccgttcgagaaactctaccttctacctgccctcaatttatgcacgattaatgaatgccacctgggtggaagcgagaggtggaaatggaaggtcttagttcggaggtgggatctctacctgatagttgcattgccattcatgatgatcccctggcattcgtccattcagccattcaccattcacccattcaactggaattttggttgaatgccggaattgtgtccacaaattgtggatggatagttggttggctggctggatggctggctggatggctggctggatggatggtgaatggctggcggcggttcggttgctttgaagcatttgttgctatctaaattccatttaaggtcgtaccttatcgcccagcatcatcttattctctatttgtattccctccatctttcagatacggatgtagccttggatgtgcccgtgcccaatgaagaggaagagcgcaacatgaaacgtaagtacaaaagtaccggacacccacccagatcccaatagaatccgccaaatcctgcgggaaattgtaatcccattcaccagctcctacatttaattaacaagagaactattgtatttatctaacacctggattatctccacctttcatttgatccctatttatagattacgctgggttgctaacgggccgcacctcctatttcctcaagggtgaggaaatgaagtccatgtacaccacctacaatccgcagaatgtggtggccaccgcccgtttcctgttccacaagaagaatctatactactccttctacacctcatcgggaatcggtcgtccgcgtgccattcaattcgttgatgatgcgggtgtaatcctggaggagcatcaactggagaccaccttggggggcactctcagtgtctatcagaatgccacgggcaagatctgcggtgtctggcgaccagttccccgtgattacaag

SEQ ID NO: 27751 - DNA, 1332 bp, Oryza sativa
cctgggaatactcatggaaatggcagatgtttcttcttcacactgcctggacagagcatctgctgccttgttttctaggccctttttatactttatcttgtactgcaaacccatgagcttcaggaaagccttgtgttgtaagctggtggttaacttttgttcactcaaatggctcaaactcctatgatcagtaagtatagtgaacactgaatgctgtaagtaagacctccacttttgtattgccaacagaatagctaaacactccttctcgtatgtggatagggcttgagatttgacccccagtgttttgctgatgaaggcaatgggatggccctcctgcattaatacagctccaatgcccttgtcacttgcatctgtttccaccacaaattctttgctaaagtcaggtagtgccagcactggtgagttgatgagagcttgctttagtgcttccatagctatctgctggggttggagccactggtacttgacattcttctttagcaagtcggtaagtggccttgccagttggccatagttctttataaaccttcggtaataaccagtgaggcctaagaatcctctcagttgtttcaagttttttggaggtggccattgttgcacagctaccaccttagagggatcagttgctaccccttcaaccccaattatatgacctaggtactcaaggtgttacttggcaaatgaacatttactaagcttcagatgtagctgatgttgagccaggacttgcaaaacccctttaagatgctgcacatgcttagccaaggttgggctgtagattagaatgtcatccacaaataccaacacatgctttatgatccagggagcaaaaatagtgttcataagtccttgaaaggtagctggggcattactgagcccaaatggcataactctaaattcgtaatgcccttgatgagttttaaatgcagttttatgttcatccttctcctgtagcctaatttggtgataccctgatctgaggtccaatttagtaaaccatttggcccccgccagttcatctaacaactcctccaccactggcattgggtacttatttttgacagtgatctcatttaatcccctataatcaacacaaaatttctaggtgccatctttcttttttaccaccagtacaggggaagcaaaagggctctcacttggcctaaccactccctactgaatcctttgagctatctgtttctctatttcatccttctgagcacgggaatacctgtagggtttcaaattgactggtttcacccctggttgccgaggaatggcatgatcaaatgccctgtgaggaggtaa

SEQ ID NO: 27752 - DNA, 2203 bp, Oryza sativa
ctctcagacaagaaattgctggaactccctgagtccaccaaaatcaagatatgttgcttttgtattagcccttccaatctgatagttttcctaccagtaaccccagtggctgcacactccgaaattaccaattcttcatcactactggtttcaccttcctcctttactggttctccatcaacttgaagttggaacacctccaacaactcctccagaatgtggagttgtactgattttgggcacttatgacaaggtccaaacttttctccacacttgaagcactctccctagctcttcttgctgccttcaaagattcaaacctgtcttcccactttggcttttcttccacttttttagtttcctctagaactggccccaatatacctttcccttgatatccaatcttcccaggtgccgtattagcctccttgaaactccctctggtggaaacatagaagttcttcttcccagcttcagctatcagctcctcctgtattttggcgagagataacgcagcatcaactattctcggcttatgtagcttaatagcaaatttaatctctccctttagccctccaacaaaatttgtcacaaaataagtttcatcgtaccctttgttatacactagtaccctatgcatcaactcctcaaacctcttatggtactcgtctacacgcccagtttttgtaaaactctctaactcctctaagtggtcctgatatttatctctcccgaacttactatgcacagctacacataactccgcccaaccttctacactgtgcaactcctcataggtctgtaaccacagcgttgcattaccaacaaaatgcagcgttgcaaaggaagcccacgtttcaaacggaacttgatacatgtgaaaatacttctcagaattggactttcacaacttaggattctctccatcaaattttggaactctgtttttcgtaatctagtacccccatgatgctgactcccttgagactgactccgccatctctctgaaccttccctcaaatcgaaatgaatcggagagtggcggaagtgaggcttacccttgaccagggtatgctcctgagccgcagaggcatcagttgcaagaccctggtgattctcgaccttgccttgcccttcgggcggtggtgtcgctgctgttggtgatgccttcggctgggattccagcgccgtgatacgggtggagatcccttccaccgtcttgttcagatcccacatccccgcatccacgttcggaatccacgattccaagccccgcaaggtgcccaggatgttgttgtgactgcttgtgagttccgccaccttctcaccaagcgcctccgtctcgccttctgtcgccaccactctctccgtcagagttgggttccccatcttcctctccgtgttgcgcaaggaccgacggctctggtaccaaagatgtcacgaactgtgatgaatcaccggcgtctcgcctagcgatttggtcgattttggaagtttgggtgattttggggaagaacaagggaagtagttagtacagagtagagagagatagagatagttggtttttgctttcttcttcttcgatgatttagcccccaactcgaaggtctgaacttatagttgtgctttagcacttacatggccagcagccgcatggcccaatagcaacgacccaagtatacagcaaaagtctaaaaggggtacacacatgagtaaaataaaagcagcgtgacaattgggtgatatgggagggactcactctccatggatagattcctctggggtttagtatttcccaagcaaccgaacaaaaccttaaacaaacccatgccactggatgctttaagtttgcctaaccgtcaaccattgcgtgaaaattataaggtgagtcagatattcagaatcggagctgaaaattcttttggaggttaattttgttgcaagagtcagatagtactgttcttggtttgaaaagagaggtggttttcatttcgattgagctgaagacgacgtagtaccaacaaaaggagtatatcaatataatcgataagcccaactattaataacaattccagtttagcttttgcgtatagagaaactaattaattaatacaagacataatttaattaactgatctccaatcaaatacttgttaattcattatatatatattctaacaagaaatttttgagagacatgtac

SEQ ID NO: 27753 - DNA, 1022 bp, Oryza sativa
aagatccgctctacttggaggttgaaggcaagtcacgtctccattgaacatattgttgtcccatgattttaaattattgcataaccgctttatttaaattctcgcgttctcattgttttatttagcttttcatattaatccttgttatagccttatcgttgcaatggtttatatcacttcgttcacctaggaaaataaaacccaacaagtgtgtactctatatatggttccaccagtatgaatttagctagatgcttcgctagttaactagacaactttgacttgttttataatcttagactttaggagttatatcatattacttggatattatggagtggttggcttatgttggaatagggcatacaccctttcccctattcaaaaacaccccaaatggtcttaggctaggctcggggtgacgaggtgcatggttttgacttttgagagtagcactttggccatcataaggaccggtctttgggcctttgttgctatgtaataccgtacttctacatgtctaatgggtaaggcttagtttgtagtttagtctagtcatgaacaaaaggacatatagagatggatgaagtcgggtgatggatatctctgaggcaaatgaaggctatatgggcgggtgtccgatagtcgagatgtcatggcacaggacaagcattcgggtggccactctcgaaggatgttctgatgacgtggggcttagccttaacctacctgtcccgggagcctcggccataggcaggcgttgggtcggtgctcttgtgcaaggctaggatgggtgaagaactatgtgacaccctccgctcatttaccatggtggtaagtggcacgtggcaacgcgtgaggaaggcatgtcttgtgggtaaaattgtacacctctaataaaagtataatccattcgaatagccgtgccctcggttgtgggcaagcttaccaatgtacacaagttagtggtttttctcttaaaacttggttgggtttgcttgggatgagctggggcccggtgt

SEQ ID NO: 27754 - DNA, 4807 bp, Oryza sativa
tcattcctctcaagtttagtttagtagtatctagctggtggaatagaaatagaataggagtccggagtccggaagccttcggaagagttcgggtatggctctagcagctttcctttcctcttttgtaagctttgtacttttattagaatactcttctatatacatttatggtattgaaatactttccgagtatatgagtacctactttacattacgttcatgttatactgaatatacggctagcttatctgggagatgctttggtgcgggtatagtgtttgcttatgcaattactctatgtcatgacgatgatattagagtagtatctggtagtttagacgtggtgtctagattatgagatatcattatttggggttatatattgcagatgagagatgggccgctaatggtgacacctcagtacgggtattcctccgcgcctatatataatccgaagttaatttcctgagaagggtattcctccgtatttagccccggttggatggtgatgacgggctgtcgtaagaaactcggcagtcaggggtggcttctcgaagtaccaggagggcatcggatagagggtattagctagtatattagttaactagaatgtatgtatactatgtatattagaagtataggaatagatttgttttctcttttctttccacctagcttagataaattgttatgaggatgagtagaaatgcttgtgtgtcactctacccttggattatcttaacccctgcttagaatatgattatcaaaataatatataaattattagttgagttctctctacatgatcttcccacgggataaaataaatatgatacccttgtaatactctcgggtgaaatgctacaatggtatatccgtgcgcttgcggatgaactctataaccataatataccagaagtgtttctgcgccattgcttggaattatatttctagtaaagtcgttaagaaataccaacaattttgcagctctgagctgtaggcgcttcgcttctgcttcatcctccgggagccagccgttcgagaggtactttaggaacagggttcgccagtcctctgggtcttcatccagctcggcctggtcgattgccatgatattcgggctctctatgggcacacttgatgcgtacaggacctcaaaaaagatgcttggcgaatgcgggcctccacaaccagcagatttcgtcaaggcatatgcttcctcattttggtctctaggtaagtgttcgaccgttatgccggcgaagcacttttccatagattgaacagcctccagatatctcttcattccttcctcttttgcttcaaaggatttgtcaacatgacttgccactagtttagagtcggttcggatgagcaagcaccgaacccccaatgctttcgccttttttaggcccaacagtatagcttcgtactccgatgagttgttggttgtgtcgaactgtagccttgcggcatagcggatcggcacgccccctggcaaagtgagcactgccgtgcgcctgcccctttgtgcaaccacgagccgtcggagtacatcacccaaggttgttcgacaggctcgggttcaggggcgaatgccagtgtccattaggccacaaagtcaactaggacttcagacttgatggcagtgcgggcgacaaaatgcaggtcgaatggagataactctgccactcacttgctgagccagccagtaatttctttgccccggagcacttcgcccaaaggatactgggaaagcaccgtgactttgtgggcctgaaagtagtgtttgagcttgcacgaagccatcactagggcgtaggcaagcttttccatttcgatgtatcgtatcttctccccttgcaaagcttgggagacgaaatactctggtttctggcctgactctgtttcttggacgagggctgcactgatcgacactggcgaagctgctaggtagagtagcagttcgcttcctggtgctgggctgaccaaagcgggtgggctctgcagatatcgctttagctcgtcgaacgctgcttggatttaatttctcaggatttaatttcatacccactacacgtaagttgtcgaaggtctcctgtaagtcggacgcatggtcgaaagccatgcggctttttatgacgatattgtcgacataagcctccacatttcgccccagctgcttataaaggaccttgtacacctgcctggcgaaggttgccccggtgttccttaggccgaaaggcatcctgaatggcaaaaggtgctgaatggtgtgatgaaggctgtcttggggatgtcggccggattcatgtggatctggtggtagccggagtacgcatccaaaaaactcatgagttcgcagccagctgtcgaatccacgagctggtcgatccacggcaaggggaaatcgtccttcgggtacgccttgttgaggtctgtgaaatcgacacacatgcgccatttgccgttcgatttcctcaccagtaccggattcgctagccactcggggtggtcgatctcctggatcaccccagccttgagctgcttttgcacttcggctttcgctgcttcttggcgatcagcggacatcttgcgcagcttctgtttccttagcctggcatccggcttgaccgccagatgatgcatgatgaggtctgtcgaaacacctcccacttcgtcggggccccaggtgaagatgtcaatgtttttcttgagcacctccaggatgttctcaacttctctttcgcccatgtcgccccccagcgatacaaatcttgtggaatcggcatcgttgacctgctccttgatcaccctgccgtggggggcaggcttcggcgcgtgcttcgctcggtcatgcggttcggcctcaacatcgtgcaccgctctgttgatagcggccaaatcgccctttgatgtagccgaaggttgaagccccttgaccacgatcactcctgcagggccaggcatcttgagcttaagataattgtggtgggagatggcttcgaacttgttcaaggttgcgcggccgaagatggcattatagttgtatgggatgtcgacgtcgtcgaacagtatttgctcttcgcgtctgttttcacctgtgccgaaggctaccaccaattgtgcttggcctaggacttgaactgcttctccgccaaaaccacgaagcgaggccggtgcttgggtaagggctagggtaggcaaccccatcttggcgtatgcttcggcgaagatgacgtcggccgaactccctccgttgactaggattcactggatttcgaagccagctacgtcggccgagatcaccagggggtcttgatgtgggaacaacactccttcggcatcttctggcccgaaagagatctgctggttcaaatatcatggggccccttcacccgccgaagtgatgttgtgcaccattcacagctacatcttcttttgccattttgacagttgattcggtgggtcggcccttgtaatcacttggattactctgcgttgtacatcttggcgttgttcggccgggggtgcttgttcttgaatggcttcgcgaggtgcttcgacagctgctccttgttgcggccttggatcttatgcgttgccgctctgccgaatgtttcggcattgctctgtggtgtgcgaagagcgtccgtggaaggcgcagtaaaggtctttcctgaccttcttgcgaacaggctgctgatggctggttgcttgttgggcgtcgaactccttgcggagggcttgaacttcttcaacagccatcacggccttgcctgcactatcggttctgaatttcctccacgtcatgggagcttgacctgacctttgcggttgtccttggttcgccggctgagactggcaaacagcaagaggagttggctcggcgacttgtgcttgtacttgggcttgagcagcgatgacagaggctttatcgtactcagcctggattgcttgccgtcgcttggaatcctcttcgccccttgcgtattcgtcaatgatgcgaagcaggtgctcaaccgtctgcggctccttgttggcgattttccttgtgagttcgccctcgagcagcccggccgaagcggcattgatgatagacgcctcagttatgtcctgaacttggcatcgggcttgcgagaagcgacacatgtactcctttatcgaatccctcggccgctggcgaatgccgagtagatgttgctctgtcttcggctactcataggtgcgtcgaaatttatggacaaagacatcgcgcaattgctcccatgagtaaatgctattagctggtaaattgaagtaccaagaacgggcgaggcagtctagagcaagatgtattacctttgccttggtattttcgtcgccatgagcggcttcgatcgcggactcatagatggacaggaactcttttgggtccgtttcgcccgagtatcgcggaatgggtgggaacttgaactgggatgggattggatgaatcttgattcccccactcagcggcagccccctttcgccccccgccttgctcacggcaacttgctgtagaggcctgtttggatatggcatggcgaagggcgaagtcatggcttgcacgtgcggtttggccacagtgttcggctgcctggccgctaacggtgatgcctgatgagccgccctggatgggtcgaaccaaggctaggtccatgccatggcgacctggtttggcgcctgattccttcccaagcctggtgtccgtgcctgtggtccgatggttggtgcttgagtggcattgctgaactccaattgcgggccttgactccctggcgaagcc

SEQ ID NO: 27755 - DNA, 3320 bp, Oryza sativa
atcctcatgaagcacattaactcaacctgacaacgtgtaccacgccatattgttggtatcggctgaatcggccaacctagtccgactcgaactctgccgatcttagtcgtagccgattcagactttagccgatcctcactctgtttccggaacgatttctatcttgaattccacttcgatcctatcttcatctccgatacttggattaccaaatttggttgttaacaggttgtaactcgttgccatctggaccaagatcttcaaccattccctcttgaacaccatcacctttgtcacctaattcaccagcagttactttaccagatgagcttgaaccaacttcatcggcagcaaccactttcagcttgtatttctagacaattgtcccttggcgggtttctttgaatgaattcatgaacttgtccttcacgctgctcatcatctgttcaagctcttgcctatgttcagccatcaatttgtccagtgtgactggaataatatttccttcatgaacttcagatccggttgaatttggaagcttgttttgaggatctgttgacttcgaagcttgcttgttgcccgacatatttatcgtgtcccactgggtgtgccaaaagagtgttgatgcaaaaaacgaggcctgggagatctacttaactgtagtgcaagtccaaaaatctcgcttttaggttcgtgagcgtgccagttgatttgatcctgcaatcaacaagaggcaaagacaaagaaaccgcggttaaatccataaatgatagtcgattggctagttgccgatgacatatcattcatctctgagccgatgtcatatttgaatcgatcagcaaatataaataagtaagtaaggattaaatctactcgatcggctgtagatatctacaatatgtaatccttatgtcgatatatacttaaatcaagtgattgggatagatcggtcgcgatgccgagacagtataaatcacatagatcgaaatatatattaacaacgagattatagatgttcatagcatagccaataagatagatctagcatgtatcggctaatacttcgataccactctatattaagatattaaagcaagcaaaatacatcaaatagaagcctaacatactttgttgtactaagatcattatataaagggcagatctagcatatcaattaagcacatgaaatataaggctaaatcaggtaagatcaactgaaaccccgatactaccctaatcgacaaccgaaaagcaggctagagattgagattctaatcacgacttgtaaggtcaaactcaactgatgcagctataagtatgaaaagaaggacaatatctagacaatcaagctgttggatgtttcataaagtggtgaatatcctatataatctaagccaatgtagatatttaacctgatcggctaccttctagcaacagatattagccgattgaaggttagataacaatattaccagagattatatagaatatatgataactcgacgaattacataacaagattagagtatcataaagatggaagcactaatcccgagaacacaagccgccacagcaagttttactctagttaaagatcgaaatcgatgcagctaaacccgaaagcaagaactcgtcgaaataaaacgaaagtaaagggtggcgatgcgccgagattgtatttgaacgtatgttttttttattacatggggctcggggtctatttatacccgagattacaaaatatgttcgtgtcggacacgactcttatctctaacaaactctaagataccattagtctttgtagcaaactcttgcccaaatatatctctaaggaaattacatgaaatatcctaattaatagatacaattgccttctcaagactcaatccatgcatggcaatcctcatgaagcacattaactcaacccgacaacgtgtaccacatcacattgtcggactgggctcaatcggctaatcttgtccaactcggactctacccatcccagtcgcagcccattcggactttagacgatcctcgctctgaatcccgaaccatttccatcttggtttccgcctcagttttatctccatctccgatactgaaattaccaaatttggttgttaacagcacggaataccgttgtagcacttcaccttcgggtgaccccaaaaggatatcgaactcagggaacgtgtgtaatctacctaaggctaagactatccaaggacaacaactgatgataggtaggctaagctagagaggactttctatgtgttttagttacctacgctaagcaagataattccctatctgttgcttcgggcaccgacccttgctggtctgccagcatggttccggctatagctctatgatgtatccgatcgtggagaattactgggacggaattcagggctgtcaccacctgccgcctacctctgacaaatccgtgggatacacaacaaacaaaggtcacctctaacctagacaccacgtctaagttattaattactactctaatacttgtacaggaacttccttctttatccagagtcctagtactagagcacttagtatgaatactaaacaatgaacccgcaaagatgaaaatctatcttacttagacaaagtaattaaataacataagaaaggaacacgaatgcttactttatagaagaagttctctgaacccggagcagagtgtaccgaggtagaagtcagatgagcgccaaacttccgggcactcctccagagcttcccctccattctctccatctctggctggccatttttggtcgccgcgggtttcctcccaagccctaacccctctcctctctctcctagggtgccgtcgccgcccgtccgtcccttcgcgtcgccgatcatcaccgctgccttcgccttccgctccggccgccatacccgccggtgaggttcccctctcctccctctttccctttcccccgtgtgcaccgccgttctccgcgcgtgcaccgccgtcaccttcggccgacgccgctgccttccgcgctgtccgccgccgcctcccgcgccgccggttgccgtcgccggcgaccgcatgccgccgccgctcgccatgcttagccggtcggcttgaagtcgagccgagccaggctggcgccttcctcctcccctttgaaccaccgcctggtggggcccacccgccaggccacctcctcctcctgttgtgtcgctgacccgtgggtcccgcatgtcccccccccattggatgatgtcagctgggatgatttattgcgcaataaataattaaggtttttctctttacagtgaaaacacagata

SEQ ID NO: 27756 - DNA, 3462 bp, Oryza sativa
cacgtttacttgatatccatcctttgctaaactttggggataattggcttagcttgtgttacttatgtgacctagctagaattatatatgtttagccatgcttaattaccactagctcacataataagataattacgttattagacatctagtattttgacaggctgcgtgctcgagacatccgaccatgtttcattggtcgtaattatccaattaaaatacgacttgatggtgggctgtgagtgtacggtttcgctagtcgcacccatggtaattaaggaccggtttacgggaaaccctggaagacttacagtgcttttaccacaagcgagagtgggtaactacttgacttgtagtatagctcaaccctttcctaggcaccgatggtgagggagggcgtaatggagttgggtcggccgaggtgtccggttgtccagcttctggattcaccacggtgcacgagggaactgcccaactctggggtagggggtgggggtgaaacatcagtgtggtgtggattgttaggggagggttatgtgaagggtcttgccacaatcacttgacatggtgacgtgtctagccaggcacagtgacatgccggtggattatgttttgtgggtacagttgtacacctctgatcagagtaaaactattcgaatagccgtgcccgcggttatgggcgatcgaccagattcactgtgattagtctcacccctagttagctaatgaactggtgtagttcaggtggttggttgggcctgttgcaacgtggtatagtgttggacagtgattggttaatattgattaattactacaactgttttactgctttcaactactgcttttaaatgtctgctttattgcaaatgaacctctagccacagtgggtagtactcagtcttgctctcttttcccctacaccagagcagaagttcttcccagttggagccgtgtcgaagaagttggttttgttgatgccatcaaggatgcctgtggaatggagtcgcccactgcaggagtcaagtcttcaggcttagctcgttttaccttttccgctgcatttgtaatcttttatatttttgtaagacgtggatctgtatgtcaataattatcgtttgtgtaccctgactggtcctggacaggggtttaatgcacattcagcttagaaattctggtttgtgaatttctgggcatgacaataagtttgtgcacctcgagtacaaaactaaaaaaaatactccctccatttcaaaaaattttagaaaaatgtaataatatttaacaaacatattatcaaaatatattcaatattacatttaatgaaactaatatgtaatttggtatggtaatatcgctactatttttttataaacttaggcaaatataaaaataagtttgactaaaaggaaaggtcaatctaacttataatatgaaatgtataattctataaataaaacccgggtagaattatttatagaattctatgaaatatataattctataaataaaaccagcttatgatagcaaactagcagcggggaccgccaggctccaccgctgcatctctagtaccaactgctatatttaccattatcgataccttagaaaaatgatttgtcattggaaaattctattagttgtatagtattgttggctccactattgtaaaccagtaatctatagggtatggtattcatctaatgatgggtacaataagaataaagaataatgtacgtcaaacagtaataattttactcgacaataaattgaacggaggaattagcattgtgtccttcaagcacctccaatctcgctaatatgcaaactaaattagcagttagcaatactgtaatacagtgtaagtataatggtcctatggcatgtgatctgaaacttgtgtaggcttgttcgtttctggcgccggacggggagtggtgtcggtgtatccgatgcccttccttttcgttgggaagagcaagaagacgaacgtcgacatgaacgccatccccaggggcaggttcttgagcagctccttggtgtcgttgccggcgtcggggaagaagcccttggtgagcccgacgtcactgaatgccacggtgaggaacaccaccgccgtgaagaaggagtgcacgaagtccagcggccgtagtcttagctcactgtgactcaatttcttcgcttcctcctcttcccgggacatgttgaacacgttcaatccccgccgtgtcgccacgccgtagtagagcttgccgtcttggccgacgacgctgtccgtgaaggagaagaagagggagaggccggccaggacgccgaccagcacggcggtgagccacttgttggcggcgttgcactcgccgtggttggtgaaggacggcgacagcgcctggtaagccagcaccgtccccgtcggcagcagctgcgccaggttcgccgtgcttgccatcaccttgtcggtcaccgtcttcgtggccacatctgttttcgacgacgtcgtggactcatcgacggccttaggcgtcgacggagctaagttattggtcgtcaccgccgtggactcgccgttggtgttcgatgccatgttgatcacgatggcgcccggaggagatgccgccattgctggagcttttgatgcggcgtcgtagtaattaatcaactggtgaagactgaagagagatatatgtgtggtagctcgagttcctgcgcttatataggtgaaaacatttggaatgattccatgttgtgcgcgttgatttttctatgcttgaaactagatgggtcgtgaccattcatgcatggaattcagatcaactgagcaagtgtggtcagctgttcagcagtaccgatctgcatccactgcagtttttttctacctacatgttactactacatcttactccatcttggagttggagtacttggaaggttggaattctcgagatattttctcaatttacattgtaaccaacttggagcatcgcaatcgccaacgggctaaatttgtcttcactgtaccggtgagaccataagaaaatgacgtttttatcgtgccactgatgcatgccttttttttcctggaaggcgagaaaatgatttttattttcggtctgtgtgaagaactagggagtactctggctatttttttagtacaacttggccgtgcgcgaaaggtttatatccgggagtagagagaccgctttgaacctttcattttagatagaggaagatcatttaacaggaaacccagccacaattttttttttagccttacatgtaaagctcatgtatatattgcaatttatagttaatcgtaaaagacatgtgtattgatcacatgttatattttgcaatttatagtaatcatgtacaacactactcttgatatataggcgtgtacaatactactcttgatatatagtcgtgcagagaaaccatgtcatagaacaattcaatttagttctagta

SEQ ID NO: 27757 - DNA, 1148 bp, Oryza sativa
cctgtttcctgtttgcttgaggtcgtactacgtagatcctcgtaccagcgtaccccaataccctctatattcggtctacgggtatcccccgtcgacagtggcgtgccaggtagggggacttggtgctcaaggttctactactatgacatccagtttcaccgacaacagcgttaacaccaatctcaaccaaggagttcctacttcaacaacactggtgtggactcaagtcggcgaaatcgtctttccggtttacaccatagtgctgatctcagctggtccgccaatggccggaaacgagaacgcagtggctagaacccggggtgactccatgtcgaagaatccagccgccgaagcggagatcggaacgtcgacaacatccgagcccgagaaggatcctagtgcggccaagccttgtctttccaacaggaatcacgagccgatgaggattacttccgaggtgacaaggtcctggtgtcctatccacaaaactaggaaacacaccctgcaagcctggtgggtctttctcaacgttcatgctgaaattcgtgcctgcaaagagtgtggaattcaacatacctctccaactcgtgatgtccattgtcctattcacaagacaaaaaatcacgacctctcgagttgcaaggtctttctcagcgccatgaagacaccacctcctaaggtccagcagtcacgcatccccatcagggatgaagacaaggaacaaggagcgacgccgattttagatcgatttgttggggtaatcgacatcgatccccacgaaccatcagtcttgcacttgctcgaagactatggatcatcgacaacgagtacgccgcgtgaggtattggctattgacgatgtcggcacgtcagtgcgcaccaatgcggaagcggagaatcaagtgactgctccgacccagcacatcagagccatcaacgcaatactgagggaaaccccctacgatcccattctgaacgacgatcaagcacgttggatagaacgactacaggaatcagtgaccaacctcagcaacgtgttcgaagaggccgctaccgcagcacacccagaacagcaccaactggcgatgctaatggtgaaaaccctgaacggcgggaatcgcctcatcgagccacccctccacctcgcgg

SEQ ID NO: 27758 - DNA, 904 bp, Oryza sativa
agaaagtggagcgtgaagtctgttcgacgtggcagggggctacgccaaagatgaagtggtccgagcagaagatagaattctcggaagaggaccaccccaagattgctgtcatcccagggcgatatccgatcatggtggaacccactattcgtaatatcaaggtcgcacgagtcctgatcgacggcggcagctgaatcaaccttctcttcaccagtgccttggacgcgatggggatcccacgaagcgagttgacacccactgatcaacccttccatggaattactcctcagtcattgtccaaatcattgggcaaaattacgttgcctgtgactttcggccaagcaaatagcttccgaacggaacagatcacctttgatgtcactgaattcgatacagcatataatgccatcattgggagaactgcactcgcgaagttcatggccgcatctcactacgcgtatcaagtgctcaagatgccaggaccgaagggaacaatcactattcaagggaacgctaagctggcagtacaatgcgacaagcggagcctcgacatggtcgagcacacgcctagcccacccgccacagctgaatcacccaagaaagtgagcaaaacaaacaagacgccgaagcccgacggcgcaatcaagatcgttccactattcagtgctaaccccgacaagaccgtcaagatgggggcatcactaggcgagaaataggaactggcactcatcaccttcctccgggacaatgctgaagtgttgccttggcagccgtctgacatgccgggggtacccaaggaggtgattgagcacaaactcatggtgggacccgatgcaaagccagtaaagcaaaaactgcggagatttgcaccagatggaaaacaagccatacgagaagagctcga

SEQ ID NO: 27759 - DNA, 1179 bp, Oryza sativa
gattctaaataataagttctatgatcgaacccccagaaaagatagtgtcaaggctgaaaaagcgcatcctatttctgtggaacatcaacaggagccatctcaggagcgtgaatctccggcaatttgcaaactcattccttacattggtctctgacaagctgagaacagctgccagctgatgaaagccatgaccagtgaggagaacagctcgaagccaaccacctttggagtctgccactctaatgatctcctcaagtaactgcatgtttagcacagtgaagaagaaaacaaaattaatgaatttggagaaacatgacccctgcaaggacagaacctaaacaactaaacgaatgaaacatagtaatgaacaaacaaaatactctggttatagcacatatctaagaaacataagtccagacgaatcagtcctagcttagccttcgtaagcaataaataaatatcacaaactagagacatactactcaatcaccattggtatagccatctgccagaaaacattaacttagtttgcatgctttatcgaagttctcctttgggcttactcaagcgtccacattcacaaagagtaaaagaggagacgagtagaccaaaatattccatacaagagtactaaactggcattagatttagaacagaatagaaacttggaggcaataattgtatgcaagataaaaggaggtttcagattgccaaattaagaaatgatgaagaatgagggttacccaaaactggaactgaaaaaatgatctgtcagaaatattataagctggatatctagttcttgctgattagatgttaaggttagaaggggcattaatcgaaaatctctagattgacacacatatgctggaggaaccatggaagtatggaacgttgtgtttcaatgtagtcaaacgttgtgtttcaggacatttttctagaagaacataaacacatgatcgagctgataaaaaaggagtaacctggtgatagatggcattgttgccagaagcaaagcacatgcataaattattggcaccaaagtcctaggtttgtttttcctcagccacatcaaggatcctaaagcagcaagggacagcgtcataacctggagaaacataaaagtaagccttctgggataataaggtataagtgaaatacatacaaggaaaatttttt

SEQ ID NO: 27760 - DNA, 6648 bp, Oryza sativa
  unsure (1)..(6648): unsure at all n locations
aaaaatatccactgtatcagtgatagtcagatagtggacaggacaataaaaactctgtgaatgtccattcaattgtaacagtccgaaaccacgagcatggataacaaactccatgcaactaaaaaattgggacaatatagtaacaagacaatgcatacataagaatgacatgaggaattcctcttgtctacaaaaagaagtgcacagtaaattgtaagtaattcgaatgtgaagtaaggcagatgaatcttaacactagaacagagattaaaaatcagataaggaaagatgtcaccatggatcagcacgataacttggcaggtttaacttcagttaaaggcattagatcataaagtgataacaaaatgtccttaccctgtttgtttttataatacatatagtttcctcaaatttcttgtgaaatataagaacacatgcaaatttattgatcctatcactgtgtatctctcctgtatagcagggatacttttctcctctctctcttggttcctcactttcatgcctttaatccttgtggccactaaaaatacgaattattgtttataatggagggaacactcaccaagaccaactgcctgaaacttgtgattctgggagatgtttctatgagtcaactgtgtcaaagcaaaataaagaccagcaacatctataaacccaataaagattttcatcaattcctgcaaagggagataacatgcaaattagataaacgccaacatgttaaacacaattaggttttgctaaagaaaacagaaaatgcacctgataaggatcaaagctatcattctcaggtactttgagcaatgtcgctaagcaaacaagctgtcagttaaatttgtcaaggttagtataatctcctttatttgaatgaagaaataacagtgataagaacatatatttaagaagcatgtgaaacaattaaaacagaaagtaggtaaaattacaagaacattttaaaaaaaatgcaaagtcgaaaagaatcaggatgacaaacttggatgagtttaaaattaaatccatataataaaaactgcatagatgggaagataactggtccataccatgcaaaatgatatatatgcaattgatacctttgtttaactaattaaggaatatcacaacaacaatcaaagatgaacatatatgcaataagtgttccatgacccttaaaactggtatgttacagaaatataccactattccacataagaaaatggtatctaatggctatgccaaacatgtgaaactttctgaatcaagaaaagtagatcacaagcgcacatgatcaaacaactaggaacacatcatttgagcctagcaagcttggcacttaccaaatgttatcaatttatattacagcaaggacatatttctagctactgacctttactagtgctgttccaagataaacaacagccgcttttacacaagtgccaattgtgtcatactctgacctgcagaaaatgactgggcataagaaagcgaagaacaaaaatcctttgatatacaacattatttttatctatagattgatagacatctaactagtaaccactacccactaataagattcttaaaaacaaagccctccattcatcaatgatcgtctgcaaccctccatcaaaagtaaaaggccaagatctatgtgaccatccaaaaactctctgtcattagaacatacacagcagctctgtttccaactcttatcttcacaaacctccgccacttattatccattatgccagaagtacactgttaccacttatcaccaatacattttgaaacaaccacaacattgatcaaatagggatatgttaatgagacatcgagcttgctctgattagcataagaaaatttacatgctctgggggaacagggaatttaagatcaacatgggagcatggagtaggttgggtccaagggggaactccaacatgtacagcatggctttcaagagggacatgggacagaaatccaaatacccaatatttgcaagtctgaaaatgattgatattttattcaatggttcttatttctagtgtttgcacacgatagtatgcaacaccttattactagagtacatgtaaccaacgtttgatcaacaacaaccacaggaagagagttggaagttgacaggggccatgttgcacatgtatggcatctgcatcgccatcttcatcatctgctgctgcccgagtccagcacaaataacttgttgcatgctctgcatcatctggcaactggtgccacagtggcactgaggcatcatgccttgtagctgcatgcaacattgctgctgcaggagcgccattggctgcgacatgaacatggctgtggagctacccatgcccaacgtttgcatcatgtactgcctacacggatccatggtgcccatggctaatgttggtgggaaatactgcatagtggtgattgcagtagtggcacttgcagaaagagcaattaaggcaaacagggcaaagatcttgctggtgtatgctgccattgctgattctacaatactagtgttaaacaagattccagatggtgtagacaatattgttgaggatgatggaataatggttgcctaggggcctatttatacatgctggtagctgtgtaagccaggaaagagtttggcctttgcaaaaccacctagtggaggccacataagctggaaatcatgaggcatggaatttatttggacatttattcaaccaatacttttggaatatctacacaaagataattctgccagtgctttaatgcgtggaaagaaaatatgatgataaggttgtgccagattgctttggcattttgcagttttgtaaattatgagctggacaaagaaacttttgtgaacagaattcgtatgggacttgtagaatgtgttacacaagtcacagcttacacagataacaattaagagtttgagtcatcgccatatgtgaatgattgagtaggtaaacttggagctttgtaaatgtgccttaatagcatacatacatatgcagtttggcatgtatttggagttttgttaataagaattggaagtaaagaacattgttgtaaagggaaagaagtaaaggagaaacaaattttgggtccatcccaaaaaataaagcaaagattagagtttggccatactctttgctatcctactttccacatatctagttctttatcttacaaataaagagaaacgaggaagtaaacatatttcatgtaatcatattatgacaagacacatttcttaggcaggcactactgacaccatgcaagtatgaagttgcattattttcaattttaactgatattataattatccagtgcagcgatcactgcagggtgaattgggatggagaactatgcaatgtccatgttcagaatcttcatgtttttagtactagagtagtagagatgtaccaaacgtgatgtatagatctcaaaatttccatcctggattgaagaaagattcgaccccattccgaagccatacaacaactcacaaattgcaattgagttcaatgtggtctgccggtctagatgactagattgtgataaatctagggttaaggcttcatagaagatagaactgattcatatgctcatgtgtatgagtattgttcatcgcttgagtagataagttcaaggacaaatgattttcactgaacttggatggagaaaactgttgcacaaggtaagatcaatatattgctgaaatagaaaatatctatctgacatgctgccaggtaccaatgtgctatgaataaaccatcctagctacttatcttgctaacatattatatcacgaataccttcaatgtgatctcccctcagctagaatgaagttttctttcactgtcacgaagttactctactaatgagatgtatatggttggcaatttggcatgcattttccagtttcacaacaacatgttcatcataatatcaagtggcattagttagatcactttatatttgctgcatttgcctcataaaaattgtattcccagatcgtgatcccgtctagctctgaaaacgagctaaccgctcatctgaacttacttgatactcggaggtagacataaaccaatcagattcaattcgagcaacctagttcagaaaacagagcatccaaaccagaacgagcaacgcgatttcatgttctccaacaaacggtcacacgcggaaccaatctcgtgccaatccaaccgagttgagcaaaatccactgaaattgcactgactaaaccccatctcacaagccaaaaacacacagagaaccggcagcatcagggattcaagcacctccttccgctgacgacgcgacgaatctctgtccagaccgttcactacaagcagatctagcacgttcgtgatacggatctcgcggcgcaaggggagatggaggggggggggggagagggagtatacagcggggtggccgagtagtagacgacgtgggggccgaaggtgagggcggcgcagttgaggaagtggaacaccgtcatctcgtccccgccgccgccgccgccgtcgtcgtcgtctccggcgtctgagcaagcaacggcgaggtcggatcgcccgaggtgcgcgacgacttgggctggactgcttgagtgatcgagtcgcaccccatcgaggctaagtaaaagtatctcgggccacgtggatcagttaatgggcttcgcataatcactcatgggcttggagcgggaggatgatggcccataaaacaacatcccgcaagtcggtgacagtacaccatcccggcccaactaacaggccactgttagtcggttaggcttaggcagcaacgttgtttgatccagtgatgggtcacactcccacgtgggaatacaagtgtaaatattgaacataaatcgaaactttatttcatgattcttattctagccagtcgcacacgatagtatgcaacaatttactgttggagtacatgtaaccaaggtttggttaacaacaaccatagggagagagctggaagtaggcaggggccatgctacacatgtttggaagttgcatcgccatcttcatcatcatttgttgttggccaagtccaccacaaatagcatattgcatgttctgtatcatctggcaactagtaccatacccacactggcactgtggcatcatgccttgtagctgcatgcaacactattgttgcaggagagcaattggttgtggcatgaacattgttgcgtagctatctgtgcccgtcgtttgcatcatgtactgcctacacggatccatattgcccattgctattgttggttggagatatggcatggtggtgattgtagtagcggcgcttgcagaaagagcaagtaacgcaaagagggccaagatcttgtatgctgccattgttggcactacagtgctactatgatattgttgagggtgatggtatcgtggttgctgaggaacactatttatacatactaaaagtcgtgcgaggtaagtaatattttggcctttgcaaaaactacctaatggaggctagataagctataaatcatgaggcatgacatttatttggacaattgttcaactaatattttggaagaatacatggtagatactaagatgacgttgtagatatattcaaaaggctatcttttgccaatgctttaagaaatacgtggaaagaagttatgatgataaggctataccataaaagtttggcacttcataaaacttaatttgtagtatagttatttatcgaggtggatcaagaaacttttttcaacagaatttgtttgtgtcttacaaacatgttaatcaacaattcacatataaagtaccttttcaaagctttgtaaataggctttaataatagtatacagacatatgtagctaccatatatgtttggaattttgctaccatgtatttggagtgttgctaaagaaacatgagtgagtgaggttttttgaagggaaaagggataagctacttctgtgactacttgtttttatctttactcattacttgtgtatgtttattcctttatttttaaaaacagaaaagaaatttgagaaactcaaagtatttgtttattcaaattatgaaattaaattttatttaattattccagacactacaggaaatatggagtctttaaactgaaaatataactatatttttaactagtaagtaaagtcgtgtagggatgaccaattcttcttttggatcatcacatgtcaaattggaatggtggggtggtgaaatttagaatgcctgtcactcttgatgtgattagtaatggagacaccaaaaatgatgtctagattgcaaacatttcatcttagataggataaacatgttttgttcaattacaatctcattatggaagtgatacgacagctcacaaaattgcatgagttcaacgtgttctagacctctagattcttatatataaaggtggggttaatgtttcaaagaattatttcacatggtccttgtgtattgtgattgcttgagtagataaggttcaaggacgagtgagttttgactaaattaacatgataactagatgagcaggggcaaaaccacgttggccttctctgataagcatgacccaagtnnnnaagcttgcatgcctgcaggtcg

SEQ ID NO: 27761 - DNA, 4923 bp, Oryza sativa
  unsure (1)..(4923): unsure at all n locations
taactatgaagaaaaaagggggaagcaccatttgaatttttttaaaattcatttaatttaatggcaatttaaaatttaaaactgtacaaaaccatatccattccacccagtgcggcccaactgctgcccgaggcccacactgaattcctccctcactttcctcgcatcgcaacgtgcggagatgcagcaacgtctcgacgagtcgacggcgccgcgacggggagcggccgtcttcgcatctctcccccattcaaattccaatactccaaagcaccgttaatactactacttctctcacgaatccccaatccctaaaatccccgtacgccgcccgcttctctcctccgattcctccgccgccttcgcgccgccgccctcgcctctcttgcgcctccaccggccaccgccgcggcgtccgatggagaagccggagtggagcatggacgacttcgagatcggcaagtacatcggcgagggcaagttcgggaaggtctacctcgcccgcgagaagcaggtacgcttccaagccctagccctagccctagccccccaacaccttcgatttcgtctcgatttcgccttcgttgggagctgattttgcccggggacaactgcgggtggtttcagagcggctacgtggtggcgctcaaggtgacattcaaggcgaagctggacaagtacaggttccacgcgcacctgcggcgggagatcgagatccagcacggcctcgaccaccccaacgtgctccgtctcttcgcctggttccacgacgccgagcgcgtcgtcctcgtgctcgagtacgccgcccgtggggagctttacaagctcctccgcaccgtccgccgcttctctgagcgcaccgctgctactgtgagccccctcaccccctagcgcctttcatcagttcaatttcctcccattttcttttgggattggttttgttgcaatcgtgtactattgattacgttagcaaacttactgttcgcccgtaatttttatgacccaaaccattcgaaaattcataatcggcataaaccctgtatgttaaattctatagctctacagacatacggacggagtagtatttaatttctttcattgtcaaatcttttgcaagtggttcgtgctattggatctgctagaaattcccatgatctcatcagaacattgcgattcacaggctctaacanttttccagatacacatcactttttttttgcttccattacatgaaatgaactaaagcattgtcacctttttatgtctataaaatctgacaaagagtaacacaaggatatgctttcagacatgaattcatggaacatcatgagtaccagttttccattaaccaaaaaagatgaacatttcctttgattctttaccataagctctgaacagaacaacatgcacctgccttgccatctatgatatctcaggccctataattatgatgtacatatgttgctttccttctgattttctaatgttcacattatactttgtgatgaccttgtaccttgtttatttttagtatgttgccagccttgccggtgcactancatacttgtcataagaagcaagttatccatcgggacatcaagccagagaaattactccttgatatcgaggttggttcttttatctgcagttttgcacctcttctactgttacccttctcaacaccatcttccataaagtgttgcaagtgaattgaatagcatcttcctcttaaagaaataactgaattgtgtcatgttaattagtttgaaggtatcttcgccttttttttcttcttaatttctactgtctttgtaacaagtttcacaacctgatggtctcagatatgcacatgtaaatataccagattcatgatattttaatctacagttgatatggtgtttctgaatgaaacattttctttgcaactttgcatatctgatttgattcacattaagtgtaaattatagagctttgtatatgtgaaaaaatatggactgtcaaatttgacctgatggaactttttaaatggaaatggcaacttgaaacacatgtggaatggaagaatatgtatgtaaatataatgcatccagattatgcctgagtagtagtagtagtagactagtattatggtacagatcttacatgtaaataatgatgggacatgacagagaatgcctctactgaattccacacgatgttgctggtttgaatactgtatatgtggactggaagctaagttattacaatagaatcctctcattattattgaagaatggatagtgtcaccatgaatatgatcacatgctatcatgtaactctagttttcttgcctcaaatataagagtagaaagttgatagataacagtctcgatgtgttcatatgttgtgcctgatggttgatgtgaccttaactgcgtgtcggtacatgacatgctaacatttgttttaaataactatgtacctcccccttttccagggccgacttaaaattgcagattttggatgggcggttagatcaaatgctaaacgacacacactttgtggtacaattgattacctggcacctgaaatgatagagaaaaaggctcatgaccatgctgttgacaactggactttaggaatcttgtgctatgagttcttatatgggtcaccaccttttgaagcagcagaacaggatgatacattgaggaggtaagacctactgtgttgaatgttttgtccaatcttaatttgttacatgttttcactctccttaatatgaattctgagcaggatagttaaagtggatttgtcgttcccctcaactccttatgtttctgcaaaagttaaggtttttctttgcaaggtaaaatttggggtattgattacccctattgtatatgttacactaaaatgggttgaacttttgagttttgagcttcgagttcgtatgcagcttttggtgaaggattcaaacaagagactttctcttgatgacataatgaaacatccatggattgtgaagaatgcagacccatcagggagttgtagtgaccaaaaggctcgcacataatacctttaagaaacaaggtacattgggaggcataacgtgctaatgaaatacacaccttaccttcccagtgatcaccctagtatgctgagctaaacattaaactttatacacatttggtcaggctacattaaaacgattctgttctgttctcattatggactataataatttgcttcatttgtttgtgaagcattttaggcctactttggattgtaggaattctagatgatattcggaggtttcatttcctgtattattgagttactgttcacccctttggattggaggaagaaggcataggaaatttggaggaatttttcctttgcctttgatttcgtaggtagtccaagcaaatcaatgcatgttactccaaatgatcatagttttaaacacatactaaggaaaataatacacattttatgcttatttaggaagagtcctgtgttttactctatttatgtgttccaaacgatatgtatcatattttcctatgtttttcaatcctatattttgcgtatgcaatcctatcgtattactacatttttttctattcctgtttttccaattcctgcactgcgaatgagcccttgactaccaatagtgtccttcagctttcccaaaccttgtctgagactctactttggaagtggcaggttaagggcttgtcctgtaagatttaggtgctgtgagaagttttgaaattagaccaaagtgtagtctgatgcagcatacgaggagttagtttttccaccttgtgcccgttctgaatttggactcaaatccttgtggctttccctgctctcttatttgtatttattttttggctcttttatgcaggttactccgtgtcattgagggacctggtgaaggctggtgtagtattttggcgaatgcgttgtttgccagtggcccgtatttttttagctaattaagtaattatggatgtctatatgtatccgctaatcccacctcactgggaagccccaagctacctaactacactggctaatgcatgacgtgaagtcctaccatgtttatgtttgctgttgtccgctcctaaaggaagttggctggtgtagccgtaccagtttatgaccctaatcctcatcagtcatcggtgatagcatcttcattaccctaagtgccatgttgttgttgtggataaagttacttaacggaaatataagtataccaagtgcatgtctacctaccttaggaaaattggttcatatcttccccatatttggtctagttcggtgtggttgcgctaatgatttaatctaatgtagcctcatgccgttacacgagaaactagtgcagttagaccttgaacaagcaacatagaaagttgattaggtcataaaagtcaatttatcatatgcttcattttgaagaaatttagtgcgaattcgagtaatttctgtaaagctctggcaaaattcctgcgtttggaagtgcaagaaagaatattgtgtgcctcgctaatccagttatctgggcccaccagtcagcgtctgatttactccattaacgtccccccatctaatcctccgtcttccccacccttccctccgtgaagagagatccccatccaccttcggggaaggtaagcctcgagccctcgactcgagacctacctctccccgagctcgaatccttctcgaagcttccagattcttccacccccccccaaccctagccatggcttcctcctcctcgcctctgcccttctctgcctcctcctcctcatgctgctcccctccccctcctccttcggctcgttctccttcgccaccgcttcctccaacgcctccctctccaccttcagcgacagcgacccggagccggagctcgcgcgggagcctactttc

SEQ ID NO: 27762 - DNA, 11101 bp, Oryza sativa
gtgattgaccaaattacaaaactgatctaggggctgcaattctctcgtaaaattataactactcccccttctctagttgttggtgaatcaaattgcttgttgctgtttcatttgaatgctaaactagatcaatagaatcccatgtttagcttgtatgctgccaaccaattaccatgtattggaacagggcttccaagtattagatcgttttatgctgaaggctataacataaagtgcaatatttctatgtatgagcaataccatatgaatctcttcacgtactaatacatgcaaaaccatttggtaaagtgagttgtatagatgcaatgatggactgcttttttcaattgatgctatgtaatttatcttaaatgtgacattctggctgcttgagctggaatttagcttaacgacaaaatataagattggatggcagttggaacagaacacaaacattttctttaccatattatttggacactaccggttgttctgcgtggaatggaagggtcatggtctcatagatggcataactaggcatgcagatgtgtttttgtggttaataccaagtgtaaagcctgtaaattctgttagtaagagagtgcagtgctttaatgtgcatttggaattctagaaatattattagcagcagaatgcagttgtgtaaatggcattttaataacatgctattctatttgatagatagttgtaccatgcaatttagagaaaggctatcaacatgtaaataacaaggcagatgttgcaactctgttggcaaagtttctcgtttaagaactttggtagagatattttagatatttgatttagggttatgctattgatctttctttgtttgcaatatagtaatgtatacaatggttctctgtacgtaacagtcaccaactaaaaattacttaaaagagggtatctgttttccatatcctgtaatcggggcaagttttatgtaactaaaagggtacttttgttttttaaagaccggtcatctgtttcacgcaatctttgttttagcaatttccagcatttcgcaacatatgttgtaatcccaccttgactgcttcagattcttatgttgcacttcttatgcagcggaatgctacctatgcaggactgaagagggtaattgttgctgctggcgttgcattgaaggttattggtgcgcagaaagttatctttacccatcctcacagtataggtcttttaacaaatggaagcctattggctagtaataatgatccaagtcgaatatggcctctcagctatgcaacttgtgctccgatacttcaagtcagtgttgtaggatcagtcatgatagttgttaatgaaagcaatgtgcttgggaggcggagatcacatgacactgtggagttattatcagaaaaatgtgaagtggatgtagcaaaccggttgatctcagtttgtgtgttctgttcaattagttcaagactgccaaggctagataaaatcttgaagacttggtttagcaataaaactcaggatagcaaatcaatgcagtttatccaagctaaagtgacatcaatacctttgataaaattccgtttggagcttgagagggacatcactgaagaggatggcatctgggaaaatatttccaagtggaaaacagtacctatggtccagcgcgtcgcacttgatgttgtagctaaggttgaagaagaaggcaggctgaaggctatgtcagtgaagaaggttaaaaaaccttatccagtagtggacgcttcttcttggagcagcttgacttcaaatatttctttcacaaagttcatgtctttcgttttgccaccagaaccgttgacactggatgtgaagtggtgatattttctggttctcatttactcatagggtttataggaaattgcccatattaatcaaatccgtgtataattgactaggctgaaagaagttgtacctgaaaatggggttggaatgtactactatattaaaattttggattttccctgactaactgtgttgtttcaacctcattctttatagatgttagttctcttgtgcaacgaattttggatgctagttctcttgtgcaatgtcagtgcttacatgctgggattatttctaatgtggcaaggaagattgagattagagttgctccaatttgtggtgttgcgccaacttttgtatgtctagggatgccattaaacgggcataaatgatcgcacaatgatggtaccaaattggatgaggatcctaggttcatggcaatatgaaacggcacttaaacaatggacgtttcaaaacctcaaattcattcatactaggctcacagcgagtgtccaaaaagaacaatgagttgacccactttgcgttgtacaagagcaaaatttaccatcataccggtacaaaccacacaggaataatacatcaattcactttcaatcaacaccgcataaattgacaaggcttgacgaggaacaatgcatcatgctttctatttcttttacactaagatttgaacatcatctgacgcccactctccttgtgtctgaaacagatcatccggagctaagcctacaactatggatgttcatttatccgcgttttataaatatgaaggaggtgccttcttacattactgagtacaggaattgctgccttttaaccaagcatctgccaccagggcaggcaaaaaaactgatagtcagcccatctgccaaagggtatttgaggcaaggcgacgtccagcataacaaaaattaagaggaaatgtggctcagctcacattgaagctcggccaaaagaatggattggtttctggtctgccacaataaatatttctcaggagatgcctgctgtgcagtgaactgcatcatgctcaaagaccgtatgttattttcgatggaggccagtatcgaagcacagatctgccaagaatgttcttcacagggagaggtcccctacaatgacacagaaacataagatacttgtggcaaactggcaactgggttaacagcttaggtagtaacacccattgagattttgcataccaattatgtgaatcgaagctgttgtttctgttgtcccccagcacaaacacgtaaccttgaggaacagtctggcaaaagtaaccacgattgataagtatgtatgctccactatggtcttagcaaatgagcattaatattaaagcgacaaactcatattcccctataaggccataagcaaatgaagggtacataacaaaaatgatgcagtcaattcccacatttcaagcatcttaatgtctgatctaacagagttggcactttactcaaatacttgatgccatcaaactgtgacactaactgaaagcaaataagtactcctagtacattacaacatcaagtacattagtatccaatataaagagatgttgccataccacttgatccatttcatagttgagtggctccagcacaaattcctcatcctggactactccattaaccaataatttaccatcacgtacctaataaaagcagggaataccaatggtcattactcatgcaaatggcaaagaaaagcatgaaattttttggaaaaaaaggaaaacaaataggagtcactaccattcggataaaagcttacttcaacggtatccccacccttggccacaattctcttgatgaatacatctcctgaactgcaccccaaggcctgaaaagatcattcaactactagtcataacaaattctattatgaattaaatcaggcaacagataaaagggagaacatacctgcagaactgggggggcacggaagatcacaatgtccaaaatattaggctcccggaaaacgtatgaaacctaataccataacaacatcagcaaacacacatcacaaactattcttactcatagaacaatcaacaacaggaaattgactttaccttgtcggcaaggattcggtcaccaacatcgaatgtcggatacatagacttggatgggatggaccttggctcagctaaggatgatctatataacagtggcacagtcacagcggcaaaaacagtcttggcatcatccgaacaggagctcacccaccttgatagccagttcctcctgctcacctctgcagcagcaccaagtgcaggactgctctttctcaccattccagcagcaccggagttaattgcgccactaccaaccaatggtttcacgcccacgcccacattagaagaggcaccactggagttgattacgccggagttgattacaccactaccaaccaatgctttcacgcccaccttagaaggggcagccaccgcaggcgagggcacatgtgcaggacggggcgaaggcgcaggtgcaggcttagttcgtgacacaggcgtaacagcaggcgcagcagtgggcgctttagctacatcaactgggcgagccgatttgcgggatggcgccgcggaggtgatgaggtcactgcaagggagccacttggtcccctgcaggaatgggaggagcgccgcggggttgaacgctgacgatattgacggcgaccccgagagcgatgaggcgcccacgcggccagtagcggagcccatcccggaggtgaacaccatcagcaacccgatggccagcgatgatggcgggtcattcaccggagccttcgttgcgcacgaccgcgagaggagcagcgaatggccccctccattggcggcgatggcggaggcggcggggagagcctttgccttgggcttgggcttgggcttcggatggttgtgatcgtcggcgtcatggtggtactcggagtggcgggaggaagcgaagaggcagaaggggcgggagagcgcgtcctggaggaagcgagccccagcccccggcgccgcaccggaggaggcggcggcggcggcggtgcagcgcaggccaaaagacgaggccaggctctgcgccacatagccggagtacgacatggtgatgcggatcgccatcgcgaagctggactcctaatctccgggatcttactggagatcgtcggtcactttcataccgtcagccgggacggcggcggcggcggagaggggcgcggggtatcggggggatctagggttctaccgagtaggaggcgaccgctacaggggttcgtcgcggtggcagcacgcagatcgaggatgcggcggtgggaagggtaggcctccggagatatgggaagtcgccgccggtggcggcggcggcggcggaggaggcgagttggggggaaggagagaaggtgggagatggggatggtgggtggtggaagagacgcgtcggcttttttatgtcgaggcggagtcgcggaggccgctcggattttccagatcttttttacgattgttttttgcccgcaaaggttggaacgaggtgggtgtataattggatatttggatatgtgtaaattcgattttgcaagtgctgaaaagttttgaagataaaagagggaagtggtgcgatcgtttttaaatttgaaatgtgtgtttgactgtttgtctaggaaacaaataatcatccgcttaaaacttaaatcgagttcttttaaacaactcgatattttttttcgttttacattagcacgtttctcaaactaataaaatgtttcgtaaaaaaaatttctatgtaaagttttgtttaaaaaatcaaacaaatttatcttttaaatatataatagttattaatatataattaatcgtgcggtcataattcatcttttttttggggtcgcgaatagctaccgtcaaactgcttattcgtactggccctcggtcacgcggtcacgccaacgaaagttgctagctaggctgtcgttatgcggtagtattattgttttcaagaataaaaacaaaggatattcttaggtactttttctgtcaaaaaaaattaacatgtgactcctcttaggatagtttatattcgttattctaggaggcgtcacatttttttctaggttgaggttttttttttttttagaacggaggggtaggtgtacaggtgtaacatacacccctttacaatgagtaaatattatttatatttcttaaatcagaactcattagtcattacaaccattattttgtgcactttatatctatacttgtagctaagatcatatccacacacaaagatcaaggatgtatactgattccaaaagttgcgaaactacagtacacagcaccacaaaaaagaatggccaaagatgtgcaaaaatcagagaatccccaccactagagggacagatcaaatcatcaaattgcacctcccactatggtatagggcatgaagcggtataatgacctgaagctatgcagacaacgacatgaaacacattttcactaacttagggtgtgtttggattccagccactgtctgccgaagttacagtatttttgtcacgctacattgttttgtgatgtggacaaaacgtccgccacacatgtggcgagccacgtcgtggcatggcattctatgccgccaaccaagcaaacccttaatattctagccatctaatatcagatataatatatcataagtacatatagtataggtgttttaaattttcggagagagggagtaagtgctaccatgaccaccacgtcaattcctatagctaaaagcaacgggggatgctgaagttgacaattcgcaagaggttgccgggtgctgcttcttctctgatgcttcttcccctgcataaggtccaggtcatagagattgagtgagtagtatttgattagtacctcgtaagcatgattggtcctaagagatagcagtgtatggccgtgatctgatctccaagctgcatggatgaattcaagaaacatggtaagttcttatcagagttcaacgtttcaagattgcagtaaatgtaaatagcataggatgagctttagttgaagaattcagatttcagagacgaaagacgtgcggacacgggataactgagaaattggcgtgtatatattttgtgtataatgatgatcatcttgtaagctgtagatgccaacaaaaaaaaattcactactttttaggtagctgacgtttgaactgtcgtaagcactcacgttgcacaaagtaacggtattaacaatttggttaaggaggcaattacaaatcaagatgccgacttagactgggcaaagcaccggaattttataatgaaatgacagcgagccatgaggcaaatacttcagagaacttttgcagtataatttacttacagtatataactatatattgtcaatataaaccattgacgggtatagattgatcatttgatctgatctccaccttaattgggttgcaatataaaattaaatgaggaaaacttgacaactcggttctgggatcaggagtggaaaactagccgcctgacattggcatgatcaaaccagagagccgattccatcttgagctattgcgatagtatgatttaccccttaaaaaaagagatttcgagagatacgtccctccaaatattttttttaaaaaaatcgttaacatgttggggattgaatacagaacctcgaggttaaaactacaccccccctttgccccttaaattaggacattcgacatctcaaactcttaaatctggacgaattaccccccgcccccagcactatcttgggcggttttaggctaggctagctgaccaaggagaaaagcacaacctcaaatgccatgttgaagaaagacctatggcgtttgaggttgtcacgtcaataaactttaaactttgtcatgcgaacacattaactttgcgtggagaaaaggtcatcttcttgcatgcaaacgggaaggccatgggctcatgtatgggaaattaactcggctgcaaaatcgaacagcctttgcaccaaaagaaattaaatctgcatttagattgtacaatacgcttattaatttggatctttttgtttttgcttatgcggcgatcaaacgtgaacagagggactattaattattttaaatttagaaaattaatatgcttttttaaaacaacttcgtagagtaaagttttgcaaaaaaaaaaagcgcacaaagcttggggaagcatacgcatggagaacgggagtttttttttatctactaggaaagaacacagcctggagttttttttatctactaggaaagaacacagcctaatattagattagatttgctagatatattttttacattcctttaagaaaacaaaactgagaagtgagaaagtatatcggtttccaagtatatgaaattgattggcataatacgggtctaaattatcgggagcaatagttaattgcacgcggccgttgtttttctccatggtgtccgtccgtagaccccaaaatcgtcacccaatcataatctgcctaaaaatatgttgttatgtatggaattggaaacaacgacccagataacccaaagcctcgtggcttccttcgactatatataagggccacccgatcaagagacccctgccacaacaaaaaaaaaatatgggaaattgtgtaggcgctagcaaccgcagtacctcgcgagaaaacaagggaaatcaccgtgtcagccgtcggtacggcgtggacggcatcaccgtgttcggtcgagcacacgaggtgaagctgacggccaaggtcgacggccgagtttatcgctgcatcaaggtcagggaggggatgttcctcacgctagcgacggagtacaacatgcctgcgctgatcggctgcccgggggacgaaccgaggatgctgaccccgtacgtggatgacgacgaggacgaggacgacgccaccgagtcaccgaccctggcgcgcggcattaccgtgtgttttgcaagaacctgccgttggaggtggtggtccgcgggggccgcattgcctgcgtcaagattcgtggccggaaacaccgtaggcattactcgctgcgttcaagtcaaactactccaaatttaattaattttataaaaaaataagtaatatttttaatccaagacaaatatattatgagaatttattcaattatagatataaaattatactggtgttataattattactattttttctacagagttcgtcaaactaaacttaaactagattagtttgactttaaccaaagtcaaaacgtcttatataacttaaaacagatggtgtattattctttcaattacttcatccgttcaaaaaaaaccaatctagtactagatgtggcatatactctgtccagattcgtagtactagaatatgtcacatctagtactagattcgtttttcgtgggacggagggagtatgttctaacgaatcctatgcccctatcatttcacttattccacaagaagtgatactacctctatcccaaaataagtgcaaccatgaaaatccgtgtctaacgtttgaccgtttgttttattaaaaaaattataaaaaaatttaaaaaatagtcatacatgaagtattattcatgctttattatctaataacaataaaaatactaatcataatttttttttaaataagacgaacggtcaaatgtttgacgtgaagtgtaaaattacacttattttgaaacgaagggagtatttgcaaacgaaaagtgatctacgaataaaacttctatttgtgtgtgagtttggccagccgatcgtatgcatgtggccatgttatgtcgtcgctttgatctttttcgcgaacgcgcaagaggatctttgctagcacgaatgtatgcatcactacttaaaaaaaacttcgtgttatcgtgctactactgtcgtgttacactcttggtaagcgttggttggcatttttcaggcatggtaagtgacaggatggtgcagtagtcacaatttacagattgtgtagaatacgtttgaaacaccagtgcatctgcaaatattgctcaaacaagtcactgcaatgaaattaagcatcgagttcttttcacaaccaaatcagtgagaggaaaaaggaaaagaaatatcatcacgctgaccagaagttaagtagcttgtcaaataaaatcttataaagcaactttacggtttattactgagtacactcttgtttcgatgagcacaaaggttttcatctgtaaggtgaggcagataagcagtgatatactctctctttccctaaatgtttgacgccgttaatttttttaaacatgtttgtctgttcgtcttatcaaaaaactttttgtgaatattattcaaaaacttgagtagtagtatatttaacaatggatcaaatgataggaaaataattaataattgtttaattttttttgaataagacgaacggtcaaatatgtttaaaaaagtcaacagcgtcaaatatttagggacagagaaagtacattataaagaagaatcgtcatcactttttctaatatgagcaaaaacttctaaagcaatcttatgctacactcttttttgagaacatcttatgctacactcgaagggcgcaaagctgtggtgtactagagccacatataagattccaacaccaacaaccaaggttgtagtttaatttgtttttttctttacgatatgtagatattaaattttaagttacaactgatatattacatattaatatacctttcttttcatgattaacatgcaggaacatccttcgagagcttagaatagaatagtttccccacgtatattcatatacaaaactaaggatcaccattcacagctagattcacttagctagctctaccatgattgctcgctaaacaagttgatcaagaaaacagaaaatgagctagatcaagaggacagaaaaggagcagagtcaaaagtacatgtaaggagtttgtgttacacatctatcacctttttggggtcatcgtcctctgcaacactgctaattggtatcaaaaattgaaagttgaagcaatcaagcaggatgggatggaaactacagagttctccgtactaacatcctgtcagtgattaagatacaatgttatataatattcaatacgtaacatgaaagcgaaaataaataagattagggaaagtaacttcataatgccagtaaggaagctaacaggtttccattatcgaaaaagtaagaaagctaacagacagtgtgaaatacacaatgtt

SEQ ID NO: 27763 - DNA, 12284 bp, Oryza sativa
aagaacgcgttggttttacaaatttagaaagaaaaagctacacgacattgactaaggatgtccacacgggttacatgtcaagttaaataaaaataacttctgaatcaaatggtcctttaatccgttctatccagttacacatagaatattatgtgtacctccaggtggtgttctgaaaagtgaggtgccacccaaagcagaagacgcaaatcttgctggagtggatcctagtgcaagtgtggaagctgagccaaatggtgtgggctgcagcatagacccagatgaactgaaagggctgggtgatggagcaggacttgtttgaatgctgaaccagggcaaagcagaaagtggtgttctaagaattgcacgagtactagatgaagttacgccagtaggggatgacaattgcaaaggttggcttgccagcacagatacatcaacccctgtaggatggactattctggcagtggcttcttgtttagctgcctctcttctatctgcctccaaaaaaggatcgctacaatcacccatgagccgccaagcattccgatagtgagttctcattacctcagcatattgatgaagattttccacctggacaaacaaaaacatcagagaagctcagtattctctgaacaccaaacaatatagttccatacaacaagaatttaatatattttagcgacacataaaaacaaagtgaacctatcacttggggtatgtttctgttgtgttacaaaacgaaatagatatattagcttaaatatgctcaaaactgtaaataaccaaccaccttgacaactttaattacgaatttaaattgaacaacttcagagtggatctgagcaatatataaagaaaaatccatgcagtattcagaatatgtaatgccagtgatcaatacatgtattcatcataaattacctgggtagcaacatggatgagatagtcgtacacattaggcactactgttgacagggattcgaacgcatttgaatagttcttatcattctttatttgaataagctgctctagctctccgaccattctgctgcattcctcaagacggttctcaaacttggaaacagtgtgttgcataaaaggagaaggccgcattgcaacaccactgtaaaaatcaaatgttggcacaattgctgaggggtgattgaaataagttggagccccagatggtccagcatgatgagcaaaaccagtatttgcagtgtccagaatatctacggatgaaatttggtctcagcttttgatatgagcggaaagccgaatctgtgttccgcatcatttcttcgaccacagccattaagctccgaatggaaaccatctccctgtccatgatggtggaggttgatcctatctcctgtttcagaaaggaaaatcctcctgttacaaacaaagaataaagttgaacgccctatttcaactagtggattcatgaactattccttcctcttttagttttgaacatattttcaatataaagtagtttcagaaagtagcctaatcaataaggaggctgaagtcaaggccagtaaaatccttttttgtactgtacaagtgtacattcaacaaaatacatcatatcgccccccaactatttgagactgataattttcgtgctgcagaatattgatatcttgcacatttgtgaagtaacattaagtcattactcaaccaaagatatgcgcattacacttaagaacattgaatatcagctggtactcaactgatctgtgaagactgaaaatatagttgatgagtggtgactagcgcaaaagctatatacctaataaaaagcatacaagcaagtaaagcaatgatttcatggtattacactaatatgtggggaccaaaacatttccaaagtaactagtagtaccaaataacagcccaagaagtaaacaaaacctgagaaatctgcgtagcatacagctcaaaactcctgctagagactgatgggtcgtagaggcggctgcactggtccaacagatcgctctcatgcttgtactccctcatcttgttcctgaaaatcacaggttaaccaggtgacgatcgtagagcaatggaagtttagacaaagcaattaacacaaagcacagagatctttatcaagggagacatcaagaacacacggaaacccccattgatctgcccttgccttctttcagaaaagggggaaaatgaaaagaaaagaaacccatagtgatccctaaattctgtaaaaatcgccacagatatctcataaaaacccagaaaataaacttcgacgacaatggggcaaaaagaagccaaaagattcagaccgtctcccaagaatatcgagaacgcgatgcgacgaacaatttccacgattcacatcttaataatggaatgcgttctcctgttcaccttaccgaaaaaaagggaaaatgcaaggcaatctcgataaagagccccaactcggattcccccaaaaatgaagaacgcgatgaacatcgccccaatcccccaatagaagatcaagaatgcggagcaagccatactcgatgtgcagcagaagctcctgcgattgcggatgcgctccacccacttcgtcccgtaccccgcagcccttccctccaccgtgtacagcctcagctgctgcgactgctgccgcgctgcctcccacacctgaagctgcagctgccgcaatgccgcctccgccgccgccggcgcgcgacgccgctcgaactccctcaacgccgccgacacgggcacggccacctgctgctgctgaggcggggacacggacgcaacgggagactcttggaacatcgtccgcgcagccggcggcgggtgcctagtcacctgcctctgacccgtcggcggcgtgtgcagtgcacgaaacggctgagggctatccacctccatctggccgcgcccgcgcggcgggcgagacgaccgagagccaccaccgcgtctgacccgtcatcggagcgtgcctcgcgtgaggcggcggcggcggggcgcacgtagaggttggtgtccgcgtgcgcttcggcgtcgccgtcgccgtcgccatccccgccggtgggccattctccgggattgtggggagccccggccgcttctggggcgaccggcgagggggaaggggcggcttccgcgacgacgaaggcggcgagggcgagggcgagggggaggaggatgacgagaagctgaagcgcctcgccaaggcctgcaggtccgcctcagcttcatcctccacgaccctgaagcgcgacatggcgggaggttgtctcgaggaagacgaagagttcccggcgcgtggcggggcaaatggatggacggatttgcccctagcggttgcgccgaattgcgggcggtcttggcggtgggcgctacggggtttcgcgcataacgcgggggtatttatgggtcaagagtttctcgctgctgacgtcatcgcccgtcggtgaaaaatgacgcaaacgagaatcgcctgcaaaagagagaacgggattgctctctgaattctcttcttccgtggccaagatgaaacaagtgaaatcgcctgcaatttaggcatggcctgcgctgtatttttctctgaactcaaaactgtgctgcaagcatactctgttcaactgggatacaaccatcgaaatcctcatcatccatccaacaggtgattgatcattaactccaggaaacagattcagaaactctattccagaacatatatatacagaaagacaaatttgtgcaagctatctcatgggacattgcttgagtttacagggaaggagctatctgaatcctgaggggaagacctgaacagcataaaacacacgccattatacattcagtaaagcaagcaacagcaatctaacctggatagctaccacgctgctgaaccttagtgcattacccaaaccacagaacttcaggcatcataattatccggcaaccaatacaaaattttcacaaggagcggtatatggatgcttggtgacttgattcagtcggtttcatgatctgggcgaggcgtataccaatcaggaaatctccccattcttctcagtagcctcgtataggaggactccggcattagggcctcctgttcttcagcaagctcttcctgtgttttcggcaatccgtcaggcacagggaaaggccttggcttcgcagcttgccccagggagtttgatgatagtgaattatgagatttctcagccatcttctttcttagatctgaacggtgatggatgctattgatcaggtacctcggatctccctcggagtccttcaccatccttgcaatttcctctttgggtagctcttgctgtcacaaatggagaaaccctgttaattcgttgagtccaagtagactgcaagcttaataatcttgatatgattgtacaacaatcaatacgaatggcacaaacctcaagtttattgagttcaaagtaagcatcccaacagctgcagcactcatcaccttctagggttgtgcaataatctgtatccagatcagaggaacaattgttaggaaatgattagacaacttcttatgcagttgatgttgcagagacaaacctacttaaatcaggttctaactgaatcacattcacacaagctgaatcatttttttccacaaatatgcaagaggattgtgtatccttgtattaaggagggtatcagggtaagcacacagaatgttggacaggctcaaagagccaacccagctgacgttttacataggtttacatctcacaaaagattgatgaaacgaccaacagcagagaagaacctgaaaaggggacaagcctacagatcacgacaaattgaattttctttgtgcatttccattctcatttcatctagttgaaattttattcagatcactgtattagctctgtacatttggcctcgaaagccaataattgcatataatgattaaatgatttatatataatacaaaacaacccttcctctgtttgactacagcacaaccttacagacatcagcaacaataatttcatcttacattgaaattaaagcatctatttaagaccctcaatctccaattgaagaaactgttttacgcctctacatcttgcattacacgctaattgtaggcttatagcactacttaattcttatgcttgttcacacaacatttagtagggatatattttagtttgatctggcagcatcactggtcctaagaagttatcacgaatcctactaagaaattaccacgaatcctcataaattacccctaattaactaaagcaacttagatctcagaactggagcatgcactgctactaaaactaaacagcaagtggcctaaacctcggcaggaagccgcatcccacgcagtaaaataatcccaaaatattgctagaaaacaggcagtgaggtgataactcgggctctcggctaaagcagcaacacaacccagcagctttacctgtgatctggtctttggtgcgctggacgagaggcttctcctgcctgaggaactcgtcgaggacgctgcggctcgagctgaagggctcccgcttcgggatcgagtcgtagttccgcaccgcgcgaaccactacccccgccgccgacccgcgccgcccagccgcggcggccgtgcgggaggccgagaaggcggtggccgtggccgtggccgtggcgggctgcgccagcggccggagagcggtggaggacagcatttttttttctccggcgtggtccccggctaatcgtcttcttctccggtggattttgggaaggatggaactaggcgagtggattagctcgcggcctatatatatagcagcaatagcggaaagcgcacgaaacggataaggattggccgcgagatagtttattttgtttgttttggatttttgttttgcaattctaaccttcaagttgtcctattatcgaaaataaagacgggagggattaaaatatcttgggatacttcggctttcggagacttttccatcgtctgcgcacccgggatccaaaacggtgggatctgagccgtcggtttcgaacttggttacagctacccgcgtataagagcaggtacaatagcagatataaaccagcttcaaacatattttaagaagataaatgagaatagagaacagcagtgggctataaatttatagtcagctgtagcacgaactccaagacacggggtgtgtattataggtgggaccagatattaatagtgtagtatgtaactattgtataaataggctattagattagttacagaaaaattggagctactagtttgctactagttggctgtactattaaaattgctctaataaaccacggcaagaagtgtcgacgtgtacagattttgactagggagtcgtcgtatttgttattgatatatacgtgtagttgatacatttgatttagtctagcttaagtctagcttatttggccaaatgatggctgggacccaggtggtgcgtgcagctcgtagaaactagtagaaagatatggtcatatggagcaacattttcagacagaatcagaatgctcatttgaaagctatacatgtatattagcatatctatgattagcgcaatatctgccaagctggcaagcttgatatacacggaccgtgttatacgtgtcctgtaattacagagtcgcagagtatgacagggctctgcattcaggtaaagcacatcttcacttgatcactttcagtcatgatctgccattcttctgagcagcctggtatgcgtggactccggcatggcagcttccgtttctccctcgagctcttctgccgtcttgggcagctcgtccggcgcagggaagtaaggtttggttttggtggagtgatcatcacccggagacgacgacgactcggcggccgtcttccgcgcctgcgcacggcggtggatggcactgatcaggtggcccatgtcgccgccggcatccttcaccaccgtctccagctccgctcttggcagctccatctgcacatcaaatcatcgaagaactaacagtggttaatgcaaatattattagtggtaatagattgatactactagctcgctagattgcccaaacagcacggttaatttagcacacctcgagtttattgaattcttcgacagcgtcccagcagctgcagcactcttcgcctttgagcgtcgtgcagtaatctgcgaataaggctgtgtttacttcgtgtgatttttttttacacgaacacatattttacatatttgaagtattaaatataaactaataacaaaatgaatttacaaattccacatgtaaactgcgagataatttattaaacctaattaattcgttattagcgaatgtttactgtagcaccacgttgttaaatcatggcgtaattaggatcaaaggattcgtttcacgatttacatgcaaactatgtaagtggtttttttcgtccacatttaatgtttcatacatgtgttaaacatttgatgtgatggaaaagttaaaaattaaaaaaaaattgaatctaaacacggtctaagtacttcaactggttatgaccactggtgtcctgtgcccatgtcagataatcagatggcacgagaaaaagttcaccggacgacgtaccggacatccggtccttggtgtgctcgacgagatgcttctccttattgacggactcgtcggcggcgccgcgccagctgagggcggcctcccgctccggtgccccgtgtctcccgacacggacgacgcgcccgcgcgcgcgcgacgaaacggccgggaagaagagccgggccggcgccgctcgcgccagcggcagcggcaacagcgtggcggtgggcggcaacatcgcggcgcgtgcgtgctgggtgagtgagtgtgctgtgtatgttggcgcgtggctgcctatcgtgcggaggacgagcaggtgtgcatggtggcctttatacgtgtacgtcgcgcatcgtcgtcgcggccgcggggcaaaaccggcagggaagccgtaacaccgccgctgttcggggatcccatcggcgcggcgcacagccacttggcaacgaccgcgcgacggcgcgacgggacgggagccgttggtttggcggattcccgtgggcttcccgtgtagaacgattcggtcgtgaaacgggtcgcgggaaagcgctccgcgatcgcgatcgagcccgcccacggcccatgggcaactctggagatgggctaacgacggttgtggctgaaactgcagcctgttccgggacgtcacacaaggaattttttttaatttttaattttttaataaaagttgtggcaaaaataatttttcattttgaaaattgacagaagtggtcgcctaccgccctctgggagggcgatttttaaaaatcgccatcccagagggcggcaaaagtgacttggcaaacggccgttcgctctcggacaacggccgtcaacaaaatttgcaggcggcccccttgccgccctccgctagggcgattttgtactgtgcggggggccgcctgcaaatgggcggcggggggcctggaattttgcaggcggcccccttgccgccctgggggagggcgattttatactgtgctttatatttttgtataaatatcaatagttatcaaatctttttatattgaaaactatacaagattaaaatctccaagactggtaaaatacaattttattattttttagggcctatttggaatgttaccgtacaaatattttgttagtgccaaaatataagcaagttttggcactaccaaatatttggtaaggtaaaattgcatttgatcatatttggtttgctgccaaaatgtaaaattgtagtgaagaatgttctacataatctcaaatctagattacgtattaccaatgaatagtcttcaatcgaaatcaaacacaagtactattcaaattaccaaaatattggtagggcatgtttttggtagcaatccaaataggcccttagtcttacgcatacaaaaaatcaccaccataattaaacattgtaatgataagatagataagaagtgccatcgatacacggtacaaatttgtcgatcccgacgaatcaagcatgcggtaacctatcggccccttctaggtcagtcagaatgcattgcattctcgtggtccttcaatcgttgatactctacttgtgtttctgactctgttatcttctggccatgatatgatggagtgacattgtcgatccatcgagtaaatccacccatccttggattgccctgtaaaaatagtaatgttattcagtttgggtagtaattttgtgcaaatcatagcggattttgtaaatggttagacatacaacgaaatcgttgtctacattggggcagacaaaatatctccttcgaaatgtttgttcagcaaaggatgtagccacctgccagcgatctctgcacccacactttggacgctcggaccatttaggtaaccctaatagattgttcctccagtctaagcttgcaatttccacccgacgttcgtactccatccaagcatgaatgaactgtatggtcggttcaggttgcgttatcggcccgccacttgaagtaactctgactgtgtcaatccattgtacgaattgacatttccttacatcctcctatgtacatccattttgggatagttaagttaatgatagtactgaggagtgatgaaaagaatagttgtaattaccacgaaatcatcgtcgacaatgtttggacacacgaaacacctttgtcctcgagttcggtgccttacggaccttatgacctgacaactgtagcgcccgttccgtcgtggcgcctagcgggaaaattatctcttaaaaaccctaattgcgaaatttgtttctttgcttgttgtctagtgtccgtgccatctcaagatctcaatccccgatctatcgtcgagttcaattccgaatccaaatccttccaatcaaattcctccgcaaaagtctattttgcctcccccgaggtcgatgggccgaatctcgctcggcccatcttcccctcttccccgggccatctctccctctccccccgagcgctctcccgctcgctctctctctctctctctcttccccgcccgcacgctgctcgcgcgtgcgagagcctccccgagcgcctctctccccgctcccccctccgccccgcccgcgcgccgcgcgcgcgtgcgcgggagtcgcccgcgccgagcgcccctcccctcgcgcgagctccccgctcgcaaagacgcttcccgcgcgccgtgttcgcgtgcgcgcgcccgcgcggacgccacccgttgtttcccgcgcgcgcgccgagtggccgaccgcccggtcgccgccgtcgtcagcgtctgccgcgcctgtcgccagtgtcgccgctccgctccaaaccgcccgccgtcatcgccgtcgtcaccgcccggcccccgccactccgcgcgcaagccgccaagggaaggaggccgcgcccctcctctctctgccgcgtcgcccccgctcccctccccctttttcccgaatcggcaaaggggcaagccccctttctccccctccttttcccctttttcctcctcgccggcgtcatcctccctgtcgccgctttggccgcgaccgccgagcgccagctcgcgcccttgaccgccctaagtcggttcccaaaccgacattgccatcctataaacccaagcctccccctttcccttcctctcccattcgcctcctgaccgttgccgccgccccgtgctctgtctcgcctccgccgtccttcgccaagcgccgggagagccggtgcgttcgaggacgcggaaggggacttcggccgcgccctctccttcctcttccccggcccgaggccggagagattactcccgcgccgccggcctctcgtcacagcgcccctcctcttctcggtgatgtctctctccgttcttcctcctcgctccatctcctccccctagctttcagtagtagcttgagtagcctccccgtagttagccggcgccgccccgaccgttgccgtcgctcgccgtgtgtttgccgccgtcgccgctcgagctccgtagcacccgctcgtcgccggcctcgctcggcgtagttccgcccaatccgacgctagcgtcgagctcccgaagccgcatagatgctctcaccgccgggaatcgatctctcgtgacctcgtcgccgtttccctcttctcccgccgccggttgccgccgccgcaatccgccgtcgtcgagcaacctccgacgaatccgagccgttggctcgtctccccttgtcacgtgcaaccgcccggtgtgcacgcttttgcccgtatcgccgtggttcgctccgccgctcgccgccgccgcccgccgtccattcgcggccgggtcgtcgtctacctcccgccagcccacgtggccgccacgtaggcgccacgtcggcgccagctcagcctagaccggatcgagccgaccccggtcagtccctccccgtgcgcgcgttccaccgcgagccgtgaggctgcacgtgggcccgccgcacctgcgtccaccacggaccgcgcgcgtgcaccgcgtcctttccctgcccgcgcgcatgagccacgtactccctccgcacggtgagccgagccgctgacaagcgggtcccacccgggaccgcgcgtggtgagcccggtccaccggactctctctcctccctcccgcgcgcgcgcgcttgggccgtcttgggccggccggcccgttaagctcggccgagccgctccatttaccttggaccgcgccctagccgcccgaggaaaagtctaatttccatccctctgttctttcttttcttttctttttcaaaaaggatttaattaaatccttttcctttagaccaaaaatccaataatcttataaattcaatatcttcccaaccgtaattccatttgactccattcaacttctaaaatttcccaaatctcgagatctatctagtggcacgcttagaggtctttaatagggctttattttcgccgtttgttgagttgtcccgtttcgcgtgtagtttcggagcccgaagacccgcagtgcaaggatttcgaggatcaagctccagatctcgagcaaggcaagccacctttgaacatcttgagcctatatttgaaatttaattatattgcttgcgaaatattatgcattgataggatcacacttaatctgttgtcccgtctgcaaggcagattggcagacctacctaatttgttgcatttgatccttcctttgttaattgttataccatgtccccttgtaaccccccagttgcacct

SEQ ID NO: 27764 - DNA, 2026 bp, Oryza sativa
aattggaaaacccgacacctgggtcggtgcttgcgaactaaatgaatttccaaaaccgcggaccggggaacgtaccgggtgtacggtttcccgctctcgcacttaaggaccgattccttggaatttcatccaaacataagacaagtacgaccacatgggtggaatgggacacccctggctgagtaactagcctatcaggggagccttgatgccgagagacatgtggattcgccggggtggtgtcggggaggacccctgggcttcctggcacagtatggtctgggacctaacctgttgttggtctgggacccctctcgtcggcatatggtaaacctgtatcggctttcgaaatgccttgtcatgaaagcttggaggtctcccgacgtggctgatccccacgggctgggtgatccgggttagtaatgtcgtgttggtaaagtgtaccccctctgcagaggttaacaaactgttcgaacagccgtgcccacggtcatgggcggatgtgaggtgattcctagcgtagttttgtctgactactgcttgtgaaattgctgttgtgaaactgggttcgatgtttgaaaaatcagcagctgacgggatcagctaggcccgggtggccgtttgaaatgttgttggcccgggtggccgtttgaaaagctgttggccgggtgccaaccctgtttcaagatctaaagactgatacattgcacatactccgaccggacgagacgcactgtctcatccgtgtcgtttgagaagcactcacttagactttttagaaaagagttcaaacaaaatcaattacgaaaacaacagcctttccttgaagcctgcattaaacacttatttcccctggcttgctgagtactcccgtactcacccttgctctatataaataacccccccagttgctgaagaagatgaagtggatcctgctgacgaggagttcttccaggagcaagtcggctacgatgagttttagggtttcggcctagttcccaagtcgcgcctgtgatgattggtccaagtcctggcttccgctttccttttgtaatgcagttgtgagctcgggatctgtccgcagcccaatatgactgtacttctactctataataaagagacctctgttgctgtgatactctgtctccctgtgataccagcactatttcctgggactggtatcgattaacaggttaatttggagcgtcacgggctagttccggtcgggaatagttcggggcgtgacaacaacggtcaccacaacgacactccggacgctcacgccacgtggggagtcctaggggatttacgtaccattctaaagcctcagcagcaattcgacgttcatgctcatccttccgccttaggtagtccgatcttgtttcactacgtgggtaagcacgggttccgtcgttttgtgggttctccatgtctacccactcaatgaagttgcacattggacgatatgtctgtgtaagatgttacaattgtgtacgaagaagttagtttttttatccatttgaacttcgaatagatgaagcatacctgatcaaagttcgcgcattggaagaatctcctgccccgagtttgtatcatgagggaagacttgagtatgcatccatccccacaatcgcacaaaggacggtacccatggtggaaaccaaccagcaaaaggatcgcttcgccagttgagacgctcaaggaatggcgcttccattttcgtgtgttgtgtgctagtgggaaagaagatatgaagaggttgccttcagattgtcaattatatagcgtcgttttcactgcaatatatgtgaactcaatgagatacattattcattagatgtgacaagacgatcacgcgtgggcgtgattcactttatgtcaacagcacagcgccgaaagttgatagtgacaactcgagctgccgcttttcatgtgtgctgttgtggactgtgcgcgctactggatctgacactaccgtgaagcgccgaaagtgtgttgtcgtgagcataagttgttctagcaccat

SEQ ID NO: 27765 - DNA, 768 bp, Oryza sativa
ctatcaacacacattatttcataccgatgcgcttgtgtgccttgagcaacaactctatgtctccgtgcctttttgattttatcttccatgtactttgtcactacgttgccaaacactatgttgttatcggccatggacagagtgaaatttctccttacgctcattctcaatccactgagtgaaatttctgatggacgaccctgacctccttctcattgttggtgggtcatcatgtaatgcaccaagaagtatgggaggctcgtcaccttcaacttgtggtctgcgagattgctcatctgtttgcttcgttgtcaactcatccaacttgtcccacaactcattaaatttcttctcttggttctgtgcacagagcctcttaaagagctccataagatgcttgttcttgaattgcttgtagaaatttgcacccatgtgacgcatgcaccatcgactccgaacatcaggccacttagctggaagtcccttctcatcccaaccgttctgcaagtagtcaatagcccgcaacatacccgcatgacgatcatgtataaggcaaacgttgggcctcatacgcaccactacaatgtgcactctctctaggaaccagtaccagctttcagtgttctcactctctacaaatgcaaaagccataggtagaacctggttgttcccatcacacccaattgctgtcaatatctgacctcgatatttacctgtcataaaagttccatctatgcatagaacaggtcgacaatgcacaaaagcatt

SEQ ID NO: 27766 - DNA, 8943 bp, Oryza sativa
  unsure (1)..(8943): unsure at all n locations
cccaatgagaaaaaggctctttgcagcacactctttgttcgatcatcaaccgatgtaaatgtatgtaggtcatagtaagtattattattcctctgggcaatggtggctaacaaacgaggcaaattatcataagaagcttcaaatgtgccatacctcatctcaataatcttttgtttggctctccaggcctttgcatagcttatggtgtacttgaatttgttctcgatgtgcctaataattgattttggttcaaagccaatgttaccaacaacactgctgtacatctcacttgccacaaaagctgaagtgatgtttcggtgatacttctccaccccttgtaagtagcacttgtgctcggtcacaatgctaactttccaataatcattccatttacccttatatgcatggacatgccacggacaatcttccttcatgcacctcacttcatacacataatttgttgacttgaccaccctaaactctctctgcaaggaaactgcccaatgcttcaccgcctccttcatctcatccttatgagcataccttgcaccgtcaattacctcgttctccttatactcccagggtacatgatcaccctctgatataacaagtccagagaagtcctcatttgcccaatcagtggccattacatcaccttcctcatcggatgatgcgtcgtcgtctgcttcctcattatccgaatcttccctctccatttcatcaacaattataccgactctctccccctcatccgccatgcccatggcctgctcctcccttggttgattttcctcattttgcatcgatggtccaacaacatcccctgcattgataggaccctctacatcttcggtttgcattgaaacatttatatctttctcttgtaccgacacaaatataacgaggggccatgaccgttcaaaagccatttccacataccgtctccaagcagcagtgctgtccatcggcattagttcccaaaaataaccttctgttgcacgactcactacaactgatacttacattgtgtagacttcttggtctattctaaatcctctcaacaaccaactataaattgactgaaatattctctccgcaggcctatcgatgcccttagatgtcattacaaaatctgacagatcaacaccatctggaccaaatctaatatttccttcaccgtgaactatctgaaatgtgaccttatttgacattgtgcctgatgaaaacaataactgcgttaacctcgcatttctgtactacgccctaagttacattctatacaatattgttctccaaaattctaaaagtaggttacattctccagatcaaactaaactacatcttacaattaacactactgtctatgtctcaattcatactattatattctatgctctggatctacacatatgtgctgtgtgctacagatatgctaaaatatatggaactaaaactaaaacgcaacatatatactcaaacataacatattagtacaaatgcaaaagatgtatgggagcaaacctgtgatgaagtgagcgaaccagcagggcttcgccgctccccttctgctgccctcccctctctctctttcgtttttttttggatttttagtgaatataatgaaatttcagagaggggggactgggctttatagggggaggcaaaaatcgccctcccccagggcggcaagggggccgcctgcaaaattctatgccccctcgccgcccatttgcaggcggcccccctgccgccccgggggcgggctattggagcccccccctgtggcgccctgcccctcctcttggcagtctcattcctatcactaacggtccaataacacacgattgagagcgaggggtgggctgccgatggggagcggcgacgccctgctggttcgctcacttaatccttggttngctcccttannnnnnnnnnnnnnnnnnnnnnnnnnnnnnnnnnnnnnnnnnnactgaaaacaattctcacacatgtgattaagcccaatcgctctcctccagtcgcaactcaactggcaacagcccaaggttctttaccgttttgggggacggctaccatagcaaatagtgaaaaccaaataaaaatttatcagaaagttcttttttaacttggtagggttactggattcttactatttccgcatcgacactgcaacgtcgttaaagtgataagcgtgaaatcatttatagtgtacatctctcattatctgctcattagtttataagccacaatcaggatttaaatttagggcttattcaactgtttgatgccataaccaaccggaatagtgctacaagtagtaggcaacaacagtgtaaaaacgtgcaattacatccacaacctcgcctattgaacatgtaattagtaatgaagagtttattctagatacttttcagacttcagtcctagcttaggcagttaagaataaacatataattactttttattgtttaatttattttttaatgtttatctacaccttctataaagttacaatccactaactctaaaattcaacataggctaacatgtcatctcatcatccacgcactagcaataactgcttattaaaaagttcatacaagcatgcaatatcatatataatttatttaattatacaaatcaatatgtaaatatgttgaatcatcacctctcacatcatatccacaatatttcaacatatctatccattatttttataatacttagatatatttatccatatattccgtattaaagtgtggagtattatttagtttattatgtttagtaccaataaatcctagccttttttatcttccgcttcttgcgataaaaatcttggccaataaccaaaatttcatctacaatcttccacggagtctattaaaattatttctttccaaatatggcttggcaaaccagttatatttgttgttaataattaatatcatgtatactccttactctattgttgaaaaaaatagagaactactccctccatttctgattgtaagtcattttgactttgaacataatcaaattactccaaatttaatcaagtttgtcgataaatatagtaatatttacaacaccaaattagtttcattaaatctataattaaatatattttcataatatatttgtattgggttgaaatgttattacttttctatagacttagttacacttagagcaatttaattttgattaaagttaaaatgacttataatatgaaagggagggagtacttagtaattcccacggcacggcaaaacgttggaatcatacaatgttgataacttgtacaaccggagtatcgtgtgcctgggattgaggccgagataactaacgtggttagttgacggcttctagtatgggctccatatgtccagtctggaacagaggtacagtttcaagaacaagtgcttacagcaaagttgcaggctttaatcgattatcctagatcaaaggagaaagtaggcaagcagatagagctacttttccgaaaggcaaaatagcctcacatattaatccatctggaacttggacccctttttttcttttttctaaaccatctgaaacttggaaattggaagtaaaaacacaagctcaagctactagtctacaagtctacaggggagattatgtaagacgatgtttttctaactgtctttggaccatcagttgatttatatcagatagttagacgaaattaatcagacagctgcaactgcacaaacgaaatctttcctcaattgcagctggccagccactcatgggccatggctgtaaagaagccatggaaagcagttgttaggtacccccaatacatgctttggccatgagctttttttgtgagttgtgacaagaaacctttattaaccttttgatggtgaggagaaaaaacacatggaccctgagaaacaacataatgacaattagcagcagtgatatcatggtaggtacttcctcagttgactgctccagagaaatattttggcttttgactcttacttatatttatcgaattactatatgcaataccacgcaggcagaaccaaccaagagccatgacccaaagcccaaaggttacatctttttgtacaacatctggttgaattaaatggattgttcttaagtcttaaccagcaaagcttaattccttgcaactaacttctgaatagactgaaactatacataattggtagggttgagatcgttccatcagaaagaaagctatgccgccatgttgttttataattaaatagctgagtaccagggatgctccacatgggaagaaaaagaatatgagaatgatcgtcatccatggtcattgacctaacttagtttaatttgtctccagccttttttttttatcttaatcaataagtaatctaattgctgtttttttaaggctgtggtcatgcatctattccctttcccatccagtagcattgcaaccttagtgcatcatcagagtcatcacaccatgattggctataattaagtctatccatgcatgtatattgccactgttacagagtttgacaccctttatgtcttattacaggacacattaggtgttcatgcacagtggaccaatagaatcacaaaaactaatccaacatagtacttatcttgatcagctcataaccaattattggaggctcaaattagactttgccggaacagcagtggaacctacatgtctgcctcatctggttgacgaaatggcagttgatgtgggcctgaaaagattgaagaaatcagaagatgaccttctgatgcttctaatggagctactagagcctagagcagccatggtgatcgccaacgttgacgtagtgcataattaaatgttaccccgatctcgaagagattctcttcgcataggacatagctgatgactacatcaaagtagtttggtctgaatttaactgtttctactccttccatatcatattataactttctctagcatttaaaattgaatgatagaaacagtactttaaatggaaaaggtagttgtgatataggatgaaggtggtacagtaatagatatggctccaactaaaggcgacactgtgtttgacaagtttaaactgtaaacattattttggagaggtttaatatgggatggaggtagtaacagatatacaactccaacgaagtatcacatgtttaaactgtaaacactatttggagaggcttaggattacaaattattcatctttctaaaattgctttggccaggtctctcaacttgagctgatgtactttgaacattctgtacatgaccataaacaaaactaagagccaaactgtatgtgcattatgaaattgagctcatgtctattctttaaaagacggtgtcagaattacgttataccgataagaaactcaaccgggttttcagattgaccctagaccggttgacaattatatactaccaaaccttgacataagttaatcgtgcttggacaaatgcagcctgaattttcaatagtcgatggcagttcatccacgtcagagatgtgcactcgccgctcgcacgcaggccgatctgtcaatagtccttgagtcaatgatcggagctgttgggctgcgtcgcttttgcaggggagcgacaaaatcgatcggtgacaattctttcagctgaaaccaactactagaagtttctgaaggagtgttggcaggctacaaattgttgtgttttatggttttgcaagtttttatttaccttttttaatcgcccaaatttacattgtaatagtattttgcgagactggttaaccactgaggtgtcacttaaaacacgtgaattttacattgatttttattgacttatcagccgcaaccaaaataaaaaatttgaaagttaatttaaggtttttcgttataatttattttttcagtattgcatttaaatcttaaagaacacatatataaatgttttatgataaagttatttttggtttcttcatattttaaatgttatttataaattgtatagaaaacgatgagaggcttaattcttacaggagtctgaacattttccccgtattccaagtttggacctcatggtggctctgcattccatcagaccttcacaccctccttcgtcacaaaaatttataaaaccaacacatgtgggacattcatcgcttcacatggtttcaattctgaacccattcaaacaaattttttcatatggaaaaggatagtctagtgagaagcaccgaaatggtgtatagtcaaaagcacttatccaatatgcttccatttagaaggtacaattccattgcgacacattgacaaatttgccactcgaggcatacacaaaaaagcaaaagaatccacctgccacaactctccaagggcaccaagcttcaacaatttgacaaggcgaggcaacaactactacttcggattcatatataagacgctttcaccttttctagctaaaacttcttatatttgatcaagtttattagaaaaatataacaaattttacgatactaacccagtttaatcaaatctgtattaaatatattttgatagaatgtttattttatgttaaaaatattgctatgttttactataaactagattaaacttacataagtaaggagaacaagtaatgctttagaatatgagacggatgaagtagtagagatttggtacggtattttgcttgcatggcactggccccgtcctgttgacaatcctgctccttgtaatcgaagctcagggcatgcatgcctgcatgctcaggatggagctgcatactatcgctgtcactcctggtcatcgagagcgcatttctccggcgtttacttggcagaaaactaaaaagccggtttcccagttgatcgacgaccaattcgccgttccacgcgcatggcaggatcgttttcactgcgaaaatgatgtgttttctctgaattttcgagttcagatacttcaggtagatagagaagcgttcaatttaatccgtcatctccccgattgttaacaattgctcatgtgaagttctgataaaaaaaaataaagtacttggatcttctactgtattctttctctcttcacgttcagaggcgctaagatccaaagagacgataaacctgttactcttttatctgtaacttttcgtcaggaacacggacaaaatggagatcctgataacactttcacactccgttcttttaattttcttgacccgattattcagaaacggagttcatccacattcagaccagagcagcacacaagtcttcagaggagacgcaaacatgacacggacgcagcaaggacatttttggccgatcgtttttgagcattttgacttcctgggagcagtgcaaaaatgctgtgtgatcgagcggttccacgtgtgagaagctgtgtgtacgaagacagtgacatggacgcttcaggggagcaggggacttgttcgtatttttttgcttctgtgtttatttctgatggagaaatttggcccgtttggagtccgaaactgtgtacggatcgtttaaacgaagcttctatctatatggaggttgtctagaatttgtgtgtacttgattatggctaatcattacttatcatgcacttgactctatttgctttttggaacttattattgtttgtagtttagattatacttcatccgtcctaaaatataagggattttgggtggatgtgatatatcctaatagatttctagtattatgatatgtcacatctatctcaaatcctttatattttttttgacggaggattagttttatattacctatttttttagaaacatattctagcggccagagccttgttatcttaaaaacacgtcaacaatcagatatcataaatcctgataacgaattttactgcttctgcactttcaatgtacatgttttatcaattttcctaactatatatttataaaatctattaataatataacagtatggaaatacctttcatggcaaatctacccacgtcgtgttataatttcaaatcctaatatttatatattaattaatcatttaaagttttaaggtttaatcacacgcattctagcacgaacgtctatttgagaattgggtagtacccaacatcacctcacccccactcttattaactaaactatgacttatgagaaaatataccagcccccatatcattttcacatgtaaaagaactatatttatacatattaatgagttaaaatgttatattgtgcctatcttaaaacatcatcttgtagtactcgataacggaggaagccaacagataacggccctgtgttcgctgagctagttcccatccggaatagtgcgcatggaaaacgaaacgattcattagcgcgtgattaattaatattagctattttttaaaaaaaaatggaacaatatgtttttttaaacaactttcgtatagaaactttttataaaaaacacaccgtttagcagtttgaaaagcgtgcacgtggaaaacgagggagatgagttggaaacgtgggataagaacacaactaggctgtgtttagttccacgccaaaattgaaagtttgactataattgaaagtttaaagaaaaaagttagaagtttatgtgtgtaaaaaaggatgcgatggaaaagttggaagtttgtaaaaaaaggaaaaagtacgaattaccccccccccccccgaactatcgcggtcgtctgaattacccccctgaaccacaaaaccggacattcttcaccccgaactatacaaaccggacaaattacccccctcgactcaatccgcggggttttggtttacgtggcgtacgcgtggcagtccagtcagcgttctatataaaaaaaatgtggggcctacatgtcatacactcttttttcttactctcctcactcctctcgcggttgagggctgcaggctcagcgcgtaggcgg

SEQ ID NO: 27767 - DNA, 2339 bp, Oryza sativa
gaggcgccgtccgcccgcccccacgcgccgtccggccgtccgctgtcgccctccaccagccatgcctgccgatgcctctcgtgccaccgcctgtgagagagagagaggggaagagagaggcaggggtgccgccgtctccatcatccccacctctgccactgccgcccatcgaccatccgcccccgcgcacccgcgcgcccgtcctccctcgcttgccgccagccgcgcgggccgccgctcgccgctggccgcaccaaccgctgctcgccgccgccgcctccgcgccgaggccgccgccctcaaccgcgagaggagtgaggagagtgagagaaaatagagagaagagtgtatgacatgtaggcctcacattttttttaataaaacgctgactggactgccacccttaccccacgtagaccaaaaccaccgcggattgggttgaggggggtaattcgcccggtttatatagttcggggtgaaaaatgtccggttttgtggttcggggggtaattcgtactttttccttaaaaaaaagaaactaaactcgtcctagctcggattccgaaaatactcccttattccttaagctatcctgacattctgctactagcataatctggaccaaaataggagcagtacagcatagctgacatagtaaaaaagacgttacctgtgcatcagaaaaaaagtgtcatttggatgcttgtgcatataaagctgattgcaatgtctctcaagggcatatataaagaactagagtggtctttgcttctccttcttttcccccacacccactaattaccctaaaacggtctgaacatgtataaggttaccggccaattgtctcaagtttacactagatatgcaatctaaatattttttactgtttgatcatattcctccactaagcaaaccctgccacaattcataacaaatgttatagcagatgatgttgggaaaaaaaaaggaaagatgatatatacaaaaatgttcatccaatgtatagccttgataatatcgtaaggagttggaaccaaggggaagatctgggtcttagaagagccgagttatgttccatttttttttgttctagtatgcccaacactatgttttactgcatatagaaaaactggaaatcattttctctgccgcaatctcttttcttcatatatttggttgaatcatatgtggcttttgtgaaaatatacttgcatgatgatctgtttaaatattttgttcgatcgatgttctagaagaaaagatatttgtgcataaatttttcaaaataaacatgtgggattagatataggagcccactagcatgataattaggccgggccccaattcttgagctttttttgaacctgaaccaggactctaggatgcaaaaacagtaagcctagaggactgccatgaaagatctcccatgaaaaaggaatatctctgggaagaagtcaatgatcatgaccatcaaaattgcatcccattctttttccaccaaaccaagcctccaattattcaaaccatcacagattattcaacagcctcccagatcatacaccaaatccgaagtgaaaaatcaaatgcagtggactcctttttgaaaagtaaaaaatcacatcatgtaaaatcattagtggacttaattaaatttgtctgtgtgagctgggataggatgctgcagtgctgtacccagtcagtaaagatccgccaatataagatgggaattaaatggatccagtacaaagttcatttaaacgagaggcaaatcaggagatgaactttaataaatgaaccaagtaaaaaaattgaaatagagatatgaaagaaaaagaaaagaaaatttcaacaaaatttattggaatcgacattaaatgcccaaatggaccccttgcttttaattccgtgcaggcgagttggtgtgttccaattaactcctctcctctcctcttcttctcttcctctcactcctctcctctcctctccccttctctgctccgttcttgatccagaattccagattccgtacgagggagcgcgcatcccgaacccgatcgttcgcgttcgccgatcccctgagtcgcgggggggattcttgctttgcggcggaattcgatcgcggtttggtttggtttggtttgatcccgaggaggaggaggaggagggggaatcggatggtttacgaggggaggggaggtgatgcatctgtcgctatggaagccgctggcgaactgcgccacgctgctcaagaaccggccgccgcggccgccggcggcgggaggggcggcggggggaagcgggcggcggctgcaggagagcaagctgcgggaggcgctgga

SEQ ID NO: 27768 - DNA, 3158 bp, Oryza sativa
tgcgggcgacggcggtggcggcggagcgcgcgttcctgtcgcccgacgcgctcccggcgctggaggaggcgctcgcgacgttcctgtccatgtaccccaagtactcgtcggcggcggacgtggaccgcctccgcgccgacgagtacccgcacctggacaaggtatgcctcgactactgggcttcggcctcttctcctacctccagagctgcaacccttccgactccaccgcgtccttcacgctgtctgagatcaccgccaacctcagcaaccatgcgctctacggcgccgccgagaagggcacctgcgagcacgacgtcaaggcccgcatcatggagtacctcaacatcccggagtcggagtactgcctcgtcttcacggtcagccgcggctccgcgttccggctgctcgccgagtgctaccccttcggcaccaacaaacggctgctcaccatgttcgaccatgagtcccagtccgtgaattggatggcgcagtccgcgcgcgacaagggggccaaggcctacaccgcctggttcaagtggcctaccctcaagatctgctccaccgagctccggaagctgatctcaaccaagaagcggcggcgcaagaaggactccgctacggggctattcgtgttcccggtgcagtcgagggtgaccggagcgaagtactcgtatcaatggatggcattggcgcagcagaatcactggcatgtcctgctggacgccggggcattggggcctaaggacatggactcattggggttgtctttgttccggccagacttcatcatcacatcattttacagggtgtttggggctgacccgacgggctttggctgcttgctgatcaagaagtcggtcatgtcgtgcttgcagagcccaaatggcgggacgggtacagggatggtgcggatcatgccagtcttccctcaatatttgagtgattcggtcgatgggtttgatggtgtcctggatggccttgaggatgatacaatcatcccaatcgaggagggttcagcgtcgaacagtctccatgctacgcacttgcctgcattctcaggcgcttattcatcagctcaggtgagggaggtcatcgaggatgaaatggaccaggacagctctgatagggatggtgccagcacgatatatgaggagaatgagagtgtatctgtaggggaggtgatgaagagcccagtgttcagtgaggatgagtcatcggagaactctttctgggttgatttgggccagagtccacttggttcagaccattcagaacagtcaagcaaggggaaattaggatctcctctgccagcgtcttggttttctggtaggaagaatgtgaagaagacatcgccaaaggttctgtccaaactgagaaggagccctattcctgacaaccatgttgtgtcctttgatgctgctgtgagatcagtatcacaagagctagaacatgggaaggattttactgaggaagattgttcacaaaatggtatcaagaatgttgttcctatcaaggtcagtgagattgaagaagatcaagatggtaaacaaaacaaaaggtttgtaaagttctcttgtgctaatggccctgcagaaggtagctcaacctctgtttttgggggttgcacagcccgtgggaatggctccacttcggagatttgttcagaagccaaagatagtgccatcagaagggaaaatgaaggggacttccgtctactgggaaggagagaagcacataatagcagattcaatggtggtaggtttgttggagtggaagaagcagagcgagtgtcaagtatgggccgcaaggtatcattcagcatggaggatagcaggctgtgtcgcaattcggaaactgcagaaacatctggatatgcaatgggagatgaggatgatgatgaagaatacagtgactatgatgatattcaggatggcaggcgagaacctgaaattatttgcaagcattttgatcatgtgaaccagctaggtctcagtaagactacgttaagactgcggtaccttatcaactggttggtgacctcactactgcaacttcgcttgcctgattccggagatggtgaaggggtgcctcttgtttacatctacggtccaaagatcaaatatgaacggggagcagcggttgcattcaatataaaggactgcagtactggaacttcactgatcaatcctgaaactgtacaaaaattggcagagaaagaaggactctctttgggcattggctttcttagtcatattcgcatcatggacaaccaaaaacaaggggtggttgatgtggggctcagttcttccttgtgtcggcctacgtcaaacggccgacgtgagaagaaaagtagcaagaatgatataattgggattgaagtggttacagcttctcttgggttcctcacaaactttgaggatgtatacaggttgtgggcatttgttgcaaaatttctggattcatcatttcttgagcaacagaggctatcatcaattcccgaggattcagagagatagtatttagagggtttcaattatgcctgttgcaactacatacatacaggaggatggcggcgacggcaatgtaattgtgaggacataagaagagatgtcaaggagcttttgcttggagcttttgtatcccaaaaatgactccacttggcataaaggggcaatcttgtggtgcggctggtatatttcttcgttcttctttttcccttttttctaggatgcagcttttttgcttgtagattttgttcaagatttatatgtgccacctaattattttgagcagcatcttttccatgtactcgtttgtaaagtggctccattggccatgaagttaagcttgcttgtatgattcttgcaacatgaatagcatgatgataggtgatcagcctcttttcagttctcctgtagtcctgttgagctcgacattgttgtcatcagtcccaacttctctgtactttttttttttgctttactgctggcattaagctaccatagtcctgctctgtcatatctgtgtacaataaacttatctgcgggccaacattgctatcttcttaatgtgctgtcattttctggatgctgttttacattggaagctttctgttgttgtgatcacctgtgaaacttatcagaggcttgttactgt

SEQ ID NO: 27769 - DNA, 1052 bp, Oryza sativa
atacaaagcacgttccctagttagatgtaggttaaacttcccgttcaaaaaactttaccttttacctgccctcaatttatgcacgattaatgaatgccacctgggtggaagcgagaggtggaaatggaaggtcttagttcggaggtgggatctctacctgatagttgcattgccattcatgatgatcccctggcattcgtccattcagccattcaccattcacccattcaactggaattttggttgaatgccggaattgtgtccacaaattgtggatggatagttggttggctggctggatggctggctggatggctggctggatggatggtgaatggctggcggcggttcggttgctttgaagcatttgttgctatctaaattccatttaaggtcgtaccttatcgcccagcatcatcttattctctatttgtattccctccatctttcagatacggatgtagccttggatgtgcccgtgcccaatgaagaggaagagcgcaacatgaaacgtaagtacaaaagtaccggacacccacccagatcccaatagaatccgccaaatcctgcgggaaattgtaatcccattcaccagctcctacatttaattaacaagagaactattgtatttatctaacacctggattatctccacctttcatttgatccctatttatagattacgctgcgttgctaacgggccgcacctcctatttcctcaagggtgaggaaatgaagtccatgtacaccacctacaatccgcagaatgtggtggccaccgcccgtttcctgttccacaagaagaatctatactactccttctacacctcatcgcgaatcggtcgtccgcgtgccattcaattcgttgatgatgcgggtgtaatcctggaggagcatcaactggagaccaccttggcgggcactctcagtgtctatcagaatgccacgggcaagatctgcggtgtctggcgacgagttccacgtgattacaagcgcatcctgcgcgacgatcgtctccatgttgtcctcctttggggcaacaaacagcaggc

SEQ ID NO: 27770 - DNA, 11372 bp, Oryza sativa
tttggttcccagccacactttaccattatttgccaacaaaattgccacaccttgtctaaggtgaggtgatcaaattgttacccacaacttactaagcctaagggaatcttgccacacttttttgagccattgacatgtgagacccaatttgttggaggggaatcttgccacaactgtggctacaaccaaatacctgtcaaatttgtctaaccttaggcgtggcaaactgtgacaaactgtggcttgcaaccaaacacacccggagtacgtaacgttgattacgttatgggcgtaatctgtttttctcttctctagctcgtgtcgtccgaggcaggcaccactcttcactggctcactgctactagtactgtactgtgcatggcatgcatatttgcataatcgatttgatctatggagtagtcacaaacacatgcacagaggcacacagtcgtgctatagctgctggtacgtacagggccctagctagcgaggagtacgtagcgatcgattaaacaaaaagattgggcaaagatctgatgcatgggaatgttcttggagggcgatgctgataggcagcaggaggtgtgtcttctccccgcgtgatgatggcgtctcccgatcgaatctttgttgcctctggcagcgcgccccgatcgacggattggaaacaccaagtttgtttttaccaagccggcttctgcccctgcctgcctctctcttccccgcgtggtgaattccgaggagagaacaaaagcgccgcgaggtgatctgataaagctgtgacgtatcccgcgccaatttgttactcctccgaccatcgagatcactagagttagttctaaattcatcgtcacggtttacgtataaataatcacgatcaccgatgttaaatcctaccacactagtactagattgatcagtgcatgtgatttgctcaatcaaaacccatgtgatcggtggcaaggtttgcagagaggaaagaccgaaaattggccacaaagggctcgtttgaagttgagcttttgggtcggcaagcgagcgagcaattctacgagagagagagagaaagccagcgcgtgcctttgcagttggtgcctttttgaacagcccaaagcagatggcacgaatccccagcttgacccatcatgattaggaccgtagcacccagcccggccggccagcatccatctgtaatccgcacccggccccgcccccgtcgtcgtcgtctcctccgtttcgcgcgctccctcgccgacgaaaagacaccgcgcgccccacccccaccaccaccccgatattcttcttgacgcgggcatcgatccccgcgcgcgcgggcgaggaagaatgggatgaataaaaagcaaggcaccggatggtacaagagtttgtttcctcatgtcacgtcgcgtcgttcagctagctcaccgcggttgaatgacaggcacggtggacaagcgagcaggcaatggcgcgtacgaggctcgctccctgctatgcatccatccgtgatccgtccgtccgtgtccatccatcgactcccatgcaccgcgcaagtgcacggcagacacaacgaatgaccggccggccgcgcgacaatccgatgtggtagtcagctagctgcatgcatgcatctatcaggaggtatccatctatcgatcgatcgatcgatcgccacatgccggcgtgagtgacgtgcattcagcggcattccagcgtgccgtgccggcccggactctgattgtaacgtactactacagggagatgcgggtgcatgcatgtcgtatatcagtatatgtgcatgtccttttcatcccatgtgcactttattatcgatgctacgatcttactttgggaaccttttgatgctctgatgatcatcagttcccaatctcgcaatgacaccgtagacagttttatccgattcagctaagtacgtacttgtacttaaaacttgatggcagagtatttttgtggaagagtgtacgcctttataaattactcctgtggcaaagaaaggtactctccatcaagttcacatactcttttgattaaggtatggtctttgcaattatcgactctcagtggatgagagaacacgtacgtcgaatcgaatgacggagcaggggatagctactcctaggtacgtactcctacgatcattacacgccatatactagtactacgagagagagagagaatctcgctatctcgtgcccatgatcggtcgccatgtccgggagaagagaagcagcaaggcaacaaggtaaagcaggcccgagccggagtagtagcagcccgggtttctaggagtcaatcggcacaaacacacagcactgtcctgtactactactggctactactcctaccacctagccggctgtagctcctccttttactggccactagcttaggcctgtgtcactttaccgctttgtttccctgcctgccttgccgttgaacggggtcggcccccgaacaatcgacgtacgtacgcactctacccacacagtctccagcctcggccgcgcgcgcgcgtcaccggcgccgcaccggccgtgtcacctgctcgacgagacgacccactcgcgcgccgcgcgtcttggctcggggatgagctgtggaggatcagaatctggccgcgcgcgcgcgccgttgttttcgccgggtacggccgcgctgtcggggcgcgccgcgctgcgtctgcctgctgccgtgtccccgggcggcacggcacgctgcaagcggacgccgttggcgcagaaacggttttgactgggcatcgtcgcgtgcccgcgcggtgtgtaaacggtcgttttcttgccggccgccgccgtttcccatcatcatccagacatccaaagaaaaaaaatgaaagttccatgttacgacttactctctccattacataatataatattttcaagcattactcacgtttatatatatactaattaatctagacgttttaacatatatataaatataaaaaatacgagaaattcttatattataaaacggagaaagtacgtgcaaatataaactagctagtgccatggcatggtttctctccccaatttgtataagaaccgaggccatgtttggataataggtttgtgatatgatttcccacccctcaaagggtaagttttaatcttagtcatctattctccccactccatttcattctatccctccattcattttcatttcccaattccacatctcctaaccaattatccaaacacaccatcgaaggatatggccctgatcatgataggcgttactactggtactaggagctgtgtacgtacagtactctactatctgcggtggcggtgggcctaggtcatcgggaagtgggccacaccctgaccgaccgagaccgggcgaccggttcggatgatgttttcgctttgtggcagcttggcagtgaggaggacgacgccaacggccaatctctgcgacgttggctgccagaggcagcagcagccagctgcagctcgaacggaagacgaagctagcaaccgaagaagcatcagcaggaagcagcactgcgcgcgtgccagcgtttgtccgaaacatatatgcgtgccaggaagtaggagtatgcggtttgctgttcagagttcagacaaagccaattgtactgtgggcttgtaccagcaacgagtaacacgggaatttgaactggttttctggtaaaaaatcctaaaaagttcctaagaattctcacttctctcacaggagcctaaattatgtaatagtgtaatcaacttcaatctaatactcctatacttcaatagtacaaccaagattaactttagaaaaccgtggtgtactctgaacttctaaaattttagttacaatgcaggctctaaaagcaggtacaataaccagctacaagcctactttatggattttaataatgagatgaaggagagagaaggtaccagcaggcgactgtttaagcgccggctctactcgcgctccaatacatatttgagcaataccagtgattcaatgccatgcactgccacttatgttagaagagagagtgcatggtactagaagaaaaataattgtttaaggaataatacttttattactatagtatgaatgtagattggagtaagcacttggctgtactactagacttgctctaacgccctcggagagcgagaaagtgtagaggtgtgcacccaagaaagagcgggactgcagctgtttagaagaggccctaaattactctctgttcagggcttttggcttgttatcatagtctcgtcctttccccttctttctttctccatcgcatcatgaaggaagaatacactgccgtgatcagccaggctcatatactagcaacaatgttctcttttgtggaactgctactgttcagaatgtgacaagcctggtcatgatgatttcgctaaagggacttgtggtaatcattcagtagtgatcaggggaaactgacgactgaatgtctgaataaatgaaagcgcagaacatcacgccatgcatgtcgccaaaacattggcagatgatcatcaaccaacagtttcatgcacacacacaaacacaaatactacacacaattggcaagcaagcttgttcaaaccagattgcaaaagggggtcaaaaggtgtcacctcatgcatgagtcacagaattctggatgttctcgaggagtcaaggctgcagttcagtccagccgaccatgcgagtgagtgacaaggccattttagtttgtagagctctcacaaggtcacaaattgtcaagtcgagcacccaataaatatgctgttcttgcatataataattaagtttattagtttgttagctcttgagttaagccagctgcttgggcaacgacacatggccttgtactcttgtgcttcctagcgttctctcccattgactgcatgattagatctatcccttgactgaccattattaacctgttgccatcaattaatcagctcgatataagcatgttgctatctttctcatgtactttcggtttagaaaatgtatgtgatgatcgaatcggttttcctggaatgctctgtgtctgatttacggggcgccatatgcatgatagcacacgctgctggctggccctacacggccagatcgaaacatgcaggcatgtacagaatgtgattatgcatatattgcatgggttccacttccttgtacaaattaatatacgcacgtacgagtggaatacaaggacgtttcatgtagagaagtagctgtattgtcttacgtgtgatcacgggcatggacgttaaatttgtagtttttggtacagtatagatataacaccaaattaaaatgtgttatagaacaagctagctagaagcaagagttgtatggtctgaagctagctactagcagtaagagcaattaatatatcaaataattaagttcaattcccagcaaaaaacgccagcatcaacagccgcgcgcatcccgtccttccgaattaacatgcctttaatccagcgctacagcaattgcgcaggaaaaaacaaggttagtttgactaaattcgttataacattgatcaccaattaacggttgtgatatcggcatccatttgactgctcggaaatggcagaaactagaaactgttcaatctggaaaaatatcgtggcaacttacaatgcctattagcagttaccgaaaataggagaatatgtgcaccaattttcgtattgctaaattgataatgctaaagtaaacaccccccaaaaatatatatatatatatacttcctccgtttcacagtataacttattctagcatttctcacattcgtattgatgttaatgaatctagatatatatataacatcaatatgaatgtggaaaatgttagaatgacttacattgtgaaacggatggagtaatagacagtgtcaaagaaaaaaaaaaggcttgacactttcaaaaaacaacttaaccggtgaaggaaaaaccactcccacgacttttcattaagaagaaaaagtcttgactaaacccggccaagagaagccatgaaacctaacgcccacacacgcgggacgggactctcttgctacccctatacgagggcctactagatcgattgtccccctccttcctacaagagaacctaaaatttaactggtactaaaattcgttcccgtggagagtagaaccaaccaaggatctgtaatgctacttgagcactgtaaccgataagctataggttcttttgcttgtcacaccgctaagctataggttcttgtgatgttatcttgtcactgttttaaacattaaatctgttataatattgatacctttcactatgtgtgccttttcaaaataaaaagaaatgatctcttttgattgacatttttcatgaaattttctactttcacctaaaaatgggttttcaaccctaatataccactaactcacgacaatcaaaacttcaaagttttgtttcaaaacccttttacttttccctgaaaatccaacctttagaacttggatttaggaaagtttgtcatgtgaggtaaagttgtcgtggctcttggtactgtacattgctgaacccaaaatgaatcatttgaatattactcctagctaggaatgaaattgtaagaaggtgatatgattcatagtaaaagaaaaaaaagtatgagctaaaaccacttataaaaactcgaccaatgcaccaaccgaagtatttaacctgtaaaaaaggatgattatctagtactccacttaccaacataagtacggagaagataaaaacaaacaaagagacaacccagtcagttagaactagaaacatgacagtgtaaaacagtgcaaaccccaccattcatcattccaaggaaatgcaaagcggcccccatctacaacacatctagaacccctaatccatgctgccatgcaaccagccaataatttacagagcaaagacaagttttatcttctgaacatggacaaataaggcacagaaagaaagcagcttcttctagccctagctaccatccaccatcctctttataaaccctcatcaccccctcaccccaagtactaccataactaccccacccaacaccatcatctgatccatttccacaaagcttctgaaagccaacacatacctcactgcctttgccttcttctcagcttcaagaagccttttgagcttgtgatttctacatcatccatccatttcatcaccatgatccaagaactccttggagggacaaccatggaccagctcaagggcgccagcgctctgaaccacgcctccctgccggtggtgctgcagcctatcgtgtccaacccgtcgcccacgtcgtcgtcgtcgacgtcgtcgcgctcgtcggcgcaggcgacgcagcagaggtcgtcgtcggcgacctcgtcgccgcacgggcaggggcagggtggcggcgcggcggagcaggcgccgctgcggtgcccgcggtgcaactcgtcgaacaccaagttctgctactacaacaactacaacctcacccagccgcgccacttctgcaagacgtgccgccggtactggaccaagggcggcgcgctccgcaacgtccccatcggcggcgggtgccgcaagccgcgccccatgccggcgccggtcgccaagccgcccatgtcttgcaaggccgcgccgccgctcggcctcggcggcgggccagtgtcctgggcctccgggcagcaggccgccaccgcgcacctcatggcgctgctcaacagcgccaggggagtgcagggccacggcggcagcaatgtccaccggcttcttgggctggacaccatgggtcacctccagatcctgccaggcgctcccaatggcgccggcgccggcacggcggcgtcgctctggccacagtccgcgccgcggccggtcactccaccgccgccgcacatggactcccagctcggcatggggacgctgggccaccacgacgtgctgtcgagcctcggcctcaagctgccctcgtcggcgtcgtcctcgccggcggcgagctactacagcgaccagctgcacgcggtggtgagcaacgcggggcgcccccaggcgccgtacgacgtcgccaccgcgtccctcccttgcaccaccgcggtgacctcactcccgtcggcgctgtcgagcgtctccgccgccgcgccgaccagcaacacggtcgggatggacctgccacccgtgtcgctcgccgcgccggagatgcagtactggaatggcccggcggcgatgtcggtgccgtggccggacttgcccactcccaacggcgcgttcccatgagatagacgacggcgacgacgtcgtctcatgcaagcatgacattactagctagtgtagctctcgatcggtttagctttaatcatcatcgatcttgtgtggtttcggttaatcagtgtgaggactctgaggggtttaatcaagggtgttttagttactggtgtttttgttaatcagtggggatcgatcaagtaaccttttttactgtttacttattattaggtttttacctagggtttggtggtaactgggtatagtgtttaagtcgtgatcaatgcatagatggggttgtactatgagatgtgtacgtgtgttgtcggtttcgttcaggttgatccatgtatggatgtaaggtttacattccctgcaagctcgtggacgtacttatctcagctgcaaatttcactttcgacgtactctgaaatgcaaagtacagggcttgattgtagtaatggcaagaacttactgcaaaaggtggaactcttttgtttgctttcaaatttgtcttgattctgatcgttataatgcatgctatgtatgcagtcctggatctgggtttatttggagcactcatgctgtcatgcttccttgtttctttgctcatagaaatgagcgaaatatatattcactgaaattgttgatcttttattttgcatacttcggatcagagacagcatgataaggactacacatatatactttccctactagatattgtactgtagcagacattcccaagcatatactatatatatatatatgacctaaagagatgggccatgaattccagtcctagctatctttatttataggaagggatcggattatttctctacatacagagccggatctttagctaattaaccctgcttactgagtaattttggaacttgaatttacatttatcatgcccggcccattgtactccactatacaactattccatgacccatactagtattcaagatcagatgattcaaatctgcttgataacttctttttaggtctatttgctcaacaagtgttgtttagacttgagtactagggcatgagacctgagccaatctagctattgttggtattctgccttcctactggttggtaataacccacatatatacaattggccttcataacacctatagattcactagtgtgctttcacagcattatcacagctcaaaagtagtttatactacatctagctatagcaaaatgtctaacttagcacttagcagtatagtgtaccccttttgattagttacttctccacatatatatatctagctcacttgtgcctgtctaccaaatgagctagatagtgctgatgcccaacacataacttacggagtaagagtatagcacagcatgcatatataaaaagttccatctaagctagtgcttcataaaatgtgttgcatatatatacctccatctggtgctagcagcgagccctaccgctactactatttcacatgccttcttcccaattcccatcgtatcgatcacgctgatcaaaattagtaggtcatcaatgcctgtctaaaatggctaatccataggagattaattaggagtaatatacagtgtagtactgtattccatagcatgtcagctagtactaataagagtatttatattcaccaacagtaagcacatctcaatcaagatacagtcatagagagtgattggactacccatccatattgctaagctcttgcttgttcaaacttgcttcattctgaaacttgaactgttttcagagaagcagctagccacaggcctcgttcagggttcagacttcagaccacgcatgcagagagagagagagagcagccatatgggaacaagaacaacactagcagccatagctacacactggtgcagtcaagcaagcagagaacgaaaaggagagagagagagagagacgacgaagcgctagctaccgactggccggccggccggtcggggacggcagatacattcgtctcgccaccagatcaatgtgcatgctagtagcatgcatgcagccttaagaaggaaggaaggaaaggcacagtatagctgaaacggcaggtggattcgattctctcatgcacgatgcccaaccaatggctggataacactgactggtagtattggctattactactactccctccatcgggattttgaatttttgtttgtaacgtttgaccacttatcttatttaaattttttttgaaattattatttattttatttgtggcttactttattatctacagtattttaagcacaatttttcgttttttatatttgcaaaaaaaatttgaataagacgagtgatcaaacattgtaaacaaaaattgaaaatctcttatattgtgggactgagggagtagccagtagcttagctagctgcagaatgcagaatacccgaatgggtgcagccttatgggttggtggagtgaaggaagagagagagagagagagaggtgagctctcgttgttttgtccatgcctccgacgaagcacaatgctgcaagcatcgatccgtccatcatccatcgccaacatcgctagcaactctacataccacggagatctagagagagaggtgcatggtggtggtggtggtgtcgtcctcggaacacgcacgtaaatattccgtctccggccgtctcgatcgcccccatcgagaagcacgtatagtacgcatgcatgatgctttcttttatcatctctctcctcttgctcactccctctctggctcgaggaggaagagggagaagggatggatgtctgattttcctatacattctctgtctcgtaaaagaatgatttaagattgaatgtgatcatttaatctaatacaatagatatagatacgagtctattcagactcgttatactaggttatatcaaatctaatcttagcttgattgttttggacggaggaagaatatccgatcctattatgccaggaagtttgctattggtcatgacgcactacgctgtgccggcctgcactggggtcattgttattctcatactccctccgtttcataatgtaagtcattcta

SEQ ID NO: 27771 - DNA, 6784 bp, Oryza sativa
tgctagaatgacttacattatgaagcggatggagtagctaccatgattactcgatctttgagggtagctgagcttgttcattcaaatagaattttaccatcgaatagtgttttctcaatcgctagagtttttttcgagttggacacttagaaatctcaagacctccttttacttagtgttttgatcaaaagaggagggtgttttacccctgctataacactaaccattaaaaaaattgaataaaataatcggtcaaacattgggaagaaaaaccgaaaactgcacttaaaaattaaaatgagactgatggagtatgaaacaatactaggagtaatatggtgttgtatatacggagtaagtacatataaggcactgtttagattctaacttttttcttcaaactttcaacttttccgtatgtcacattgaactttcttacacacataaacttttaactttatatcgttcaaatttctttaaacttccaattttagcgtggaattaaacacagcctaacttgggcgcacacgtacggtaccccgtgcttttctcgtggggccttgccgccttggcgtgctgtaccccagaacttcagttttgtcgctatctgttgcaagttttgcgtgacgtggcgcccaactggcggcagccaaagattcgctatattgagggttgaccgagtcaaacaatcttggattgaaaccgtggaatactaatgattattattagcacattgggcctttggctgacaaaatctggcccaatataaataaggcccatcaccagcaaacagcaactttgaggtggcagaaggcccatcagctgtgcaggggcagcgatgcagcatgccagcatatctacagacaattttcatctaaaaaaacagatacttaggttgatggattttcgacacagcaatttgtctttgaggacttgccatcatataacattgtatacttgatcttttgccatcagtaagttcatgttacaaaggcacttgcggttacagtggtaatattgatggcgactatcaaagcatgagaggttacccaagttcggcaaatcatagatttttcttgcaagttaaactgtcagcgccttgaattatcgaaatgttgctggcagaacatatcgtcaggcaaaaacgaacgtaacatcaccgtgctttgttttctgaccagtacagaactaacaagaattgttctaaaaaaagaaaaaaaaactaacaagaatttgagccggatacttcaggttttttagatgacgtgctataaactagaaacgacgataccaagacagactgaataacatacaacaaaaaaggggaaaagaacttctttgaggttaacttcccctgggaattaccgagaggcattgtgatagcaagagttcacggctactccacctgtacagtaaaactgaaacccaaacctgactctaaatttctgacattaaataacttgcacatttgtaacgcatgtgttgaagcttaaaggtaaccaggcctcagcaatggggggaggaggaaagctgttattccagggaagtaaccccagttcaattacaacagcatcatgagttcatgggaacatcgctggggttccacggcaagaaactaagcaaaatacagaacgattcttttcacaaagggctgctagtactttgacaaggtacacatcagggcaccctgccccttcagttctcttgttggtcgatgacttacatcgcatagacgatctcgccgctgctatcaacatcaatatctgagtcggaatcgaggtcatccatgtcatcgtctaggtcgagtccatcagttaggatgtggtttattcgagagcaagcaggtggtatggtggcctcagttaaaatttgcatgatctgatccatggtttgcattggctgatcaggttcctcatactggctgctcatactatcatcgtccatcaaatctgcaggaaggttcttcaagaaccagccatggctccgtatttctgggattgttatcctctgcatttgccatcatcaaaagtgtcatgaaaataatgtaccaaaattttgaaatgcatttacaacgattaacaattacatcaactataaacacaaataatcttataaaaaactattaacacgaatatggtgaagtagaagaagaattgaaaaaaccattgacagtgtagagctaactataggaatactaggtctacatcaaagccatcctactaacaaccgaacaccttttttctgtcaatacggtgccatgtcgcagacctatattaataagattcatttaagagtagctgtagtatgccaaacaattctggccctagggcatataaatacaaaaggcactgggtagaaccactagtaccacaaatccatttcctaacttatatgatgggaaagaacacatgcataccaacagcacgagcactgaggttttctacgttcgttgggaggtatggtacccttacgtatatgatggaacagaacacatgcacaccaacaacataagcactgaggttttcagtgttaatcacacacacgcgcgcgcacaagagcaggcgcacacacaaacacaacacacacacacacaaacacacacacacacacacatccctctcagtaccctcccaaggatcagataaagattcagcaaaataattaaacacatcacaggatgtgcatctgatgcctaattactacggaggacaacatgcaaggactcaccaaagacggatccccgacaaaaaatcctcgaaattagatgcctacattctggagatatgtccatgttttctggaatcgagtactgaacattcaagatacgctgcacaaaaatgacatgcaaggactcaccaaagacggatccccgacaaaaatcctcgaaattagatgcctacattctggagatatgtccacgttttctggaattgagtactgaacattcaagatacgctgcacaaaaatgacactgacatcagcttttcacagagagccaaggatgaaaaaagtgctccaatgtaaacaaagcaagagaaataagaaaagaaattatataacctgaattgttttacggaagttcttaggctcttctggatcctcgaaaggatatgcaccaactaccataacatatagagtcacaccacaggaccatacatcagcagtctgtttcagtataaataatgtatcagtatgagccaggattcctacactaagcggttatcagtaatggaaatacttctgttttaaagaaaaagaagggacataggtcctacgttaccctgagttctacggaacactcaattcatctcaccagtggcactatattaaaacagaaatcagtcaagacaagatagtttctggatggttcccagccaggttttgtgacgaagggagtagaacggtaaccagtgttttaccaattttagaaacactggtatgcacagcatctccactttcagacgttaaaacagagcataccaacaaacatattcagtggtcatcccaggaaaggaccagtgtatcaaccacaatggaaaaaatcaggtatacttgaatgacaagaaaaaggggaaacccatttcaccactgtagacctcaccacatgataaacttggccaagtgattggcacataatcttgacaaaatggctaattttttctcagcttagtgtgaacttgtagagcattttggtggtacttcactgaaaatacagaatgcaggacaggggaccaaacaactcccaaaatattgattgtttatgtttgtcaaaatacgatgcaagacgaaaagctatagtcctcccaaaggtactgctctcggggattaaatcaacaagcttaataagtcatgtaccttgccatcgtattctttcttcaacagaacttcaggtgcaatataagcaggggttcctacagtggattttggttgtgaatggagaactgaagactgcagaaaaagattgtcttttatcatttgcttattagagtaaaccagataatgtcctaaagtaatgccagtatagtgtattgtaagcaaatgaaatttacacatatcaaaatctggtctgactttgcctatggtgattagtgaattgttctgaaaacagcattatggatttacctatggtgcttagtgaattgttccgaaaacagacttccgtaatgtattatagaaacattagctaagtaccttagaatagccaaagtcacatattttcaagcgtggagcagggcttccatccagcagtgtattctccaacttcaaatcacggtggcatacttgcttgaaaatggagaaagtaggatagttcagcttaccacgatgccttagtacagaataacaatcagatgaaagaaaatcattgtaataagaaataccattgaatggcagtagctgactcccgagataagctgctggaagaagtagcgagcctagaaagtagaatcagaccgatgcaattagtgcgatcaatatgtcactcaagaaagatgcatcaaaaagaggatgcaccagggaaatggtgcgtacctcatcttcactgaaccgtacattcttacaaattctctcgaaaagctcaccaccagaggcatattccatgacaatagcaagatgagttggggttaaaataacctgtagatacatgatagagaacttatttttgctggaaaatattgaatggtgaactagagaatgagcgtcatgaagatcctgacttacctccttaaacctaataatgttaggatgtttcaacgatcggtgatttataatctcacgctggacattatcatctatctgtacaagagaataaacaaaataagtaataaacaaaacaaatgtggaaaaatataatgtagtcacaatacaccaattaaggttgggtcttaataagttgtctagcgattgtttccctaattaaacaaacaatacctcttttgccacgtcatgatcaagaattttgattgagaaccatactcaacattccaatctatgctatgaatatcaaatatgagttaacaagctaacagctaaacaccaaaagacctgacctccttacgggcagaataatttagggagaaattcttggctttatacgggtgttttttttccaggatttctagatgaaatatgcctaatttttatttatctatttagtagggatgggggaagctggattggtttaaagtgataagaacacattatcaatgaattgaagtgacaagagttactataaaggattacaggttcattaattgatcataaacaggcactgtggtttcttttaccatctgcattaatcacactgggatcaaccatatatgtggtacctacaagaacttagaccaacatggatgataaaatattcatggattaagaatggaatggaagaatggattaatgcaacatgcttcccgagctcctaaagggtgcgatttttttgaaaaaaaaactttctatatatgaatttcttaaaatactttttttaaatccatttttcaactttatgatagttaattcatttgtttttacccttgaatagtgatcacaaaatcattcagctattcattcaaaaagaaaacaggcgctgaggtatctcattcgtttagcatcaaaccagtaatcatgaatggcattcataattattataggcagctttgtccggtcaagaggacaattccacaaaagcagtaatgattggtttatttattggttatttactgtgatttaaacacacagaaaatgtcaggtgggcattcaaagaactttttcaggggtatatgctatgaaaagaaacttgttggggatttatcgaagctgcctaactttgcaattttcaacaaccacgccaccatgaacgtcactatatccacacgtttctgctcttaaacaccgtatgtattaaatgcacataaaacaaaagaagtacatatataaaatgtgagttcatgaccaaaccataggtcttcgtttgtgaatttgctttgtttcccatgttggtacaattcaatttgatgttactcaatggtgaattagagcacattgcatttgatttggtgtattgcggtggtggatgactgatgcttggttagccctaaagccctaattacggcatatctaaacaaaatctggagcaatagagctcaagcatactatacatatcaaatgaaaatgatagcaacaactacatgcaataatcacaatggttaaaacactaaaaataagcaattcactcctcgcactggaactactgaagacatgaatccctaatccacggaacaccacatcctacagcgccgcatgactcaccacaaacccagcacggttcggatcgtacagccccccctgggcgcaacgccgatcaaaccaacgaggcccccaaaatcggccacgtttgggcacaccgggtcgaatcgatcactcagccagcgccgaatcgaagctagaaagggaggagaaggcggggagtcagcggccgtaccttctcgccgcgctcgatgtacttgacggcgacgagctccatggtgcggcggtcgcgcatgaggcgggcgacgccgaagttgccggagccgatgtcgcgcacgagctcgtaccggtcgctgtcgtgcatgatcggcatgtccatccccgggcccaccgtcagcgccgcccgatccggcgcccccgccccggcccccgccgctgccatggccggggacggcaagggggttttacctacctgcggcttccaaggcctcggccacccgagggggggggtcccctccggggggcccccccccccccccca

SEQ ID NO: 27772 - DNA, 7237 bp, Oryza sativa
atatatatatatatatatatatatatatatatatatatatatatatatatatatatatatatatatatatatatatatatatatatatatatatatatggtgagtttatttgcaatcacagaggtgccaaattggtctctatcataattgatctattatttactttaaaaaatatctatgatcagttatactatggagtatatttacatcatagtattatagaggtaccaaatttggcacatgaggttttaccaccttcgaaattcggtgaaaatgaaaacccaccaccagatcatatccacggtgtgtcggttatggtaacaaaagccatactttacctaatagataacatatactatttgagctatctatcaatcgttgctactggtgttcggtgcactattcttaggttgtatttaaatcacgttttcttattctcttgtatcttaatattttacgatgtttgagaagattcaagggagggatacattggtttatgtgaaaaacgtattttgcacgatggatggcgcaagctatcctttggcaatttgctcttcataattgttgatgtccgatgcatcatctttagtttgctcgttggttattataccaaagttattttcaatgatacacaagctaccctttggcgctttgtctttccatcactactaatgtgcatctccttttagattgtttttatttatcatgacactctcaatttgagaaagtataatatttggaggtaccaaatttggcacctaaagttttaccacctttgaaatttggtgaaaataaaaacccactgccagattataccctcagtgtgtcgattatggtaccaaaagtcatactttacgtaatagatggcatatgctatttttggctatctgtccttcgttgctactgatgtaggatgcaccattcttgagttgtttttatatcatgttttcttattctctattatcttaatgttttacgactcttgaaaaaagtccagggatacatcggtttttacgtgaaagacatatttttgcacggtggatggcgcaagctatcctttggctatttgctctttgtcactgctgatgttcgatgcaccatctttagtttgtgggttggttctgataccaaagttgtattttcaatgatacacaagctacttatcactttgtccttccatcacaacttttgtgcattatttttatattgttttcatttatcacgatgccctcgatttgagaaaatgtaatctttaaaggtaccaaattttgtacctaaggttttaccaccttcggaatttggttaaaaatgaaaatccaccatcagatcatttcctcggtgtgtcggttaaggtaccaaaagtcatactttacgtaatagatgacacatgttatttgagctatctgtccttcgttgctactgatgtccgatgcaccattcttaggttgtttgtatatcaccttttcttattctattttatcttaatgttttatgactcttaaaaatgctcaatctttttatctgaaagacatattttgcacgatggatggtgcaagctatcctttggctatttgccccgtcattactgaagtccgatgcatcatctttagtttggtgtgttggttcttataccaaagttgtattttcaatgttacacaagctatcctttggcgctttgtccttccattattaccgatgtgcataatttttagattgcttttatttttcacaccaccctcgatttgagacatattttgcatgatatatggaatgagctatcctttgggtaagtgtacttcatcgctattgatgcgtgataagtcatttttagtttgctccgtggttcttatatatatcgaagtctcatcttccatgatatatggtacgagctatgctttggctctttgtacttccgtcactatccagtgcttcatttttagattgtttttatcgccacaccgctctcgtttttttaaaagattataactgaggtacagtcaatgatgaacagagagtgtattccttgtatttgtggcaattccaaaaacaattcatgaaaaaaatatttaatatgtgtaggtttcacacacagagacaaacacacacacatacacacaaagacacagacagacaaacacaaatgcactcacacacacataattatgcttaatactgcactttgggcctttttttccctcgacaaataaactcctcctcatggctcataatatatgtagtccagtagccaactgcctcaaatcctctaaacctaacccaccaaacatcatatctctacaattgtggagtgaatgcacaactaataaatcatgcgtccgttactgggtatattgtttcgtcagtacatatcctctaagttaatctaatgccattatcacagataactatcatcatggacattcttacgtttgcagataagttactggaattctcctactgaaccatgaagaaggaacataatttagctgtccctaagtcacaaaagtttccggatcaaggagctggaacaagaaacatgaaacacgggatgccatcttccaaaaacatggaacgataggggtatacctcttctaaaacaatggaatgatagatgaaacacgtccctagtttgattctatcatgctccttttttttggatacacagctgaaaacgcgatggtagatggctcaatgcaacgatgggaccagcatgacggcttcagcgctacgctgccacacatagtgatggagggagaaaagaagttgcgacacatggtgcccctctatttctccatccttcccatcctggcgatggcgacgatgcggtgcgatctcgtatattcacctcggcgcgcggcgactagcaacgaaggagcggttaatattgtttggaaattttagattgccctttccatcttttgctccatcatagcttgttcctccctctaactatcctgcttgttcctccatcgttccctcatactagaacgacgacccatccttattcaggacaaactttcacatagttcccattcctcgattcggaacgaagttccctattcctgtgacttggaactgcccatgagcttacgcaattggcgaaatgtttaagacactttgttgtttgccaagagaaattcccattttgtgtagatcaaataattgctcaagaatgtactccttattctgagtgataaatataattccctcttcatctaaaaagaattgttggtttatttacagccccatgattcttaaaaatatctacttgtaacaagtacttgtattgattttttttaatgaacaggcacctagagtatgccaatttcattgaatatattaggagtaaaagttgttgtataagtatgaaaagaactgtacaagaaaaaataaagctaaatgatgagctctaagagtcgttttgctcttgctagggctcaagttttggcctcctcgattttcgtcactaggactatcgttgaaagttcctttatgttagaacactccggaaacactagttagcgcgcgcgcctcctgtacgattttattttttgtttttttacattttttcctttttctctctcttttttctgatttttttaatctttagcatgttttgagtttgaaaatttttaaattttgagttgaaaattttcaaatctgaacttgaaagttttcaaatctcgacttgaaagttttcaaatctcgacttaaaatttttcgaatctagatttgaaagttttcgaatctcgagttgaaagttttcaaatctcaaattggaagttttcaaaattttcaaatctgaagtttttaaattttgaaatgaaaattttcaaatctgaacttctttttaaatctcgatttgaaagtttacaaatctagatttgaaagttttcaaatctcgatttgaaagtttacaaatctagatttgaaagttttcaaatctcaaattgaaagttttcaaaattttcaaatctggatttgaaagttttcgaatctcgattctcgagttgaaagttttcgaatctgagttgaaagttttcaaatctcaagttgaaagttttcaaatctgagttgaaagttttaaaaatttgactttaaaatttaaaacttaaatcgaagttttcaaatctaacttaaaaaattttcaatctgttagtaaaaaaaatatcccaaaaaaatctccagaatttttcctaattactatcattagtgctaagtatagtaactaatatagataattaacactaaagagaaggagggagtgctcgccagctactttcctggcacgcgcgccttagcaacccccagaacactccggtttctttccttccaaattttccatgccgttagtaggatgaggatgcgtctaatcgcttgctagtggctaatgccatccatcattcatggaccgtcgtagttgtacactattttatcgatttgatttgctcgagcagataaaggtaagattttgatcttgcttggcatgattgtgggacggagtgtgctgattcattctgatcctctccaatgattctttcaagaaaggagtcaggggggaggcaaagatgtatcccgtggatgtgggctgaatcctctcagcccaattgtacgtccagcccagacatcattatggatcagcccatcctacataattggttttgccaccataatgctacattgctactcaccaacagaccatagaaaaatccaaataggaaactatcactaacttcatttcccaaactcgccaactcatccaatccccaatcaagacctttagaaatgagccatttctccgtctcataaaaacaaaaaaagaagcaaagagaaatttcagtatctcacagaaaaagaaaggattcatttcagtgaaacgtggcaaaatggaacatgttaagcagagacaccaaaccgtagtcggattctttatgcgtttactccgtacatttcagcaacagcttatattgtgcagggagaaaatcacgcagggatgtgagctcaaacacagctacatcctccatgattcttcagagcagaatcagagtcagcgacaccagaacaccaaaaaaacaacgagaaaataagtcattcttgctcccgatcgatcgatcattagctgtctttgcagaacagcaaagaaagaaaaagaacccagaatattcagccatcggttcaccgaacatggaaagggcacacgcgtccatcccaggatcgagaagccgtttaattagggcaaatggcaatcaaaaccggcgtttaaataagcttatcgcgagcctgaaagcagctcaccgcgcactcatcttacagcgaaaaggacgcagaagatgctgcaagcaacagcaagaatattcgcaggctgtgagcacagtgagccaggcaggatcaggaaaaaaaaatcagataaacaggaggaaatttcagtacatgtgccaagttggacggacaaaaataaaagcagcagagaaaaactaattctgctgcatataattacgtggagataatctcacgccaagcagcaggccaactcatatactccacacatgctcaaagccaaaggggggcaacttgccaattagcccttcggattagtattaaactaatcaacggataagcacggatggtcagaggtgtaagagtaattaatagttgttgactcgcaaggatagcaatgctagctagggcatgcatatgagaacgacgtgcaacttatcgtggaatctatgcagggtatccagctcatggatggtctagaatttgcagtgggggttttattttccttgcaggtttgatcaagcttgtcagggtggtgtacgcaattctgcataagattttgtataaaaaaaatattgagattgcaattcaaaggagaaaatggaggtattaaaaacgtagctttctgtcagaaccgctgatcacatagaccagcagtgatgttcttggttcttgattcaccctgttcaaggaactttggattgttcacagttgtatttggtgttactggtgaattttcagcaacagaggactaaacatcagaaagctagcaagttacaacttttcagatagccagattacagtttggcaatccgttgtgaaatatctgcttaatggcaaccacatgcattgcaatgacctaactgcaacagcttgagcttcacctgaacgccgagaggaaaaaagcaacatttttattcacccaagcatagcaagttcatcacactgtgatcactgatcatcagttcatcacaagaaaaaaacgacaatatgcgaatcttgtatatatttatgtataatatgtatgtaaatctcagggcgaaaatttggggtctgcccgacactttgcaagcctcatgggtggtagcagctcttcatctacacatccacaacaacccagctcatgatcagttcatcacttgagctctcaacagctcaatcttccctgtatacatggccaacactaccatcctcctcagagtttctgaatccattattggcaattttgcatcgatgcgcaagccgaaaatccatcaatctacctctctgtctagcaagattccacgagcacgatctttcgatcattttcggacatagccttccgacttgtcatcatcctcgcagcagctgtcgccggcggtggccgccgagacggccacccctgagccggagagctgaaggggaccttgaggtgatccggattgagagcagcttacttcctgagaagcccagagatcaccaacaagtacaatcgaatggctcgctgaagctgtgcctggtgatttccggttgtgcagccgatacttctgaaaatatttgcatgacatgatcaaaatcagtatcaacaagcaagatatggaataatgaaatgaatgaatcaggaagcgagaactaatttgtttcaagaaatggttgctgaaataaaatgaggggtgtttgctcacctggagatggcttttcacttcgtcgttggtgagcccatcaaccttcatcacctccctgatttgctttggagtagcaactgcaatcatggtggaacaacaagatatgaggatttccggtgatctttgcaaattatggaaggtgaaaatgatggtcgaccatgtaatataccttgggggccaccgagctgctgcaaggcggcgacgaactgccggtgaagctccggcgaccagcaccgcctcgacttcctcgcctgctgctgctgctgctgcgcctgagcctgcaagctaagcgccgccgg

SEQ ID NO: 27773 - DNA, 757 bp, Oryza sativa
agcaattttaagcagaagctcgctgttctcaccgtcggcgaggagacgggcgcagagcgggagctcgcgcctgaacatctcgatcttgcggcgctcctcctcgaggctcatgatgcacgcctccacccccgtcgcctccttggccgccgccgccgccatcctcacggcgctcctcgccgcgaacatcttcaggtccaggctcaaatccagccccatcccgatctcccccacgtccagccccatgtacaacaacaacaacaaacaaaactctctctccctctctctcgaatctttgcaacaagaacaagaacaagaacaagaactggaggaagggtcgcggattggagcggaggaggaggagaaaggcggtggtggtggtgggtgagggggatctggaagctgcgcggcgatatatagacggggaggtgggaatctgcgagctggaccgcaggatttgttcgtctctctctctctctcgcgcgcgcggaggcgaagcgagaccgcgcggcgcgtggggtgggtgggcgcgatgcgttgccgattcctcacgtcgcgtccgtctcgtccgtccacccgcgagaaactcgcggaccttgggagcgggctagcgatgtcgatctaccgcttctcacgcccatgcagaacaccccctaacctttcccaatttcacattccagcccatatcacgcatattcctccataaataaaactcaacttacagaggtcgggtttagttccaaaataattcttcaaactt

SEQ ID NO: 27774 - DNA, 4103 bp, Oryza sativa
tctatcggccatttttggctggaccaaatgttgctttgttactggctttttgcaagttgggttttgggtgtgatatgagtggaaaatggacgtgcgtccccgcgcgggggcgtttttgacaggaaaagctaaggggaagctagcgatcaaggcggcttgctttttggcggctttcgctcgcatcaatcaaaggcgccgatggtgttgtggtggggcggcagcgcgcgcaagagcgacactgggaggcagagcttgggcttggctatggccagcagccgccagccggcaggagacaggagagtgctgctccctgtagccactagccaaggtaagtaaagcatcatgatcaaagtggtaatttgaacatgagagctactttcttcttctaaaataaacgaatctagaacaagataataatagaatgcgattttttctagcacaataaatcttgccctaaaataaaagatgataggatgtgatctttctagtataataaatctggacataatatcatatcctattctaaattgatttttatggaacggagcaattatgggtttgcaatatcgaacggttattgcagtaaaagcctctcttttttatcggtaactgcagggtaacggcaatataccggtagtggttacccccagcaaaccagtacgaggaaaccctgcaatacttgtgggaaatgagtgtttttgtgtagtttttacaaagttccagtgagattattctgtaagggcaagtgctatggtagatgtgactatcacctctaaatttatctattttatttaattatgaactaagaggcaactcatacaatgtatctaatactctcacatccttcttgaaatttgtgtggaggttgcctcttgatttaggggtggctcatcatctctctcctcacttctctcctccacatcatcactcaatccaatgtggcattcttagaggcaacacatgggttatatctaatactctcacatccttcttgaaatttgtgtggaggttacctcttgatttaggggtggctcatcatctctctcctcacttctctcctccacatcatcattcaatccaatgtggcattcttagaggcaacatatgggttattacagtacttgccctaaagtttccaaaacttatccacaggagagatgctgttggcagtgcatgcactgaaaccatcattttcactgaaccagtaatcccatacgccaggggaaaaaaatccattgcatcttcatcatcaggtccactctctccattactagtactacactgcaagtctgcaacttgtcacctacggtaataatattcacaaacggagcaacatgtatgaatggcatgacgagtcgagaggcggagagctttggaagcctggatatgaggctgtcgccgcgacaagagctagctgtgccgggctgccggccctgtcgtcaggctgtccacctgtgggggttgctttccgtaatcatacggtgcacatgcccgcagtacatacggcgtcgtctcatggtcctcctactacggttttgcctatcggctattcagtcatcagtgggcggtcggtttggttggttggttggttgctccagcgtgtgcgcaccgcgcagcagcaggggaagttaccgcctcgccaagtcgcgatgtgtgtgtggcacgcgcgctcatgcgaggggagatgggatcatgggcatatgggctgcccgctcccgccgttttcgaggcttttctggccctgtgcaatagccaatagtacggtggggttgtgagaggttgcagcccaatttttgtgttgcggactcgcggggttccgcttgggcttgttcgcgtgcgcgatcagctgctcccctctagtctgatctcttatcctatagagtactactatactatacgtactatatatacacacacgtatgtatatacaatatatatatatatatatacacgtataaactttgtatgcgtatatacgaagtttatacgtatgtatatatatggtatatgcatacgtgtcatatgtgtgtacatatacataattttatatgtatacacttttaatgtataaaagatacacatgtatataaagtttgtgtgtatacatataaaaaatttaaaaaatacgtgtatacaaactttgtatacgtgtatacaaactttgtatacgtgtatacaaagttggtatacatatgtataaaaaccaaaaaatacacgtatacaaactttgtatacacgtatgcaaaagtttgcatacgtgtatataaagtttgtatttgtatgtatacaaagtttgtatacgtgtatactaaatttatatacgtgtatacaagtttgtatttgtatgtatacaaagtttgcgtacatacgtattaaaaaggaaaaacagaaaaatatacgagaagaaaaaaaaagaacaccggaaaaggtacggaagagaaaaaaatagaaaaaaaaaagaaatcgtacgcccaaagaaaacggacggtacacgcgctgtcaccgcctcctccccgcgcgcgacacgtgtacagtcgcacgcaggagggtgagcgcgactagtcgtgtattagccgtctcggggggttggtggctcttccgcacttgcaattgggagttgggacatttgcagtttggcactacgtcctatataaaattatttaccacttctgatgtgatgctttttaccgatttgctactactaaacccacgtgttataatcatatgaggaatttttgtatcattttcacgcgtagtaaacataggtccgacattactgatagtgcaatgttaccctgcagcgtgtagttagtactacatggtactatgtacatagtacacatgtactaatatgattttcgacggtccagaccttgaactggagctagtagagccaggaacctgccagcgtgtgcactccacgaacagggcccggaaaagagaaacggggagaggaaaacgcacgtcgacatgtggaccatctcgggccaatcaggatccctctggcaccaattgcgccttcaccttttcacaggcaaaggataaactcctccctgccaccatccattccgccggcgccttatcctaccctcatctcccgtacaaaacccactccctccctcccgctcccaacctgacccactccaaccccccctgcgccattgccggccacactcctcttcctcctccatcgccaagaaccaccacgaggtaggcaaaccaccctcatggagatggatttctgtcgttctgagctgcaacattgcttgatctcatcgttggttttcttgcagcaatggcgtcgctgtccatggccacaacgctgccgtcgctggccggcgccgcaccggcggcgaggaagaggagcggcgtgacgtacgtggaggggatgaacgcgtacagcgggctcaaggcgctcaacaaggtgaccctgctcggcgtgcgcaagaccgccgactactcgttcgccaaggtggtggccaagctgagccccgccggcgggaagagccgcggcggcgcgttcggggcgcagtgcaacgccgccggtgagatattcaggatcgccgtcatcatgaacgggctcgtgctcgtcggcgtcgccgtcggcttcgtgctgctccgggtggaggcggccgtcgaggagtcggagtagtggaccccgatcgagccatagcaggcagggcccagccagccatggctggttggccccgataagccgtgatatataactgtgatgtatgtttcgattaaaatttgctttcgttttgtacccatgacgattggtgaatacccttggaacgaaacacgttttggaggcagaacctgcaaatgcaattggtttttcagctgtacacattgcggacttgctacggtctgtccaattcttcttccagagtttacttcggttttgaaacattcaaaaaaccagaatgatcacatcatcaccatcattcatcagcactgaatcatgtttagtgtactcactttcccataaactgatgacaaaactgaatgttataggctttcattttagatgatgccatgcggttgacagaagaagcacagcaggggcaaaatatacttttagttcaatgcctataaga

SEQ ID NO: 27775 - DNA, 2785 bp, Oryza sativa
actccctacgagctctagaattgctgcacgccggcctttgaccacctttgcacattcggctgcgtcgcccacgtgaaggtcaacaccctcgcacctcaagaaactggaggaccgcagcaagccgatgatcttcgtcggctatgaaccaggctcaaaggcgtacagggcctacgatcccgtggcgcggcgggtccatgtctcgcgtgacgtcatgttcgacgaggtagcccagtggaactggaatggcgaactgggcgcccctgacgacaccgactttgtcatcgagtacacctccgtgttccagcctggcacaatgccagtgacgcacgcggacgcgggggagctcgcctcgccgatcacgggggggtcctcacaagctgccccgagccctgtgacaccatgtcgaacacctgtagtgcgtgctgctgcatcggaggttgagttcgtttcgcccccacctgggggagaagacgacctcaacgcggaccacgacgatgctccacttcgacacaggcgccttgatgatttgctggggccggctacaccgccgggtctcgcagtgcgggatgtccaggaggaactgatgatggtcagtagcgaggaacccacctcgtttgctcaagcagcaaaggaggaggcatggcggcgtgctatgctcgacgagatcgcctcgatcgaagagaaccgcacctggcggcttgtcgacttgccggctggacaccggcctattgggctcaagtgggttttcaagctcaagaaggatgcacagggagtcgtcgtcaagcacaaagcgcgcctggtggctaaaaggtatgtgcaatgtgccagagtggacttcgatgaggttttcactcctgtggctcagctcgactctgttcgcttgcttcttgcccttgccgcacaggagggatggatggcgcaccacatggatgtaaaatcggcttttctaaatggggagctcacagaggaagtgtatgttgtccagccgccgggatttgaagtggaaggagcagaggacaaggtgtataggcttgacaaagcgatgtatgggctgcgccaagcccctcgagcctggaacactaagcttgatgccactttgaagaaaatcggcttcgagcaaagcccgctggagcatggtttatatgcacgtggtactggccgcgggaggctgctggtgggtgtgtatgtggacgatttggtgatcgttggcggagatgaagacacgatcactgtgttcaagaggcagatgatggaggaattcaagatgagcgatcttggctctttaagtttttatttagggatccaagtgcatcaagaaggaggtgtcatcactctgaaccaggcagcctatgcggcgcagatcgtggaaaaggcaaggcttgaaggttgcaatccctgttctacgcccatggaaccccggcttaaactcagcaaggagagcatggcgtcgctggtcgacgccaccgagtacaaaagcctggtgggtagtctccgttacttggtgaattctagaccagatttggcgtttgctgtgggctatgtgagccgtttcatggagaagccgacggtcgagcacatggtggcagtgaagcgcattgtcaggtatgtggcaggaacaattcagtttggatgccgctacatgagaggaggagaagggaagctgcacggctacagcgacagtgacatggccagagatcttgatacccgtaagagcactacaggggtcttgttcttccttggcaacaatcctgttaggtggcaatctcagaagtagaaagttgtggcgctttcctcctgtgaagctgagtacatcgcggctgcatcggctgcgtgccagggcatatggcttgcccggctccttggcgatctcagaggtgctgcagctgaggttgtcgagttgagggtggacaatcagtccgcactcgccctgatgaagaaccccatttttcacgatagaagcaagcacatccaaaccaaatatcattttatccgtgaagctgtggagaacggggaaattaagccggcattcatcaacaccggagagcaactcgctgatttcttgactaaggcgctaccacgagaaaaattccaggaaatgcgaggaaaggttggtgttcttccaataaaacaggtacaacaatcttagagggagatttgttagaataaagtttgtgtaccttagttagcaggtttatttccttgttttttgagtcagtcttgcatgagcttgctgtcttttgtggaagtcatgcgttgtgagggatccgagagtatctcgcgttcccacgtcatacgccatgggcgtgacgcacgtctcgcagctgtggggatggacgcagcaaattgccggcgtgagaagcggtgttggttgttgttttttcagttgcaatttccgtttctatatatggagcaagatcagaaaagcagcagttggttacgctgcacaaaaatcctcttattcctctgttttgcgtctttgccggatcgctacagtgtgtgagtgtgaggtgttcgtccgggatcctcacgatccttgggttccctgacagtattaggatgctactgtgaattggcgtgcattataggctgtttcttgagtagatcacgtcttgtcactgtgaattatagcaagtaaaaaccaaggtcaactggacagcatcaattggcgtgcatggttgctgtcgtgcaatgtatagcagcagcatgtgtcatagtccgggcctggtataataatgttgcatgtcggcagcgatgctcttgaaattgatgctcttgcagaactctt

SEQ ID NO: 27776 - DNA, 35246 bp, Oryza sativa
gttcgcagtcgccatccggttgctcaccgtcgccgttcgtcgtcgtctcctcccgcgccggccgaaccccggtgagaactccctccccttctcttcctctcgcgcgcgccgctgctccccgcatgcgcgtcgccacgatgcgccgtcgcccgcgtcaccggccgccgccatcttctcgccggtcgccgccgccgctcgcctaaccggtcggccggcttgcagccgagctgagcccggccagtgccacctcttccccatgagccgccgcccggtgggccccgcctgccagtaccccctccctctctctctctccttgagtcactgacccgcgggtcccgcgtgtcggcgccgcaccccccttgctgacgtcagccctagggcaatattgcgcaataaatacattaaggcttttctttaatagtaaaaacacagagaatcttctaaaaatcataactaattcatccgagctccgattaagtccattcaagtctcagtaaattcataaaaatgcatagaatccattaaaattggttttgtttcctgtttcagtagtcttatagcctgttttgcttgtgtgctttgtttgtcgcgtagatttcggccgtttcgtcgatccacggtttctcgaagacgttgctgtggtctcatcagtgcgagagcaaggcaagtcatgcattataattgatcatattgtacccaatttacaaatgtcccgcttttctattaaatattgcatcgttttacaatatcacgtgggatgggtcctactactcagccatatattgtttaccttatgccattgctaactcgggtattaaaatgactagatgttggtttaggaaatgcttagccatgcttagttctattagtacacaaaaagggaatcacattaaagcatagactttgattattggcaatagctctggattagtgccaccgtaatggtgttggctaattaaaatacactacatggtgggctgtgggtgcatggttttgctagttgtgcccatggcgattaaggatcggttcgcgggaaaccctggaagaatttatcgtgcttaccacaagccagcgtgggcaacggctgggcttgtagtgtagcttttctctagccgacatacccaggcgagggtgggcgtgatggagttgggtcggccggggtgtccggttgatcggcttccggattcaccgcggcacgaaaggggggctgcccgttgcctgctggggacgggggcgaaccctaaggtgtggtgcgatcggttagagggggttatgcgaagggtcctgtcacggcctctttccggtatgtcgtggtggcatgtcggcgcacggaaacgtgtcgtgaggctgtgtcttgtgggtacagttgtacacctctgatcagagtaaaactattcgaatagccgtgcccgcggttatgggcggtcgaccagattcaccgtgattagtctcacccctagttagcttttggaactggttagttcaggtggtggtttgggcctgtctcaacgtggtgtagcgttgagcagtgattggttaatattgattagttactgcaactgttttactgttttcaacaactgcttttaaatgctagctttatgcaaaaaaacctttagcctcccttggatataccctgcatcatacctcctcttccggtatgacttgctgagtacagtgggtagtactcagtcttgctctcttttcccccacaccagagttgaagtccttctcagttgaagatgtctcgaagaggttggtttcgtcactgccgtcaaggatgcctgtggaatggagtcgcccgctgcaggagtcaagtcttcaggcttagctcgcttttatctttttccgctgcatttgtaatcttttatatttttgtaagacgtggatctgtatgtcaacaattgtcgtttatgtaccctggctggtcctggacaggggtttaatacacattcagcttagtaattctggttcgtgaatttctgggcgtgacacgttcctcccgtggccaccggccttgagctcccgtccccgccgtcgttttgacgtcggtggtcctgtcgccctcgagctctcgtcagtggcggtttcggctcccttcggctctggcgacggtggcttcggccctagcgacggcagcgaattgacgttataggtgctatcctggttgctcaaaatctcggcagtagtggcccaggcagcagccgccttgttgagaagtctcagtggtggctgctgctggttcccgagctccatcccctactgctcccatccgactaggttgatttctttcatatgtagatgtgtatgatttcttcccttcttattgactgttgatattgagaagggaatgcaagatgtgcatgtatagagcaactatgtatgtagctagttgatttagtttccttttggtactattaaattagctcatgtactagataagtggtataataatattactgctatattttgttgttctgaggtcctgtaagtgctgaaatgatgcctaagattgcttgctatggccatgaattgttatgcagttaggtactctgccatattttgctactgtaatgcccaggattgcttgcaatggtgatgtactatgccagcgatgctcataacatacacagtacttgccttgttcttttagtttgtcacttgcattcgttttatggccatgatgcttatgatccacatagtggtgagtgcatggatggtccacgaagtgccttgtcaaaatttctataaattgctgaccattctataaattttctgtgcacttattactcagtctcatagaatatgatgcactcatggatatttcaatctttctcaacctctcaaatacaatcagtcactgagaactcaaattgcactcttaagggcataatggacatttctaggtaaattaaccactcaatgctatgagaactaacggtagggacatgggagggatcacaacgaaatctcgagggcacgcaggggattgatcaaaattgaaggatatggaaaggattgagtcagttttgaggtgcatacagggaatttactctagatggaatggcggcagcggcgttcaaccagaggtgggaaggaagctcacgatctcttcactttgccaatggatcagggattttctcgagtcattttgcagctggggttgagaagttgatggtgcagtaattcggcctgggttgccccttggtgtctggacactggagatgggaaagatgatgccaatctacctcgtgcacgattcttggtgctctgtcaggagttctctcaggcaatgacttccttggtctgaattgatcaagtctgatggtgctgtggcatggccagaggagcaatgtgcttgccagaatgcgagcatcacgtggcggcggcgatcctgatgctgcagagatggataagagggcggctggtcagtgcagttatgcagagtattgtgccatgttcccgcgaatagagatgggctgggatgctgctaggtggaccacaaaattggggaggatgaaggtacaaaaacttaggtacatatggatttgagttcatctcaggatttttttttcaacattttctcttctccgaatcgaattgaccaaacttattaatgtttttaaggcctgaccattttaatgcagcatttgcagggagcctagtttcctttgacaaggtgaagattcaaaattcgagttaagttgctcccaaaaattcagacaaaagagtgattcgtttgaatttattcaatggctaaactattgaattagaaccgatctatctatctatctatacctatgcctatggtaattgtgactttctacgaggcctcacattaactagaaaaatctaatcattgattagattaatgataaaaacacaaccacatattttacaattttaaagaaacttttgtcttattatgaaaatcttgtagattctcattcatgccatgctagaggatggcaaatgcttggtgttggaggaagttcttaggatggcaaatgtattataaaatacattttcaccaaatttcaagctcaaactcaactttatttaagagtaaaaaaaagacaaatttaggtgaatagtaacataacactattcacacgaaatttgtctttttttttctctttaccgaagttgagtttagagctgatatttagtgagaatgtatttcatatctatacctatctattgtaattgtttcatgaattttcaaaatttttaggtacgattttcttgagtttccaacactcaactcgttttcaccggatatgtcctcagggaggcggagaagggcgaagggagtagatggcaatggataaatgattgtgacaattatacagaggcctgaatgtactttcattatctaaaataaatagatgcctgcaaaaatggaagttatctaatggataacatctatggacaagaagctgttagatttagcctattgtagttggtaataatagacaaatggataactgaaagttaatggaatactgtgaattaattgtgtgccaattttagttcagtctctttgttccatataagcatagcaacagaagcatatttttttcattctcaatagaaacatggcttaattctctgcagcaattcacatattgtcgaaacaagatttcggcaatattaaaagggggtggctatcaagctggaaaagtagatgagtttggagacaaggaatttcatataggttcaggccttcttattcaagaagtaatacgctactcctgtccggggattgatccgccgagtctgttattgatcgtatgatctgggagaaaaatcatgtcccaaagggacccggacccctccttatataaaggaaggggtccgtattacaaaatacagtccatatccctaacggaatatgagattacagataaaatacaatcgtaaccgactatgatcctgggtattttctcgacatacaagtttagaaaccaacccgagtcctcatacagatattctatctaaatttggtaccctgtacccagctagattataactgccgtgtagatatggggtatccataatctccacagtagcccccgagacctttgcagtcgacgaaatagccttctcagaacaaaaaacaataatccgagtgcttcaattcctcctgctttagcctgtcgagtactaaaatcaaagactgtaaagggcgaaaataaaacatggcgcatcgagcaaatgtacctaattaggtgtagcccccgactatgtggttagttaaaaactaaacatatagtcaagaaccaaatggttttacaaccaaacatcatatagcaaagcacgcgtggtatccagtaagacacccagccgactacttcttagctttaatatatcaaggaaaaatatgaaaaggcccgagtgataaacactcaaaaggtccacaaatagacatatttggcaggaatccgagtaaaagctctgaagacaatccaccaaatatgataaaaatcatggtaatcaacgagtctaatagcctaggctataactcctacaattaccaaaataagcttataacatgataaagagaatgactactaataaaccagtcatctcaaattaacccaaacagcttttgcaacctaaaaaagcttacaaaaatagtataacacttttctgttgggtaccttttatctgcatcgtagtaattccaaagaattatctaaccgcattaaaaaggattttagcagcatcgggtcacatcattgtgagcacaaattgacaaagcaaaaagcgcctaagtccctagggatcacaacgggccacgctggtaataatattgggctaaagtaccgtacaggcccaggcctgttagcactcccgataccctaacaaaacactgaagtccaagtgacacttcatcttccccgctgagactctcgccatttccccactccttgctacagttctaaaccgcaccgacgaagctagggttcatcaatccgctccaatccatcctcaaaaattccacgaaatttctccgcgcgtccaacgcaccgatttcccatcaccttccaaccatatctcggactaaattaaaccatctagttcacattcatggcggaattgagagaaagcttcgagagtcagtgggcgccctccgatgtaatggaagaaaatctgaaaaaaatggtggcgcacggcgttcttccggcgaaggaaatcatcgggtggcgaccagcgttcggcgaagcgttcccgacccccgatacacacgagatcgtggtattttctcacttcttctatggcggattttctcttccaacctcaagattcttctgaggaattctgaacttctacgggattagcttgcatcatttgaatccaaactccatagttcacattgccaattttattcatgcttgcgaagcttttctgggcattaagcctcattttgccttgttccgccgcatctttttcctcaagccccaaccgaacaagaacaaaccatgtgtcgttgggggggctggtttccaactcaggggaaccttgagccaaaaatatttctccatgccctttaaaacctcaaacaaaggctggcatgcaaactggttttatgttcaaaatcctgagcccacactccccgagtactgctgcctccctccagtttatcaggacacatggaactcactgcctatggggaatgaagcttctcaggcagtagaactgatggaccgcatgataaagctgaaagaacaaggtctgcaaggagaacagatcacccgacatttcattaagagccggctggccccaatcaaagaaagatctcgcacgacctttgaattcgacggcaaacatgaccccaaccgtgaagatcctgaatctcttgatttcaaggtcatgaaggagagaatgtacaaaattttctcgaatgcaattgtagtcagctattcgcacttgctgctagtggtgccgtacaacgccttcaaccctcctccaccggtaagtatcgatcatctcaacctttctataaagcatgcctttatcttctaccaaactgacggaaaacttgaaatataggaatttgctttgatgaaatctgagcccccaattgctcaacaccgctcacctcatgggaaaactagccaagttagtggagggccgaaaatttggtctgttgatcaatcggacatttcaaaacctaccagccagtcggacttccgcaagaggaaactagccttgagtgatgatgaaggcgatgacgctaaaaaaactggtggcgaggaaacagctggaaaacaaccacggcaggctaatccaaagaaaaaaacatccagtcgtcccatgccgaaaatcagaaagtcttccaggtacaaatcatttgacagtcttccttgtattgaagctcattcattaaaatcatactgacaatataattcaaacttgtaggaaaccatccgacatagatccttctaaaaaagaccccaagccgactggcatggagagaagttcttcaaaagagaccaggtcgactgcaggggatcgcccgagtgacgaacagccggtgaccgacaatgtagatcccagcaacgagcccccgattgggagccagtgggccgaagctgggatcggtgctaatcaggagcccccgactggaaaccagtcggatatggagcaaaacaaggacatccctgaagtagaagctcgagctgacaaccctcctaaaaaagatgccaacgtcgacccagggtccagctctcctgctaaagtacaagggcctgctcgtccccgaccggaaataatcataggtaaatacatccttcgaactcaatctgatcaacaaacttttcttcaattgcttcatctttatttataaatgcctaaggcccaatggtcggcgatgaagaagaaatcctgaggatccagtcagccgaggattcacacccacccactttaatcaagtggtgggacgatgataagcaacctcagggaatcataataaacaggcaaaaagaagatgaggaagtgtgcttgctgaaaaaggcactcagccaagccactcgcattgtaaacgtaagtttccctatgctcagctccaactatcctgttttccattttacttaaatgccaataaatttgtattgcagagaatccatctcaggaacgaggcgaagaccgtaactcttgaaaagttagttcctcatctcggaactctcgaggcgaccagaaaccagctgcacgaagttaaggagctcgccaggaaaactgagcatgatctaagagattgagttgctgagctccaagagtccaacttcgaactaatcggttcatcaaaaggtaaacacaatctctgcctggcctacttgtgctaccatccttgtcatatcgattaatcaaaaaacaatacagtaaaagctgccaggatttctgaattagagaagcgggtccagactctggagaaggacaaagccgaattggcaaagcagagagactcggctctgaaagatgttgaaggtactgatgactaatacctcctatcttcgtgaccacttgttgatgtgaatatatctgtgcagaccgcaaagtcaagtcctaagtccaatttgacgtcctggttaacaaaatcaagaggcttgagggagttagagatgaggttgccaacaccgctgcaccactcgtccaagccatgttctataataacaatggtccgagttcattcgatgctactgaaattttcgacaagctgagaattgctccaaatacttattttaagaatatcaaagaggctggaagtatgggagcaagcctagcgttggcgatgaccaagtccttgtacccgaagattgatattgacgccgttgacggctttgcggacaggacaagcgaagaagctgctctcgacctcatcaatgacgcgcagaaagccgccgacaagatagctggtgacatagttaggagattccaggacaacgacctccggccggctggatctaacaattctgatgatgaaaaaactgatactgattgatgttgtattgtaatagtgattctgataaaaatgatgatgatggaggtacaatttgtacaatactgatgaatttatgctgtgcatgatatttcaaacttagctcctgatttcttaaaagtttttgtcaaactttgttgagcctaaaacccgcaaaagttgttaaaaaactttcagtcctcattgactaaaccaaaaaatcaaacagaacaatgataaatcaagtaagcaaattgaattgataaaaatcacactccattattatagtagtcaagaaaaggcttggtgttagcagtcaaagaggaaaatacagaagtaatgcctatgcataaaaacgacgaagatgttcaatattccaagagttgtcgatatgggtaccatcctcacgtttgagtcgataagaacctggccgagtgacttcagatatgataaacggtccttctcacaaaggagataacttgtgccgatcccgtgtagtctgaatttttctcagaaccagatcgccgactaaaaaagctcgtgagcgaacattgcgattgtgataacggcgcaacccttgcaaataccgagccgactgaattaaagctgcttcacggcctttgtcacaccccaaaaattcaaaatatatataaattgttgtttaaatggaatttttagaaataatttttttaaaagcctagaagagaagatctgtttttaataaataaattccaatataaaatggggccagataaaatttcattaaatactttgcttaattctataattcctagatttttctgggatttatttgagctaaggaagtatttttaataaatggaattgcatttaagaaataatttaaattgaaaaaggttttaaaagtcctcttttggctttgggccgaaagccggcccaaaaccctctctctctctttccctcggcccagttcggcccagtccgcagccgcccgcgcgcgcgcgcgttcggtcgctgacaggtgggtcccacctgtcaggcccgtcgtcttcctcgggctgaaaccctagtttcgcgccgccgccgccgctttccaatccggccgcccccttccgtttccggccgaattgatagaggggaaacaatctccgggatctcctctaccttttctcctttggaatcatcggctaaatcggtttggaaatcgagggattcgagttcgtctcggattcgtttttcccgaaccttccttcctcgtcgccggccgccgtgggccttcgccttcgcctccgagcccctttaaaagcctccccggtgtctcctctacccgccgccaccctcgccttcgcctctcgtcgtcggaatcgctttagcgccgtgagccctagcttcgccgtcgccgccgccgctccagccgtgctccgccgtcgctccagccgtcgccgtcgctcgggaaggacgtcatcgtggtcgccgttgcgtcgccgtcctcgtctgcctcttcgccgtcgccggagatcatcggagcaacatcgccgtcgtcgacccgaagagcttcgccgtttcctcctcgtcgccgtcgccgtccgttgatcttccgccgccgttttggtcaccggtgagttcgccgcgtcgtcctctacgtgctggtgccctccgtttgtgccgtagtgccgccgttcgccggcgagcgtgcgccgcccgagccgtttgccccgccgagccgccgccgccgtcggtgacgtcattgccgacgtcatcggggtcgtccgccgtgagccgccgtggacccgatcgatctcggccgtccgatttggattggttcgatctcggccgtctgttcgcgtgaaccgccgcccgtgcgcccggtccaccgaaaccctagcccgctgacgcaataaatccccttttccttttcaaaaataattcaatattacgtcataattcaatttaaaccgatttaagtgttttaatctgatttaatctttaaaaattcataactaattcatcttagctccgttttagttggttcaagtctctaattttttctaaaattgagatctacatgttaaaaatatccacatgtactgttcatgcttgtttatgtgctgttttggtgattttgttcttttctgcttagattccgtcgtttccggagagtccgttttcgccgaagaagagtttgaagagttccaaggccagcaaggcaagtcacacagatcccaaacaaccctttgagcatgttgatcctatttaaagctattatttcttttcaactattgcatttattttcgaatgtcattgggtggaattaacctattgtttgttatagcccttttgttcttgtttaccttattccttgataccttgggttattataacttgactagttgagctttatatattggttcaactagatattagaaataattgcttagccctgcttagaaacattagcacacttatgggataactaatgactcactgttatttaatgatggcttaatgatagttcacgatggttaatcgtgaatagttaattaattaatgtgccaactaaaacctggtaatggtgggttgtgagcacatggttttgctggtcgtgctcatgacaattaaggaccggttcacgagtttcggttgtgaaacattaatcgtgccaaccacaagccagcatgggcaacggctttatcttttgtatagcatggttcattgcggggcaccagactgagaagtggcggagataagcccacgggggtcgctggggagtccatgccttgtttataagggggtgattatgatccaggaaggtgcgctgcagtggattgtgttgtataaggggtattgtcacaactcctttccgaggtaccgtggtggtattgaggcacatggtgacatgatgtggagttgtgtcttgtgggtacagtggtacacctctgatcagagtaaaactattcgaatagccgtgcccgcggttatgggcaggtctaacaatgtctttcgtgattagtctcacccttctcatcataataaaagatgctttaactggtaataatttgattagctcctggtttggaatggtacatttttggtttggagatagaactgtgcagccgggatggttgttcagaatggttgggcctatgcaacagggtatgttgtatagcgttggattaatattatttaattacttaactgttttattaaattctcaaatgtttgctaaatgctgcttctgcaaatgaaaccctattatgccatcctttgttatcctgtgcacttgcatatttgctgcgtggcttgctaagtatgtcatatactcaccttgcaatcattcatcagaggaagagttctacaatgaggctgatggcgtggaggattaggtgtagccttggtcaagctgcctgtggagtggagccgtctgcgccgtttattttattttccgctgcttagatctttattgattgagaggaactatctacctctgtaatgacattttattcgcttattaattagagtaataattgtactctattatcaatttgttattgtgtgcctcggctgattcctggacgagggttcacacacatgtaagcgtttggaattttggatagaaattccgggcgtgacagccttcttccagtcggttcatatcatctactcggtcctcttcatagcgctcctcgttgaagttccgaaatcgtagcgattcaaattccacttcactcggcaacattgcttctgctccataaactaggaaaaaaggcgactggccagtagctcaactaggggtggtgcgcaaggaccgaagtacggacagcagctgttctacccacttgctggcgtaaggacgcagccggtcgaaaactcgcggttttattccttgaagtaccatgccattagcacattcaacctatccattgctcatgggatgcgctacagaggcataacaaactttgatgccgaagtcctcacaaaaatctttgaatactccgcccgtaaattgggtgccgttctcagtgatgatccgattgggtaccccgaaccggtgtacaatgttaatgaagaaatctctagctttgtctgccgtaattttaatgaccggtttagcttcgatccacttggaaaatttgtcgacagccacaaagagatgagtataaccgccgactgcctttttgaacgggccaaccatatcaagcccccaaactgcaaacagccaagacaatgggatggtttgcaactcctaggctggtaaatgagtttgtcaggcgaaaaattgacaaccctcgcatgttcgcacaattttgtcggcgtcggatacagctgtagaccagaaaaaaccctgccgataagccttgccaacgatggttcgcgcggcagcgtgattgccacaaatgcctgaatgtatatcctttaacaattgtcttccttcttccaaagacacgcagcgttgcaggattcctgatggacttttcttgtataactcggtttcatgtatgacataaagtctgctgcaccaggagatccgctcggcttcgtctttatccgaagggagttcttgcatggtcaaaaatcttatgaggggctctctccagtcggcttcaatcatgcttacatcttgggtgtccgtagcctcgattatttctttccttcgtacagtcggctcataaagatgttcgacgaatacgtcagaaggagctgcttctcggtttgaaccgaaattagccaatctgtcagctgcttcgttgttgtgttgaagaacatgggtgagctcaagtccatcgaatttgtcttccaacttgcgtacttcctgccgataagcagccatattatcatcaaggcagggccattccttcatgacttgattgacaaccaactgagagtctccacgtacgatcaaacgccgaatgcccaaagagatcgcaatacttaatccatgaagaagcacctcatactctgccacgttatgggatgcagaaaaatgtatccacaatacatagctgaatctttctccaatcggggagattaagacgacccccgctccactgcctgaaagcctcttcaacccgtcaaaatgcatagtccaatactccaccttctcctcgggtatgtcttcttggcactcggtccactcggcgacaaagtcggctaaagcttgggatttgatcgaagttcgtggcttgaaggatatatccagggacatcaattctaaggcccactttgcaattcgtccatttgcttcgcgattatgaagtatatccccaagtgggaatgatgtgaccaccgtgaccgagtgaccttggaagtagtgagataatttcctaacggtaattaaggcaccatataatagcttttgaacttgaggatatcttgcattggagtcggccaaaacctcactaacgaagtagattggtcgttggactttttgaacatggccttcttcttcacgctctacaaccaggactgtgctcacaacttgggaagtcgccgacacgtataacaacagcggctcttgcggatgtggtgaggccaaaactggtggagtagtgagaagtttcttgaaatcttcaaaggctttttttgcttcgggtccccactggaaattgtcggcttttttcaacagcttaaaaaagggcatcccccgctctccgagtcgtgaaacgaaccggctgagcgccgccatgcaaccagtcagcttttggacatctttctgggagctcggcggtttcatgttgagaatgtcgttgattttctctgggttggcctgtatgcctctatgagacaccatgaatccaagcagcttccctgacggtactccgaagatgcacttttcagggtttagtttcatcttgaaagcgcggatgctagcaaaggtttcttctaaatccgcaatcagatcatccttctgcttggtcttgacgactacatcatcaacgtaagcttcaacattgaggccgatctgagttgaaaaacatctctgaatcatgcgttgataggtggctcccgcgtttttcaatccaaagggcatggtgatgtagcagtaggccccaaaaggcgtaataaatggggtcttcaagcaattggattcttttagtcgaaaaaactgagtagcaatccaaaaaactgagtagctcgcagccggccgttgagtcaactacctggtcaatgcgaggtaacccaaaaggatctttgggacaagacttgttgaggtcggtataatcgacacacatgcgccattgccccgtctttttccgaaccaggactaggttagccagccagtcgggatgaaggacttctttaatgaagcccgctgctaacagcttggtcaattcctccttgatcgcatccttcctatcctgtgcaaaacggcggagtcgttgcttgatgggtttaacgtcttccttaacgtgtaaagagtgctcattcacctctctaggaataccaggcatatcagatggtttccacgcaaagatacctttattattttgaagaaaggtgatgagcgcgctttcctatttacaatctaactcagcgcctattacagcagtcttagttggatcagagggatctaaaggaatctttttggtcttggcatcgctttctccgctcttgggcatcttggttgcgggcacttctccttcgcctgctgtggacgcggccagtcggatttcttctcgggagagcgcgatctcatgggtctgggatatgacacgtgacggcttgtttgatgtcactccgaagggatatgactcctcgaggacccggcatcttcatcatcatgtaggtatagtgcggaacggccatgaacttggctagcgctggtcgaccaagtatggcatgatacgccgtctcgaaatcagcaacctcaaaacaaatgttttccgtgcggtagttctcccgagtgccaaaagtaaccggaagagtgatctggccgagtagtgtagcagatagttcttcacgagggatctgcatgtcgtccaaggtcttggcaaaaaggatgttgactgcgctgccaccatcgatgagggatctgcggagcttgacgttgcgaatcactgggtctagtaccagggggttccgccccgggtggaccactcggtcgggatgatccgagcggtcaaacttgattgtcgtttctgaccaccgaagatattggggcgtgttgggctggacagcattgatctctcgttcagtcaacttttgttttctcttggattcatatgccaggggtccgccaaagatgtggttgagttccttgcaatagtcctgaaaaccagtcgaggcatcatcttcgtcatccttcttctttgacgtactttgatctccgtcaatacttttgtgtgtattctcggcatactgctctgcaaattgtttgtagacgaagcaatctttggctacgtgattagaatttggatggtgcggacattgggagttcatgatcttatcgaaggtgttgatgcgcgaacgttgtcgggaggatggtgcagtagttgccacgagttcctcgggcttacgcttgcggtccttgtgactggtacttccactccctccagtagtcggcgtatctttcttcggcttccaggtggtgcccgactgcttggacgcagaaatagcatcttcggctttggcatactcaatagctttttcaaacatctgcttgactgtcctcggaggcttatgcccgaacttgccgactaggtcttcgtggcgaatgcccttggtgaaggcggcgatgatgacgtcatcggtgatgtcggagatcttattgcgctgttcagagaaacgtcggatgtaatctcacagggattctctagacttctggacaacgttgtagagatcaaactgggtactagggcattcgaaggtgccctggaaattggcgatgaagtgttcgcgaagttccgcccaagatccaattgtgccacgcggtaacccgtggagccaggaccgggcggaatctgctagggccacaggcagataattcgccatggctttgctatctcctcctgctgcacggattgcgagcccgtagacggtgagccaagactccaggttagtggtgccgtcatacttctcgattccagtcggtttgaagccggctggccaatccactcaacgcaggtcggctgtgaaggcagcaactccatccgcatcatcgtcgtagcggtctggtgaacggtagggagcatagcctcttgccgcacggcgctggttgatagttttgcgaagatcgatggggtgcctgtgaggtcgttcgactcggcgctacctgtgtcgttcgggaggtgagtggacggatcgctcatcgtgacccctgtccctacgactggatcctgcaccggcgatgctgaggcttggttggtgataatcttgagatcgaagagcgggaactcagctaccagtcggcgtgcgagtgcttgtggagttagccgggactgaggcggcgatcatggtcttcgtctgattcaagatgttgacgacgtgatcagcctgattgagcgcatcttcctagaggagggtgtcgaggagggtgattgctacaaccgcgttttgctggggcgtgcggaaaaccgctgtcccatcgacgtcttgctgtccgatgagatcacgtgctcgtcgcccagattccaaggcgcgctgtcgtcgatcctcagcctcctttgcagcccgttcacgatcttgttgttcacgctgtagtcattcttgctcttgtcgttgttgttcttcctccagtcggcgacgttcagcttcttgtcgggtgcgctcttcttctgcttctcgggctcggcgctattctgccgtctcattgtcagccatgaatacgccaaagaaaaggggtgtgtagtcgtcctcgtagctgtcgtcaaagtcgtcgaagtcaccgtagtcgtagtgatagccaaagtcgtcgtactcgaggatctccgttggtcgggaactgacaccgggggagctgaggtagccatccaattcttccgtcaagactgtcccgaggggttggagtatgacgccgacctccctagagctagattggatctgtgccgaagccggaccccgtctaggtcttcgggttggagacgccttggtcgtgaagacagcagctagatcatcggggagtctcatcaggattgggggataggacccatcatcttgatctggtcgtgttgaagtagattggatctcgtccgagtggtttggagccaacttgggagagatgatcttggggtagacctcggctgagttcgggataccgaacggagcggagatccgacctcttcccgactggtttgaatccgagtcgaggagagaaatcttgccaaagtcgttggtgatgaagtcgaggctgccgaatcggaacacctgcccgggagggaagacgaagtcgtcgatgccggagacagaacccatcgtactagtcggcgaagaacttgacgctacccctacctggtgcaccaactgtcgaaacaagatttcggcaatactaaaagggggtggctatcaagctggaatagtagatgagtttggagacaaggaattttatataggttcaggccttcttattcaagaagtaataccctactcctgtccggggattgatccgctgagtctgttattgaacgtatgatctgggagaaaaatcatgtcccaaagggacccggacccctccttatataaaggaaggggtccgtattacaaaatacagtccatatccctaacggaatatgagattacagataaaatacaatcgtaaccgactaggatcctgggtatttcctcgacatacaagtttagaaaccaacccgagtcctcatacagatattctatctaaatttggtaccctgtacccagctagattatacctgccgtgtagatatggggtatccataatctccacacatatatatctcctcacatggcgctacttcacaaggctgataggattctgtgttctttgcagccgttgtagtcatagcgatggtcatgtcatcttctcgtgcatatgatagtatgatattgtatgcccacctttatttctattttacaatatttactttttacgaaatttaaaataccatatcagttttattgtgttaaacttgttcaagactgttttgtttttgcgcgaagaaaatgccacatatatagtataacaaaccgcagctctaaggcggcaaaaggccaaaagctaaccacattttggttatgctattccctcgcaacaacctcgtttattagctaggctctattgatgtttaaggctctgttcaaatagaaggattgcctgatcttatcaaataggcatgcaaaacaagatgagtgattagtgtattggtaattaagtatactactataaacttggagaacgggtttatttgattttttttagagaaacttcaatactgtaaatgctggtaaaaagacacaccgtttagcatgtagtttcaaggaaatgtgcccactgtaaacgaagaagttgctctccctaaaggcagaaccgatcgtaacctcaatcttacacaaagtttgatggaggcggatttgagaggcaaatgaaaagtaatatgaaggcagtatatatatgcagctggtcttatacaaattactcgcacaatttcatatttaatttctctcgtatttatacaagcatataaacattttgtttcatttggatatgcgtacaaatacagactagatctgaccttacactgcattctggaatcatgcgtgcagcaaattgctatccgttgaaaccatgcacgctttcgaaatgcgaagagttctgcaagagcatcaatttcaagagcatcgctgccgacatgcaacattactataccaggcccggactatgacacatgctgctgctatacattgcacgacagcaaccatgcacgccaattgatgctgtccagttgaccttggtttttacttgctataattcacagtgacaagacgtgatctactcaagaaacagcctataatgcacgccaattcacagtagcatcctaatactgtcagggaacccaaggatcgtgaggatcccggacgaacacctcacactcacacactgtagcgatccggcaaagacgcaaaacagaggaataagaggatttttgtgcagcgtaaccaactgctgcttttctgatcttgctccatatatagaaacggaaattgcaactgaaaaaacaacaaccaacaccgcttctcacgccggcaatttgctgcgtccatccccgtccttgcctccgtgcagctgctgccggcttccctcgtcgcctcctcgccggccccggtcgtcatcgtcgtcgtcctctcgtcgttcccggtcgtcgtggcgctcgtccctccgttgagccgttctcgtccatcgtccgcgtccgtcaagcgagccgcggcagccccgtcatcatcttcgtcctcggctccgcgtcgtcaagcgttgcgccggccgcgtctcgccttcgtccaaggatcgccgccgaagtcgtctcctcgccgttcgtccgtcgttctcggccgcctctgccgcgcccgttcgtcattgtcgttcccacgcctcgtcgcgtggtggtaaggatccgtcctctcgctgccccatcctcgtcctttcggtgtcgccccgtacccgttgtgcggttgtcgaccccggtacccgtgtaccggtgtcggtagtcgttcgcttgtgcgtgtggtgaccatgttagtgtgcccgctcggtagccacgtggtttccacgtgtgcagcccgtgtggtgtctagtggagtccgtttgtcggccactcgcctcggttgacacacgggatctgtttctgtcgacccgtggaccgtctctgtgtacccggtccaccgtggtcccttaggttgacatgtggagttcgcatgtcaacagtgcagccttcctgtcttttccaggctagcgcttacacatgttttatagttgcaaagcttaattataataatccgcaaatcttcatataacagcattaaacttcggatgatcatatcttgatcatacgaaccccgaatcgacccgttcaagtctcctaatgtttgttaaaacctaaagaaccgtgtgctttctttttatgtattgttattgcttctttataggcttgtagctttgcttgtgtgcttcgcgtagcttctgtcgttccggaggttcccaaagcgtggttcgcggtcgtcgccgaaggttcggaaggccgttctctctgagcaaggcaagtcacatcatctttgaacatattggatcccagtttgtgaaattattttgatttaaattaatgcattatcgctttatttaaattcccgcattatcactgttttatttagccatgcctatttacctttgttatgaccttattattattgctattgttattattaccttgttcaccctagaataaacaaaaccccaactagtgggtactctatttatggttccactagtatgaatttaggtagatgcttcgctgattaattatgcaacattaggtggttttataactttagactttgggaattctcatatcattaggacagtatggaatggctggcttatgttggaattggacacacacctccccctcttttcaaaacccctaaaacggttttaggctgggcacaaggtgcgtggttgggttttgttagtcgtacctcgggtactataaggattaagctcgggcctctcttgcaaagcactaccgtacttccacatgtctagtgggtaaggcttagtttgtggctcagtctggttataaacaaaggtacacggatggagatggacgaagtcaggggtcgatggacatctctaggacaaatgaaggctacacgagctgcggcccggtagtcgagatgtcatggcacagggctggtgtcctgctgctaggggctcaatcctgcctacctgtcccggaggttccggccgtaggtggggttgggacggtactcttgtatatggctaggatgggttggaaactatgtcatgtcttccgtccgtatgccgtggtggtatgtggcacgtggttacacgtgaggaagacgtgtcttgtgggtaaagatgtacacctctgatcagagtataatctattcgaatagccgcgccctcggttatgggcaagcctagcaatgtacccaagttagtgttttaaattcttaaaacctgcttaacaactaaaatgtggaatggttggcctgggttggcttgggactagctgggacccagggtcgggttgccagttcggtctgaatcatcgtaggccttgggttaaggcaggttcgtgtgggttcacggccttgattaataatactgtatagcactaggatcatctttataaaatggctttgggcaactaagtgacttttaaatgctgtttactgcaaaacttaacccctatattattatccccttgtactcccttgcattaattatgcatctccggtgtgacttgctgagtactgtggttgtactcattcttgctcaatctttcccccttcagtaagagaagctttggagaagatgtcttaggtggagtcctggcttataccccagttgagcgcttgtgaagatggagccgtaggcccgctagtccgctgctgtttatttttgtttgtcaagcctgaagtgcctctgtaataatgtaaatattatcgatataataaagatgtgcgttttgtatcatgtttatttggtgtaccccggcttttccttggacagggattaatacactagcgtttgggaaaaggcaattttctcggtcgcgaaattagggcacattattgtgattgaaggagtggcaactgatccagccaaaattcaggcagtccagcaatggtcaccaccaaagactcagaggcaactacgaggatttctgggacttgctgggtactacagaaagttcatacaacactatggcatattggcaaaacctcgtactgaattattgaagaaagatgtgccatacaagtggactaaagttgaacaacaggcttttgacatgatcaaacagaaattggttcaagctccagttctggcattaccagacttttctaaagaatttgtggttgagacagatgctagtggtgtaggcattggggcagtcctgatgcaaggtgggcatccactagctttcattagtaaggctctcagtcccagatctcaagctatgtcaacttatgaaaaagaatgtatggttgttttgttggcagtagataagtggaggcagtatttgcaacatgcgccctttgtcattcacactgatcacaagagtttgatccatctgaatgagcaacggctgacaccaagtattcaacacaaagcttttatcaaattgatgggtttacaatacaagatcagatacaagaaaggggaagacgatagggttgctgatgatctgtcttggaaagatgagcagcaagaaatctatgcaatttcaacaagtcagcctaaatggttggagatggttgtggaaagttatcacaaagatccagccactatgcagctgatgcagaaactagctcttcagcctgagggcatggatgattttgctttggtggatggggtgattaggtttaagggaaaattttggctaggcaactatcatgaggccaaacaggcagtattgttatcattgcacagtagtgggattggaggtcactctggcatacaggctacctacaaaaggatcaagcacctgttcatgtggccaaaaatgaagaaatatgtcattgagtatgtgcaaacctgatcaatctgccagcaggctaaaactgaacattgcaagacaccaggtacacttcaaccactacctgttcccttgcaggcttgccacacagttagcatggactttgtggaaggcttgcccaaatctggaggatatgatactatacttgttgtggtagataaattcaccaagtttgccaagtttatccctttgactcacccatttacagctctcacagtagcaaaagctttcattcaccatatttacgatgtgtttggaatgcctcaagttataatttcagatagagatagagtgttcaccggtgcactttggcaggagctattttggttggccgatgtgaagctgaacatgagttcatcctatcacccccaaacagatgggcaaacagagagacttaaccagtgtttggagtcatatctgaggtgtacaattcatgcttgtcccacaaaatgggcagactggttagtccaggctcagcattggtataatacatcttccacagtgctttgggcaaatctccatatgaagtaatgtttgccaagcaaccaaatcagtttggtctagtgaatcttggagaaagcacagtacctggtatccaagtttggcttcaaaacagagtccatctcaatgacatcctccaacagcaacttctaagagcacagcaacgaatgaaagcacaagcagataaacatcgctcagagcgtcagtttgaagttggtgatatggtctttttgaaacttcagccctatgttcagatgtcagtagctcgacactcttgtcagaaactctgttttcgatattttggaccatacaaggtgctggctcgagttggtgcagtggcatatagattggaattacccacgggcagtgcagttcatcctgttgtgcatgtgtcgttgctgaagaaggtgctgaaacccaacatacctgtaagtaatgatttacccttaaattgctttgataatcctgatactgtccaacctgaagcagttctacggagacaattgattaaacgtggcaagttagctgttccatatggtttggtgcaattgtcggggcttcctgcttctctggcgacttgggaaaatcttcgtcaacttcaagcacgttttccgtcatcaccagcttggggacaagctgatacttaaggaggggagaaatgtcgtgatccttaagtctattagatacttcgtcggtgattctttgaattgggttgtattctgtgatgggccgtagatgggccggttgcgtgtatgtgtatcgatatgccgtgctggttcggcggtggcatcggacacatgtgcgttgtgcggccatttatatggcgagctgagctgtaaagcatttatcaaataagaaaaactcaaaccaacaacctctcatcgtatacctctgttctgctctactcctcctctcgttcctcaatcgcgaacctgattccccttcaatctccgagcgtttcgccggaatccgagagttcgtgacactgctgtagtgctgcaccaccctccccaatgaccgggtgaccggcttctcttctctatacacagcgcgcaatctgacctgtacatccatcctctcagtctcaatggggtaatccaggtgaggtggcgacgaggccccagctcttgcccctttgccgcccgctgccggatttgagcagattaggcacttacttcctttctcccgaatgatagattcagcacaagcgccaatctatcattcgccggccaatgctaatcgggttatcagatttattggaacttaattgtactactacctccgtttcaagttataaaactttcagattcattaacatatatatgaatgtgagcaatgctagaaagtcttataacctgaaacggaggaagtaatttataatgcatttgtagcacctattctcaagttaagcagatagggtgcactagtgccatagtagttccttcctgttcccacaatgccacagaacaattgatggtttatttggaaatcccatggcatttctaaacaactgatggttgcagaagtgagcactactttgtgctaatgggattaaaaacttattaatagttaataataggcttagtcagtatacaccctagttgacatctaaccactgctattctattccattttgaaaagacaacaaccgtggtgtctgctcccgtgactgccaggctgacttgtgggcccacattgtcggtgagagggggagcgtctccggccgcgcacgtgtggggcagagaggtggtgggatacacgcggtctgcaaggatggaggagggtgcgccggatctgcccctcccgtcgccgacgccggaggatcctcacggttgtatgctgtcgtcgtcgcccgagctcactgccgccctcgtcgacgagccgctgccgccgctctcgcctcgcccactgctcgagcctgtcgcaccgtcgcgaggagtggtagagggagaacgaggagacaggggaggagcaggagagcgatggtgagctcctggtcgccgagcgggcgccggatctgccccacccatggccatcactgatggatccatgcgcatggggggcggacaggcggcgggatccgtcgatgagaggggggacagagaagggcaggagcaccagccactcgaactgctcaaagacggcgcgcctgattggtcagagttgtgtctttgatattatttttctttattcttcctccgattatgtgaacttctcgtataaattatattttaccaagtacaagtaaaaatagattattcttaaataaatatgcatgcaagcattgctagttttctcttattttcggatatactgacggtcgaaattggtctgtaacgaccgtcaacaataagctaaggttataatccaccctagtattgttgtgctcaagccccaagaggccctttagttctaaagcagagaacataatccgcagtcagctagttctgccgtagatcgtcttggttttctatgtttattgactgtggcattctcttcttctggcacgattagctagattgtattactatcatgaggaatgtgatagtgccatctgagaatgagaaagcttgaacaaggttaagcgggttgtttaatcaataggacgccatgagcaaggcaagtcagtatatgcttccctccttgagcatgtgtatccctttttaataaatgtgttgattgcaaataaaattgcatgttacttacaaaatgtgtacccaaaacttgattataagccaccttgaaagtgttaaccaaactccttgttgcgttcgtcttatattatgcattggtcaattaatgatatggcttagcaatgatagtttagactttcgtatactccatgcttgaaatatggatgtgaacacaatgattactctcggatgggtgattatcggaaagtggattgcgtgggtgattatcagaaagcggatggagacatgggcaccaaccgatgtttcaaaacctttgggaaaccaaacacttaatcaaatgatttgttttctactagggtggcacagatggaatttggatggctctacgaaatggctagtcaccgaccttggtcagtcaaggactgacttctaagctatgcagtaaacaaatagagtacaattgtatttcttgaatgggtatagacccagtggattcagtaatccgagtggggcgacatcccatacatggttggttctgtactcaaattgttgtgacgttgcatccaagtgtcgtagtgatatcaatgtcaaacctaaaatgcaccatagttatatataaaactaggtgaaaccccgcacgttgttgcgggagcttggtatgataataataaattgaaataatgtgtaagatagctagacgacagaaacttgcataatttgatgtggtttatcataatttaaatagtatatagaatgatgatccaaatgtaaaattaacgtgatgtgactttatgagagaagaaaatgagggagatcattccaatgatagattaatcatttgagagctagaaacaattgagatgatatagcttaatgagataagagagaaataacattaactaattaagtgaggatgaattgtgtaggtatatagatattatacaaaatgatggagagatatattgaaatattttgataattacatggaatgatgatttaatatgcttggattttaaaagctctaaaatttaagtgaggatgaactatatatgcatataggatattataagaagtgatggaaagatatattgaaatattatgtgaattatgtaggatgataatttaattaacatgcttgtattttaaagctctaaaacttaataaattagcatgcttgcatgaggtttgagatgtaataattgttagtggatgtgatagctttgcatgttaagtttagtgggccttaactttatagaaagataggatgtaaccatctggatgcccgggtttgaggtctcctctcaccgctagctcgagttagggatgggcacttggagtgcatgagggttatagtgtcatgcgttgggtgcattactgactgtgagtaaatcatacatccactatgtgaataaaacaaatctatcgaattgcggtgctcgcgattaaagaatctccgagacttgtaatactcctgaccagccttagatattttaaacttgtttacattaggatttggaagctatgtggcctatccactctttgcatgcgggaaggttggcattggtgatgatatatggtaagttggatacgagggtaaaacgaacctagagaagcttgggaaggtgaatggagctctcgttgatggttaacaacttgaacttaacgttgttttcagttaaaacaactaagtcatagatttatgaattaatttgcgaaaattagctttatgcaaaaaaaaaaaaactaagccatccttgaatcccagtatacactgatacatcttgtagtgttgtcttgatgagtacgtttgtactcactgttgctcgtttacatttttagcattggagcaggttagaagcgaagaccttgctagcatgctcgcttgcttagtgggatgatcggagtggtagttgatactaagtcatgatcccaatcaacggtttgtgagcatgttgcctgggtctagcattaatctggatttccattgttgtttatgtgataggatgtggcattattagccttattaaaggtattaaactcttttagtttaattttattttgttatatgtttcttactggttacacttgtttttaccacctaataattgagggattgatatagggaaacttaataggtttccagtttcctaaactgggggataacaaggcctagcatgaaaaaatccgccaatgggcaccattaggccgcatttagatccttgtcctcttaccaccacttgaaactccttgtttgcctcacgctaccaccataggggtgtcgtaggctctccggaccttccattacaattgagacatgaagtgaataattcaagtcatcaaacaagtataatgaaatatcaaacgtctcgagagaggaatatcggagacattgctgggcctttagtctgccagctaacttcagtctgagatgtgcccgtcaaactactcgaaggcggcgacaagatgtgttacacattcaggagacttgacaaaaatggctaaagatctacaacatctcatatgtttttaactcatactcatgtgaatctagctcctaagatatgcactagattcacactttcatcttaaggatggttacacatagcaaacacaataagatgagagcaattaaaatttacaactaatttagagatacataggccgatcggccaaataaatattagataacagcggaagcttgactacccaatcacaagcacaccgactaggggtttaccccattaagttctcattctagaagaagcaatcagaacccacatcactcaaagactaagtctaaacctgcaaacaaaaggttatatcaacagcaagaacccacatcactcaaagactaagtctaaacctgcaaacaaaaggttatatcaacagcaagagtcagtacattaaacaagttaatgtactggcaagcacaagtcaatcataacatactacatgtaaatgtaaggcatatattcaaaggaaggcaatatgtagttcaatttcaccataaagcaagttttattttcgcaaatcctttgtaaaggagttgatgcttcaattaacaaagataagtttttaagtttgtaacatttagttcatcataattccatcatagtcaatctcttgatgtcatccttgacaacaagtcataatatatcatcacacttacacaactcaacacattttatcaatttcaaaccaagtcacatgttcacatttttaaaacatagtctatactcatgacacttcaccaaagcgctcatgaccatgagaacggctaatcgattagtttaaagaactcctgcagagtttgtacgggtttacccacataatgtgatagaagcccggaggctacactctagttggttcagtgccggccaagcaccccacactctacattatgagtgcggactagaggtcacaatgaagcctttacactacttagaatctagccttgcaccagcacgatatgtgttcatcctaggcatacttggaaatatgtctagaaccgttaagtggcgggcccacgccttaaacttaaggccgtggtggcggacacgacaggaacccaccacgtggcacaataccgttgtattggacagacttagtcacctaaactaccacatcggggtaaataggaagttcctctgaatcatcgactaattccttagaattatcgactaactaatacacaccggccaaacagaatgcaaggctagtcctaaatagattaattagcttaggccatcccatactagcacatgtggatgtacgaataactttaagttggtgacacaagttcggtccttacggacttgagcaaacactcccccctatcggtatgcaactaacaccatatgcacaccacttgccgcccaagtctaaaatcacattttacacattttagtccacaaatacccatcacattcattttattccagaaaaggttcatgtgtcaaaatcatattttaatcataggtggaatgagcatttgcatatttctaagcatggttaagcaagtagttgcatatagagcatatataaacccatttgagcacaaaagagtgtactctaaccatttctaggggttcaagcagcaaggatcacaattattcaaggtaaggaatgcaacaaataggtaataactaccttatcccaattttaaataccgatatagtctaagttcatatgcatctttgcaaacaaatattttcatttatcaaatcatgggattcaatgtgttcaaaggatgtgaggagaaaacttgccttaatactaagaaatgttagcgcctaatccactccttcaccgattatgcaatgacctaaataaaggacacgctatgcaattaaacaccgaaataggtaaaaatccaaaatgctctaaaatgcatgatttgtacacagtgtgttggtactggtttaaaatgaatttaggtgaaagaatttctattttatcactttttatttgggagttatgaattttagaaattatgtcggtatataatagtataggtttaggcaatgctaccaagtatttttgcaaagtggtatttattagattagacttctcaggggtgtagagatgtgttttataatactaacacatttggtttcacaatttttagagttattatgaattctttatgcattttacaggttataacatgttataggtgtatagtgtcctacatgcacatgcctttggtatttgaggttcagaatttattctacttttgttgcgatgaatgaagcaaataattttgttaattaatctatccttagttcacaagtttagggcctttattattttagttcatattttataatatagaggggttctatatggatgactttataaatatcaacctaggaattatcatttgagctaagttcctctaagttttggtgaatggggatggaactatggcctcactggtctatcaagttttatttaggtttatttagagctaagtgcatatatacttatacatatctatgtattaccttaacaacactatgtgtttaaattcttatttcactaagttaagattttgagctatgttctctacaaaaggtgtcaagttttattttactatattgaagctcactattttctggttctatagaaactttcttcattccaattggactaaaaatgaattttctacaaattttacaaattaaaggctgctctatgttggttattccttacataaatatttagaggcttttattataaaaaaatatatatttttattttaccaattggaaatacatgttttggtgatcctacagaacttaagtttactcaaattaaagctaagttgaattttgtatgaatttataaagtttagcttatctaaaactagtcattttaaagataatagttttagaggcatttgatacaaagcaagtgattacttttatttcagctaaccagagagtgcatgatgatgaatttgtagaatttgagtttgtcccaaaacaagttaaattaaattttctatgcattttataagtttgtgtatgtgttacgtatgctttaccttagacaaatttttgagacaaagtttgaacagtgagtgtcaagttttatatttctaaattaaatttcataactttgtgaatctatagcgactggaatcatctcaaaatgagttatatttgattttatatgaattttcaactttgagtgtttttctgttgaaaatataatgttttaagtgtttttcttttatattctcagattttagaagggatgggtccacctgttagtgagagatcaatatgcaaaaaggcctctagggttccagagattagatcgtgaggtccctagaacgtgttttaaccaaatttattaggaatcctcgagttttacagtttttactaatagattcttggtcccacatgtcaatctaacatattttacattttaaaccttacatgttttaaaatatctaaacgagatccctagcgcctaatgacgtggggcccattcgtcagcgagtcagcgcctgggagagacagggcagacagagcagcggcggcttggcgagctcctcgcctgcgccggcgatgaacggcggccgatctcgtgatgtgaccaaaagagaagattttcctaagcttcttgcgcatctatccgtggttgtctcaaggttagaggtggtcggaatcaatggtgacggcggtgcgagcggcggtggttctcggggtggtggtgcatgtgtgcatggaggtcgtttagaagcgaatgcaaagcatgcatgaggtcttcaagactacagggtgctcaccgtgggtcaagctagggttgtcgaggtcttggcagcagcgtcgacttgcggaacggctcggcgacggcgctcctcctcaggtgaacggcgatggctcgaacggtacgacgagctgctaaaagtaggcatgcacgagggctgtgaggtcatagagatggtgtctgcgcgaggaatcgaacaatggctcaccggagcggcaggaatcgaagatcgacgttggcggccggagttggggaagaaatcggtgatctcagtgtacaggctcctggggtcgagccgatgacgatggcgcagcggcttgctccgggatggactagggtggtcgggcgacgatgatgccgaagcggcggcgttccgaagctcccgtgggcacggtcgcgttccggcgtcaccactgcatgtcaagaggagagattaggtggaatggatatggcattgataggaggtttcagatcgggaaaggagtcgagacgaccgcggcacgatggcgatggcgacggtcgtcgtctccacggccgccggcgagaatgaggatgacagagaggcagagggcctttctccctcggcttcttcggctctagagtgttgaatggtgaagggcgactgagttggcggagttgaaggtgaaactcggcgtcggcacgtcagctccacgcgtcgagcactccctccgccaacgatctctctctctctctcgtctgttcaatcggctggagcggtggagaagtggtttgacagagctagagctagctctagtggctgtcaggtggggcaaggacgaagtatactagtaggtggaagggagaggtgtgggtaaatacatgggtaaacttgattttggatgaattttcggaattattttctcctctaactttgtagcttcatagcttaatgtgtggatcagattaagtagtgttgattttactggaagtagatgtttatacttagttgccattttttttggttgcacttaaaaattatggatagattgatcacagaaattaaacaaagatcggttatctaagagctagattgaattttgaggaggcttaaacagaggaataaaattctagaaaaattatattgagatatgataaataatatagtatttatataaattatttacctcatatacttttatgcattttaattcacttttgggtgaagtatggttttagccaataaaggattttaattagtctactatgtgactgttttgattaatttatttgaggtatcaacttgagtgttaatatctgaccaaaattacagtgaatagtttgtgctaatcattgtctacataaattttcccatgattttatcttgtacaaaatattttagagaattaggatgaccttttctttgtatatgagttccctcttcataattgcatctaatattattataggaattactttaaacttctttcgaactgagaagatgatatttgagtaaatattatgtccacatattatcacccaagattaactataagtttatttagtaatttaacccttttaagttatgctcatgggacctattgtaaaatgcgagaccaaaatccaaatgcacaagggactcgagtcaaggcatgcattatgcacatgtatgctcatttgcttggtggaatttatggtctaatgttaggaatgaaaaggttttattttgttgtcaaattttatttatgcaatggtttagattggtctcacctaagttaaaacggaaatttttggctctcaaaattgtaaaagtttgcctatatctattttgtctagaaatttttaagtcctaaaatttcgggtatgttacaaggggggagctcatcggcggttatgaatgaggctaaagtatgagacagagagagatagagagagagagagggggggaatgagaacggatttgaggatggtagacgaggtgagacggtaacatgtggttgtggtgattgctatggccaccttatcttttccagcacacaggtgacaccgccatcttcaatgttggccaagaggcagcgtccgcatcatcgtcatcaccatcgcaatcctcattgatcttcataggtgagttcgggggggggggggggggggagg

SEQ ID NO: 27777 - DNA, 7721 bp, Oryza sativa
tggtgggggaggggggcgcaatggcgtgaggtcgaagtcatcgtggtgcgacagatgcacgcatgctcactgctgccacggtttcgtcgttgacctctagcttcactaggcccccatgctatcctagagtgctaccgcctcgtcaaggtttgcctccacctagatttgactccgcaatttgcttctctcttatggcagcgccaactcacagaggctggagccgcaagggaagctcgtggaggacgcttgatggtaagcggttgaacttgtacgtgtaggacctgggggcatggttgtgcaactggcggtgaggtgggctcatggccaatggaggggaaggccacacaagaggaggcgagagaagagagagtatagaggaaaagagagtgtagagtttctggtatgacagtaaattgaacttttgtggtagttgagggggaaaaatattcaaacttaacccttttaacaatgagtagatttgcattggtcgttactgccagattttgttttaaagtagaagagataaagacgtacttatccttggatggtctgcgacttaattaggactctccaaacaagcaccaaaggggatattattcaaatgttgcatctgcacacatttatcgccttaccctagtggcctaatccacttctgctaccacaactatccattcatctaaaaaccaaattagaaaaaataaatacattctgacagaaaaggaatatatccaactaatgaatgacagttggaagataaataaaacgataattgagtagaaaattcttttagaaaacaattgagtagatagaatattaataactacccaatttggttcagccttctaactctatataaacacgcccacaaaggcatatgtttcaacccccacaccaaaacataataaggtttgctttggcctttgcatcattatatatatctcctcccatggcgcatctcaagaaggatgctagggttctcttacttacagccattgcagtcatggcgatgatcttctcaccttgtaacgcagaaggtacaataatctattctcttcagatttctatcttgcactaatttctaataatacacaaaactgtaaatactacaaacatcttatattcaaacacaatgatactcaatttaaaaataatggagtctttttatgcaccattaatttatttcttatatctatgtataaaacgtactccaacacttatttatcctatttacaggcataaaattttgtttcagcctatgcatgcatttatacgcaaatatataacatactgatttagtggcattactacacgtaactactcggtgtactgagcacctctaggtgttttaggtcacattaatcgtaataatatattacataaaaatttagaggatccctgtaagttttgttgtggattcgtcactgctgatgctattgatattacagttgcagacaagtgctacaccgtatatagatgcactcttccagcatgcaacgactactgcatcaagctgggtgtacataacccacaagtgacatgcaagctcagcttcccaccctccgactactatgacacgtgctgctgcggcacgtgggacgacaaaagcgtgggcgcacgccgtctgctgtcccgttgacattataaactagccgtgcccccccgcgcgatgcgcgggcatcatccaagatctttaatcataaaagaaaaaaaaagcatgattgaaaacaacatagcttgcaacagtgctatacaacaacaactcgatcagaaaaagaatatcacgatagaatatcacgatgttctaaattttgattgatgtaatcgtaccataatttttttataatcaatgttacactaacaatgggtatctcggtgcatagtacaattacaacaacgtgagtaaaataaacaacatttgtatttcaatacctagctgtacccaggaagaccaatggggcgatgattaattggaaggatagtcaatcaaaactgtgtcagcacatcacaggtagtaattgcaacttatattgtacatattttacaatctatactaagacggccatgaaaaaaaaacaaatagaaatcaaggtttacttctccatgatccagaacctatgaatttgtagccagttctgcagatatgagagttcaatattcttgccagcttgtcaataattagcatcaatctactttagccaccaataaaagaaaaagggaagtagatccaccttttaaccttgatgaagagcatcaatatgttcttagtacatgatatataaaataatgaacaccatgcatatcccacgtaactgttaaaaatatattttcaacggaatgaaacagtttctaattttgtaaatcatgttgagtaatatgtagcatcagtatatatataatagcttgaaattacctggctggtggtcgtagaagaatcaatgaaaacgtgtatcaaaccataaatccatgatttacaaaatatggaacaaaccattaaaatgctatcacaatatttggttatcctgttagttaaggtccaatgcttgcctcttattgtgctctttgcaatcccagagaacgaaaatggctagtgagaaactgccaaatatatatatatacatagacacatacaaaaatatatgctatagtttaactgaataacagtttatgcatactacttggtgcaataaaaaatagagtagggaatgatgtttaccagtacaattaaatgatgatcatgtatacggagataaagattagacaacaaataagaattcccaaggaactactaaaataactgaaataataccaggaaataacaggtagaggaacaccaaagagcaattgccatgcagctggaacctacaagccttgaacctgaagtatgaataaaaggagaagaattagcaaatgaagcctcccatgtgaagcaagagcatttttgtgagaaaaataaatgaaatgaaatatgcagtgtgttgttgtgtacgctagaaatgttgatatagcatgatgggcatatgaatctaggtatttaagaaaaaggaaaatcacactgcacatatttgctctagtaataaactgagctgctcatagaggcacggggccatatgtaccaaaacaaagttgcttatgtgaggcaaggacgtagaatatgcatgtaattaagcgtatggcaagattatatgaaaaatagtttgtaggcgatacaatacagcaggaagaaagtgaatttgacaaaccttagtggagataggactgaacatgtaaacacaaacagaatgggacctgtggaaaacatatatgaatatattgtctgcagcttatagctagcacactaacctgaagctggagagtccggcaaaggctcctttcgtttatgctgtgatgtagttgtcgatggcccagaagagcatgacatcgtgtgaaagctcaatgaagagtgacaaggccttgctgaaacaataataatccaatgcaatatagctttagtacacatatacacaggatacaatatatctaaaggaaagtatatacatatgcaatatttggctagaagcactaacagattgataaattaagcggcagtaaatatactctcatagccgacgaaatagagcataagacaataagacaatgataaaattgattgaatatttacgaataggctggccatggtagggagctattttagcagcaaaacatgaaagaagcaagtatggtgccaataccttgatgtccccccaatgtacagcagctgtaacctctgccattgctggcttttaagacctctggtctagcatgcagtaacccataatgcaaatagctgtaaagaaatgtatatataagtggtccaatggctaaaaattttaaataggtaatgtgattcattttctacagctaacaaccaaaaaaaaagtaatagagtataaactgatcgttctatgtgagattaagagtttgctgtagaacacttcatagacattcgcgtgatatagagtatgccttgggaatggagagcacaaattataggccgaccatgaacaaaggaacatgtattagatctcagatatgaactgagtgctacctgcaagcaaagctcctgaatgagactcacaaagcaacgccaggttcaagttgtttggggacacacattatgcaacattttcaataactccgggggtgaattgatgtcgcttttcgatatttctgcactgaaatcaggcaagacctgcaacaatgctttgccttcattgcttgcaaccaaagaagtggcaatagtcgaaatgatttttgaatcaagagctatattctttgttatcatttcacgaattaacttgagaacttgggtaaggggacagagaggcagatcgggatagtggtggtggcgccgtgcttcgtagccgccacagtcaccgagctccggcagcgacgggccaaaggaatgaatccgcaaaaggcggtgccggcggcgacggtcgggcgtcgcggagggagacggcgtggcggcgactgccgggcgccgcgtgaggaagacggcgcggcggcgacggccgggacccgcgggacgaagacggcgccgtccgggcgccgcgggacgaagacggcgccggccgggcgtcgcgggaggaaggcggcgctgcggcgtggcgggaggaagacagcgcggcggcggcggcgagaagaggaggatttggggatttttggcagggaggcagcgaggatgtctaggcggtggctggtgtggtgattgcgtggactaaatatagcgaggacggaggggatggagggatggagcgatgaccgtgtggacggctggatggaatcaccagctggacatctgacggcacatgcatggcgagggactgtagtactgtagcagcatttctctggcctgagatgaatcgcaacactgttggtagtgggtcacgaatgatatgattggttgcaatgatatatgttgatttgatatcgatcaagaggtgattataatttgtgataattcaaccattgtgattaataaattgtgatggaagcgcttgtgcttttcgtatgaaataaaacaagtcgcattgcatttttcttttaattccactaaaagttttcgatttttggtgttcctaccattcaccctccttcttgtaggcttagttattattgttcgatcctgcgtatctgtttatccataattaagttttacttcgtttggaaccttcgataaataaggtttttgtcatctactaaacttatgactctagtagtgtatacttggggtggtgtcagagtttggtttcgttggccctcacatatgcatgttgagactatgttctttttacatgtttagggcctccttagggtaataaactaacattctattttttgtgtttatatgtatatggatgtgtacaaagcacaagacatgtgaagcaaaagctctagtaaatatctaaccaactatcttgtcgggatccacttattggaaacttgtagcgagttgtcctgtggttgacgactcgacttctctgctctagttgtctggttttgtattgacatctgaataggctcaaccttctatcgtggtagcggtatagaaattggggaaaatgttatgatagaataagagcaatcatggtagggcttatgttggactaggtctcatatccttatcaaggacttattacttatttgttgtagacgtactctattcttgtttgagtattgtctctgcacataacaggtatgtggtattcctaccgaggtatgtccatgtctgtggggttatacattggtagtagttcctgaactgtattcaaataagaaccacttgttttcactttcactatctcaagaccaccatgagggttgtaggaggctcaccgagctttctatttgggctagcgaagtcagggcagctccagcagcaacaatggtgcgatggtcagaacaacatacccatgagatgggaggctacactatggctttctataggtgcaaggaagtccacataagatcaatacaacagatggaggagtaaattccctgtatgcacctcaaaactgactcaatcccttccatgccctccaattttgaccaatcccctgtgtgccctcgagattttgttgtgttccctcccatgtccctaccgttaggcatctgttagttctgttagtgcatacatccattacattgtgagaaaatcccctgtgtacccctaaaagttcacctaattccttctgtacccctgaatttttctcaatcccttacatactcctgaattttagtttggatcccttccatgccctttccgctagttgaccgttagttgaccgttaaattcttatgaaaaagtccattttgccctttggtataaagaagcatataaattaatagagtatattgttgaagtatagaaatttgttatatgagactattatgtttatgagatagttatgcaccatattatttgcgataaatgtacttttagatatgacataaaaaaattaatacttatttattagttattaaaagattttttttagcatatgtgttatgatagtaataaacaaatctgttgtattactatgaaaacacatatgctacataaaagaacttttaataactaataaataagtattaactttttatatcatatgtaaaagtaaatttgtcacaaataatatggtgcatcacatactcataaatataatagtctcatccaacaaatttttacattccaataatatgcttcattaatttattatgtttcttcatagcaaagggcaaaatggaccttttcaaaagaatttaacggtcaactagcggaaagggcatggaaggaatccaaactaaaattcaggggtatgtaagggattgagcaaaattcagggatatataagggattaggtgaactttcatgggtacataggggattttctcttacattgtcagtaatttcaaaaaagaccaaaatgcccagcaaaaccctaggtaacaaccagcaaggcagcaacagtgagaaatccccaaataatatccaatctcttgtctcccgtcgacgcaggcagcgctgtgcgccgccgccgtcctttcgcggccgtcgctgccgttctgtcacgccctgaagttcccctttccagctttaaaatttgtaaaataaatcgtctgaagaaattgttcaatttaacctagagctaattcctcaaattaataaatgcaaataataatcgaaatcgacatatggaatttttcttgggttctacatgtcaaaatatgctaacaggaattttagtggaattttcagagccttggaaataattttaaccaattaaaataagcaaagtgcaatattaaatccctgggaaaatcctttttcctttttatcttttcttttccctcctttttccttttcttgggccgccggcccatttcttcccgcgccggcccgctcctccctcccactcccaaagttcacccggcctccctctccctctcgggtgctgacaggtggggcccacctatcagccctttccctaacctctggctgcccacgcccgcaccaaccgccgccgaaaccaccgcccacgccgccacgtatcccgctgctcccgcgcccactccacgccccgcgcccacgtcgccgcgacgccgcccacgccctcgccttcccgcccgcgccgcgagcccaccaggggtggattcaaattttgaatcccctcccactctct

SEQ ID NO: 27778 - DNA, 2156 bp, Oryza sativa
  unsure (1)..(2156): unsure at all n locations
gacggtggcagcgcagcgagacgccgagccggcgaggacgaacgatgacgacgacgacgaacaccggtggagttcggtcgaaggggaggcgagtccgagggcgaccttgccgctgcgatgccggaggtggtggtggtgcacacgacggcgcacgggtggaggaagggccgaccggggaaattccggcgaggtggatggagaggccgacacagcacggcggtgttccggcgaaattaggggcgacgccgtggcctggccagggaagaggacggcgttccggtgccgggagaggtggtggcgacgtcggccgacgcgcaggagactcggcaaaggcggccggaggcggaacagtggcgacaacaccactgttgccagcgggggcgcacctccgggggtctccacgtgaaacggtgggcaggccgggggagaggaggctgctgcgacgccggggaaggcgacggcacggccagccggcgtgctgacgcgacggcaggggcggctggaggtcggccggcgccggagagagagaaggagaaggcggggagaggtggtgcgggcacgggaagacgtgggaggaggctaaaatgggagaacagaggatggggattccattttataggagaggagagggagccggccacgggagaggcggggaacggcggcggaatttgtgccggcagccatggaaggtggccggggttggcgcgtccgttcccggcggttgggggcacgaatcaagggggaaattgggagaaaatnnagaggaatcaatggggattaaaaccccccaattaatttcagaaaccatggtttgaatcgcgtggattttgaggagaattggcgctagggtttgcacgggagagaaaaaggaagaaggccgggcgggaggaggacgacgacccgggggtgggacccacgcggggcgcggtcagcgcgcgtgacgggcgcgtgcgcatgcgggaggagggcggctcgggcagggggcgcggcttgggccgggcggccggcccaggaggagaggagggagaggcggcccgggagagagagggaggaggagggagctgggccgaggggggaagggaagggcggcccaagagagagagggggaaggaaaaagagagggagaagatggagactttggccgcaggccaagggagagagagggaggactttgggccagacttggcccaaaggaggaaggaggatttatttttaggtttttctttttaataaactttgataattgttgttgttgcttaataaatatttccggtgctctgaaaattcaagtaaaatttgagggctcattttagaccaaggagaatttaacaaaaattcttcgggccacattcaaatttttcttgtacgtattttagtgtttgccaatttcttttcgaattttaattaattctattattccttttagaaaatgatttttattttgggatgaatttatcaggacgtgacacctaagtacttcaggtgtggttgagcaaaggagcacttactaattttaacaaagagttggtactgctggagccttgccaaaactgccttgagatgggacacatgttctgtcagattttgactatagatgagtatgtcattaacaaaaacaagaacaaacttcctgatcatgtcagcaaagattgtatccatcagcccttgaaaagtttgctggtgcatttgtaagaccaaatggcatcactttgaattcataaagaccctgatgtgtcgtaaaggttgttttgcattcatcctgctccagtagtcgaatttggtggtatccagatcttaaatccagcttagtaaaccattgcgatcctgccaattcatctagcaattcatccaccactggcatgggatacttgttcttggctgtaatgttgttgagggctctataatccacacaaaatctctaggtcccatcttttttcttcacaagcagaactggagaggcaaaggggcttacactgtgttgaattatgccttgttgcagcattgtcttgatttgtctttcaatctcatccttctgtgttggggcatacctataaggcttgatgttaactggttttgcatcaggtgtcaatggaatactgtggtcaaaatccctgtgggaggcaattctatgggttcctgaaaaacctgctgaaact

SEQ ID NO: 27779 - DNA, 17325 bp, Oryza sativa
tttcaccacacttgaaacactctcccctagctcttcttgcagctttcagagagtcaaacctctcttcccacttgggtttttcttccaacttcttaccctcttcaggaggtgcacccaaaatgcctttcccctgatatggagtcttgttgaaagtcttgtagctctcttaaatgtctgcttcgctggtgccttcttgttcatttcccccaaaagctcctcctgtgtttttgcaagagacaacgcagcatcaacagaacgaggcctgtgcagcttgattgctgccttaatttctgttttaagccctcccacaaattttgtaacaaagaaagtctcatcataccccttgttatacactagcaccttatgcataagctcttcaaacttgctgtaatactcttctacactacccatttggctatgaccatctagttcctcaaggtgttgctggtacctatccctccaaacttactatgcactgctacacacagttcataccagctttcaacactatgcatttcctcataagtctgcaaccacaaagcagcattccccgtgaagtgtaaggtggcaaaggctgaccaagtttcatagggcacatggtacatactaaagtatttctcgctattggttttccacaatttaggattattgttaacgaccaaatttggtaatatcagcatcggagatggagattagattgaagtggaatcgaagataagggttctcgcggaaacagagtaagaatcggctggagtccggattggctacgactgagatcggctaagtctgagtcagactgggttaagtgatacagccgattccgacaatatgactcgtatacgacatcgggtttgagttgatgtgcttcaagatgattgccgtacatggatagagtcctgagaaggcaattatatttattaattaggatattttatgtaaattccttagagataaatatgtgcaaaagtctgccgcaaagacttatggtatcttagagtttgttagagataatagttgtgtccgatatggacatatcttgtaattcttgggtataaatagaccccgaggcctatgtagtaatttacacacgcgttcaatacaatctcggtgcatcgccaccctttttacttttgttttgtttcgacgagttcttgctttcgggttgagctgcatcggtttcgatcttcaacaagaggtaaaacttgttatggcggcttgcgttctcgggattagtgcttccatctgtatgatactctaatcttgtctatgtaattcgtcgagttatcatatatcttatataacctctgacaatatcgtcatctaacctacaatcggctaacatctgttaatagaaggcagccgattaggttaaataacgatgttggcttagattatataggatatctaccactctatgacacatccagcgacttgattgtctagatattgttcttcttttcatacttaatgctgcatcagttgagtttgatctattaagtcgtgcttagaatttcaatctctagcctgccttctggttgccgattagggtagtatcggagtttcagccgatcttatctgatttaactacttttaccctatatgcttgactgatatgttaaatcagccctttatattaaatatcttgttgcatctaaatatattaggcttctgttttagtatattctacttgctttaatatcttaatatagagtggtatcggagtattagccgatacatgctagatctatctgatcggctatgctatgaatatatatataatctcattattaatatatatttcgatctaagtgatttatactgtctcggcaaggtgaccgatctatcccaatcatttgatttaagtatatatcgatataaggattatataccattaatatctacagccgatcgagtagatttagttctgatttgtttattaatacttgctgatcgatgtacatatgacatcggcctaaagataaatgatatgtcatcggctcctagctaatcggctatcgtttttggatttaaccacagtttctttgtctttgtttcttgttgattacaagatcaaatcaactggcacgctcatacatccgaaggtgagttttggacctgcactggagttaagcagatctcccaagcctcgtgttttctgtcaacaattatcaccatcaaattttgggaaatcagttttaggcaacctagaatttccaactcgtccaccactctgagatcccggagccccacgctcagaactctccccaatttcaaaattaactggcgaattgcgaaaaattggcttacccttcaccagggttcgatcctgaaccgaattggctccagaatcaaaaccatggtgatgttcttctccgcggtgcccatcgggcattggcgtcgccattgctgatgtcgcctggggccttgcttcaagatccgtcacgcgagcggcaattccttccaccgtgctccgcaggtccttgatccctgcatcaacacttggaatccacttctcgagcccttgcatggttcccagcaagatgttgatgttggtggtgagctcggtgacgcgctctcccaacgtctcgatctcttcttccgccgcccccattctctgagtaagagttgcttgagatttcttcctcgccaggatgcgcccaacctgagctctgataccagatgtcacgaactctcggattccggcgaaacgctcggagattgaaggggaatcaggttcgcgattgaggaatgagaggaggagtagagcagaacagaggtagacgatgagaggttgttggtttgagtttttcttattcgataaatgctttatagctcagctcgccatataaatggcagcacaacgcacatgtgtctgatgccaccgccgaaccagcacggcacatcgatacacatacacgcaactggcccatctgcggcccatcacagaatacaacccaattcaaagaatcaccgaagtatctaataaggatcacgacaagccggtggccgtggggcgtacaggaggagccaagaggactgtgctggcgagagagagagacgcgcggggcgaagaccgcaagacaacggcagtggcgcgaggaggaagatgacggtcgatgcccctgcttggcacggcacagcccacttcaccagctgtgcaacgacgcctttacgggatgtgccgcgcgaaacatttgggctgcactatgggagaggagagaagtggattgatatacacatgaatcttcatgctaaatactccctccgtccctaaatatttgacgccgttgactcttttaaacatgtttaaccgtttgttttattcagaaacttttgtgaaatatgtaaaactatatgtatacatagaagtatatttaacaatgaatcaaatgataggaaaaataataataattacttaaattttttaataagacgaatggtcaaacatgtttaaaaaagtcaacgacgtcaaacatttagagacggagggagagggttttataaaaaagaaataagataacacttcgaattgtgtaaaccaaccggactaagatctgcaggggtgactgttgttgtactcattgccaccgacatgtgagcccaaatgtcattggtagtgactgcacagtggtcaccgcactggatcctacccaataaaccaacatattatgtctaagtgccacttaaaaacaatttgattgtgtcccattttttttcaatttagtttgtattgtattgcagtgaaggttttacaaatcatattactcgacctatttgcactcactacacacaattttgtatactatgatcaattaactaggcaacattttaaacataaacatatgctcagcatacaacattcaatggtctagaattagcatgttgtcccagatccctgcccatgctcttctggagtggtaagacatttggtggtccatgatcgaggtggagaacagtcccccatgcgtcatctgcagtcggacaaaaaaaaaactgcatttaaatttcaaagttgcgtgatacgggacatctctaaatttaaagtacactttcaaatatacatttaaattgcaaatatatgtgatactggacgtccctaaattaagaacactctagtctagactagactagaggtgcgataatgatgtcagagtagagacttcaaataaataacaaatgatgccaaaatttttttttacaggggctaattgagttgggtcacgatttaaatctcatcgtattcgtacctcgtttgcaaagcaggcagcagagcaacctcatcaactgtaatagcttacgctctctctgtatctgccatatccaccgtgagcactctccttgattatctgtaatcacaagatcactccggttcacctatttctgaaaggatagctgcatccacattgaccaattaaacaatagtaattgatggtccaatcctagctatatactacagagaaaacaaggattaccttagtaagaaggaacttggacctgttcaccgaattctctcccaaatatttttgtggattactcgaacagtgactttccttatgtaattgatcttcagaagatctttacttggttccccaccttttcgccgaagcttctctatgagatcctcgcttacttgttcaagatgaagttcctccagagctgctaggtgctcaatgccatcaggaattgtcatcagttctggacagtcacgaagtgttagccttgcaaggctttgcattgcactttcttctatttcaatttgtctgagatttggagcatcccacactcgtaatgtccggagtttcgggaaggattctgcacaaaaatgcagtttctccccttcaaaagctctcataaggtgaagaaagcatagaccatgcaacatctgaaggctgtaaagagagtcttggtcaagctttgagaatgccattaccaacttggataggttgtggaggtgtgataaggatgatagactctgatggattgactccttctccagctgccccttcagttcgagaatcgagagagttggaggcaaacgaagtgcttccactttcaacacttgttcgtcatctaacgctgaaatcctcaaatggacaagatggatcatcttcatgatagagttgcataatccagaaaagtgttcagttcttgtgttggcaacaccaaggtttcttatctctgtgaaaacaccgaggtgactcaaaattgtttcatttgactcaacatactgaagtgagtgcaatcctgtcaagtgcactatgccttcaggaacccttgttccagtgaaaactgcgactttgtacttgtcctctaaaaataaattgccaacatacaggtatcgcaacttccggagcttcgctataacttttgggatagtcgataatccagcattaaacacatccaaaacctctaagttctgcaatcgtccaatttcctcggagagaatttcaataccagtatgcctaaggcacaagaaacgaagattaaacaagttaaatatctcattcggcagtgacttgatacgaacacgtgacaaatccaaagtagacagcatgttcgaacatttcaggaaggaattcaacaggtgaatgcagatatcgttattgaaaacatacagtgcacggagatgatgagtcgcccctgataaactcaattgttcaatgtctgcacattggattgataagcgacgtgctccctctactgaaaatgttctagttccatcaaaaattgtacagaagcattcctcgtttgctttggtgatggcaagaatccggataatatcatgcattctacaaccggtcactttcccagccacattcatgtccactacctgaagtaggcttcgatttacaagttcattaaggtatccctctgcaacttcttcaaatgtcttattctccttttccggtataaatccagcagacatccagtgccttgttaccttacccctttttattttataatcctctggatataatgcacacagcagaaaacaattcttgagattgtatgggaggtcctctaagctgactttcaggataatattgacatcaattatcacattattcgtcagctgcacctccaactcattatacacatcttcccactcagaataagtaggggttttgcacgataacaggcggccgatgcatgcaattgcaatgggcaaacctttacacctgtccacaaatttgtgagctagagtctctatatctgctgggcatattttctgttcatgtttccaaaatgcttccttgcaaaacagttgccatgaatgctcctcttctagaggtttcatttctattatacaattttttgttgctagcaatgctacctgatgatttcttgaggtaataacaaatcggctgtttttatccataggaaatgcatcccttatattgaaccacacatcaacaccccaaacatcatcgagaattagaaggtatcttttaccttgtaaatggttatgaatattctccatcaacttggtagcattggaaggtatgccaaattcactagtaatatgcttcagcaaatcctcaacttggtagctgtttgagacagttaaccatgcagtagcatcaaagtccactttaatagtgtggtacacatgggaaactaaagtggtcttacccactccacccatcccccaaactgttgtaatcatactactctgttccaaatcatctccgagccaattcaacagcaactccttattcgtcttgatccccacaaggttgtcttctcttgcaacataaaaggcttcatatttatattttgaatgatcagtgctcctcctagctgattcttggtcaaaacctctcatgatgtaccgaacattcctcctatcagctctttcaagcttggccttgatctcatgcagcttgtgcgcaagacggtgccaggtcttaacatgggtgatcctcttcttcatcttggctgcaatccctccatgcctgtcgttcagcttgtaggtgaactcatcgacgacatcctcgatctcgaaagtgaggccccgcattttcttgacgaaaatgccggttgtctcatccgtgtccttgaaccgctcaacgccatggagaaaggcttgcatgctctccagttcctccttgacctcatggatctcaccaaagagccttgcaagagcagacgcttcatggcagacaattgatgaggcgaagctagctgcctcatttgctaaggcagaacccaacttcccaatcagggctcctacaacgccttcagccatggagttatgcttcgacctgagagttgagagtgctagctacttcaaagttcggtagagccagtgttgacaggaggaagatgacacagtgagggggcgcttttcaggactatcaaataccaaatgcgaatcattattgaggaagtttcgtagacatttcctgaacaattattcaaaaggggtatcttctattcaaatgtcatataccccagtctttaggatacatggagacgttatgttaaacttcggagagtattgtgctccattcatttgttcagtttacaaatgatatcattttcagtgctctgacgtcttgacaaggatttaattttcacttggctaaaccgtggtgacgtggtggtcggcatgcagaaataagcaaatcaatggtacacaggatgctctttgacggcattttcatctacacgttgctggaatatttggctgcagggtaacgacaggattttcaataatagtttttactccttagtaacaatagtttttactccttagtttttactctttttagggatgccgtacactgaaagacgaaaaaaaaaagtaacacaatagttaaaggagcatggtagtacgtaaatatttttagaggcaccaaaagagacaaattaaagcaactaaaaaatgagaagcctcgatcccaacctgagtccatcatgtgatcggaagggcctcttgtctggcagcaagctagaatcatctgtttggtattgtcactacaaaaaaaaaaagaaaaaaaaaagaaaaagcaacattgtgccagctggggaaaccacatagatactagatttcccagccgacgcccagcagacggcacgatgaggcagaacaaaagtgccagtttttagaaccgtcacttttgagcttccatgcatataaaaaaaaaaggccagttcaatgcatcggcttgattcgagcggatgcatcaagcggctcgagtagctcccgatcgccaacacccaagaacacaatcacataatcaacattgaaaaaaacaaaatcaatatccaatgccatccccagataccaccgtcgcctctgctcccgtcatcgatggtgaatgcagtcacccactgttagttgattttatcggctaatgccggttagttaggagaaggttaaaatcccaccggttttcttatcctaacaagaaacaaactaagagataaatctgttttgtgtgatcggtacaaaatagattcgaattttagattgagataagccctcgagccccaccagtgtcgcttatataaagaaagagaaggagggaggcagggtgacgactcgactctctctaatctcaaaccctaaatcaatcgcccgatcgattagacaatggaagaggttcgtgaggtatctctagaagaagaagaaagaagaacagcaatggcttcaaacacaggtcagtagatcaattaatttccacataagcaagaggtgatcatgtttaggctaagactcaatgaattaattggattaaattccaacattgtgatatcagagcttagcttagccttcatgttccctcataatcacatgatccctgtgattagaagccacccttacaaagttcaagattgattcggcctgaacaattttgaattagattagattaatttttttaagtcttggttgcatattaagccatgctatactgttggtctcggtcaacagtagaagaagcaaagttattgaagaatttaatttcgttgcttagtagtagaatttaagagaagaagaggattgggataagcgagattgaaattcccaattctcacactaggaattcctagactgaagctaagctttcggctagcactcagcaaacaagaaagaggataaactagattgaaattccccactattaagcaaagggaataaacaagattgaaatttcccgaaattcccaataaggcggagcaaatcggcccaaaatccccaaaattcgaagaaccctaatttttgttttaagaaccctaagaccaaaacctgaattaaatccaaattaaactcaagattagggttttgagttcgggaatttaccggattttgaagcccctaaatccaccggaatttttccgggaagcggcatcgccgccacttcacctccttgcggccgcgtcggtcttctcgtgcgcgtgccatcttggaccgtccctcgccgggaatgggaagcatcagcttggcgtcgcctccttggcttcttccccctcaatttcctcgcaaggggaaataaaattgcctctatgtcctatgtatgctactcttgaaattttcttgtgtaagttctttgcaagaaatagggacatgcttaatgtcctgattcaagaaagtagttaaataagaagattaatagcattattttgggttgaatcattatgaaacgttgtcgaaattatggccttatttttcggccatatttctaggggagaatatacgtctcattaaggtcgagacacttcacccatagaaatttttgacatctatcattactgagatgataattcgctaagaaaagctaaagtaaaatcaagtgattcaagttcataaggtattatgcttccattacataaattataaaatcagtgggagctcatcaagagctctaataagagaagattattctaccttatttatgactcatagctccattatgtggatgctagaattttgtatctcttaatttgtgacttgcacaattaaatatacataacatagcttgagagttttgttatggaaagacaagtcacatatagggtgcagacacaagaaatccatttgtggacttaatcaaacattgatgatgttttaaattccgctgtgtcattagtgaactaagcttaaacaagaatgaggagaataattattctataatgatggaagtaagacgtctttgaatttgtgtcattgtcgcttatgtcacataactaggggagtttgaaacgtctcatgaggtagagatattctttcccttagattttaatggcgttgtttagctttaagtgaaaatttcactaagttaagaaattagccaacaaatgatcatttatggctatgtttacccataagcgacctcccatttcctttaagaaatttaagacactaatgctaaaatcaaatgaagttatgagattggattatggtgctaaacactaaataaagcttgttcaccttattagacattaaaaataaacgttcatccaaatggttttcgaaccatgtaagaataaattgagatggatgaacaaaataagacattaaagtgttcatctaaatggttttcgaaccatataagaataattgagattgatgaataaaataaagaatttagtagaagtttctaaatgagtcaaaatgtttaggctatgactcaattaattaattggattaaattccaacacccccaagcacgtggtggcagatcgacaagccccgagctcgcattggtggatctgcccaggcccgtgctcatggcgacaaatccggccaccctagtgggtggaggaacaggtgtaggaaagcacggcgtacaaagagcgcaccagctagagcccgcgccattcaccgtgccttcaaaccatctatatcgaagaggtggaatgaagagggcggggggggggggggggagagaagggagcaagtcggtgaaaacacgtgagggggagaggatacgctcgagataaagcgctcggctcctcttccattcactcgacaaaatttctaaatctccggttcggtcagtttatgtgccggattttttaaaaaaaccagcacacacatttataatggtcttttcatcttgtggattatgtaagcgtcatctagaccaaaatttggcacctttggttcccggtaaacagcaatagcgaactcttgggtgaatacaaacatttccatgttcatgtacggtgtagatcagaacatctccggtctgagattggactgcgaactttctaatgatttaattcattttggataatttttagaccaaattttaattaagtgatttgaataatcatgcacagtatagtgcttcaatgagagagggagaccaccttctcagggattgtagggtcccccggagcaaaggtaagttagttgtttttatggatgcaaaaagctatgttgttccgtgggaatcttccattgattgaatggattggttgggtatagctattctttagtctaatatgtaaaattatcctttagtaaagtcaaactatctgcagcgaggtaattttagataatgaaaccattctattatctctactattataaaagtttaagatgtttttgcataacttttcgtacgtcagccaattccgaatcggtgtacgtctgggtattttgccttgtgtttttcgtctccctcggatcagcttactatccgattaatttccatatccgtaactgcgctcgcgtatgaaaaagccccgcctggcccaagctaccaactgggcagcccatgaactgctcctgtcaggcacaagtttgcagtccgcacaccacagcacacgtgcatatgcaaatcgacatcttaggccaatctgccgttgtcctcaagtcagcccgtgcatgcacgttgaccaagtcattaggataagcaccagtaacctagaccaagccgtcctcttgtttatctttactattataaaaattgaaaatatttttgtcggtattttgttatgttatctgtgtttgagtcagtttttaaattcgtgcgcgtttgaaaatatagatccatatttgagttggattttaagcttgtttgcttttgaaaatataaaaggagttgtataagaaatctctttaaaaaaaactcgcatgctaacttaagatgaaatacatactcctcattgcagctcatgattttctaaaaaaatatatatcaaagagaattcctacagtcaattttgccctacctaaaccgtataacaataacaaaattaaaatagcatttacccgttgcaacgcacgggcattttttctagttactactaatgcagaaaaatacgacctctctatacgagacaagaccacccctccggactcagcagaaccctaatacctcagttgtcaaaaacaatctagtacttgttttttcttcatgcctagggttatgttagtagtaatgtagttctctttgttgatacgtttgttaatcatctgttcatttccaccaatgtaatatactccctccgtttcataatgtaagtcattctatcatttctcacattcatagtgatgttaatgaatctagacatatacatccatctaaattcattaacatcaatatgaatgtaggaaatgctagaataacttatattgtgaaatggaggaagtagttctcttcgctgatactacctccgtttcaggttataagactttctagcgttgcccacattcatataaatgttaatgaatctaggcacatatatatgtctagattcattaacatatatatgaatgtggacaatgctagaaagtcttataatatgaaacggaggaagtatgtcctaaaattcatccatgcaacttcacgagagcatgatagctatcaattctcatatactagatgataccccgtgtgttactacatactattcatatgtgcaatgcagttataaaatgttaatgcatagaaataagtaatattatgaacctataaaacatctcacatatgaaaagtaaaatacttcttatagtgatttttatagcatactacactaagtggtgaatgaatgttgagttgcctcataataaatgaaaaataataaccgttaatatttaatatcctattggattaatcatgaaaatgatccaatggctcttgttttgtggatgatgtggctcaatgcatgtttaacttttatgtttagtttttttgccaactatataggatatatagattggtgagttctcgccattctgacatactgtgaggtgtcatattttgtacgataaactcggtttctcgataccttgtaaaattttagttttggttgtattgctacttaagacttaaggaccataaacttttctcgtatatatacacacacgcaagcatttaactcaggaaaagttgaacgatttgaagcagcggatgtacaataatttcaaattgttctgatttaagcaaataaagaaaccagggccggcaatcagtgttgcattagtctccgtcgaatgccgagtagatgatcgacgacttgtgaggccaggtgtctcgttgacacacgaagcaaggacaccctaatatcttagagaaatatattctgcaaactactccatccgtttctaaatatttgacaccattgaccttttagcacatatttgaccgttcgtcttattcaaaaatttttgtgaaatatgtaaaactatatgtatacatataagtatatttaacaatgaatcaaatgatatgaaaagtaattattatttgaattagacgaacggtcaaacatatttaaaaaagtcaatggcgtaaaatatttagaaacgggagagtatataatatgcgaatggggcaaaatatattattgcacgagataacgatatgtactaggccagatgttaactgcacataggatgatatttttaaactctcgacgatttcattcatgccagcgatcgaagtcgacctatattttaactaggctaatttaatcatgagaaaacctcacctaatatgattcaagttgcacaaaatcacagtgatattgggacgtgacatataacttgcgtattatggtcataaagttttacaagaccacaccattaatcattttgacatatttctatatcaaaatacaaaaggatagatataacatttatactatatatggataaacatgccataaatttgagatgtgattaattttataccttaaaatatagaaaaattatgaataatgcggttttgtaaaactttatgactataatatctatggttttgtaaaactttatgactataatatcttcaacattggtttgaagtttatgaattcatcaatataggaacattgggacaagctaaacctcaatgagagggtataatgccacatacacgcatgtattggacctagttgttgcatggattgtgtaagacaaaagcattgacccatctaaaggttatgcgaagttcgaactgatttgaacagaacaaacatcttcttcctaaagtcattctctttccttctctcccctagcccccttattccctgcagtgtgtaaatcccatatcttttttgagaattacacagtacaacgcagacactcacaatgcacgcacactcatccctatgaatgcacgcacgcaaccctacccctatgaacatcttcgaagactgggcggcaaatcctgaagattgacgaagtcatcacaggcgcctcgttgtcgacggcaaactcctattagtagagtttcgtgttactcatgttaattatatggtgttggcgtgtggtcagttctacaaagagagtttaagatagattcagaccaaaatacaaacttatgtgtttcgaaacctttggttcaattgttatttcatatgaagcttggaacgaaaatgtattgtggtgcaatactaacgagggtttattcatcagaagagatgggcttctgcaagttaaggtgttacagaaccactagttcttattttgatattgcatttctccgactaaagggtttcgggaggtaaggtggggatgttgtataaccgttgattcttaatggtagcatgtcacacaccaatatgttatctttaccgaaatagagatgtgagacaagatgtaaaatcaaggagttgatttagatttgtgtgatgaaaacattggtggtatgcgatattctttatgtgaaagactggtctcttgtgatgagatttcggagtttaatagatgattggttttgtcaagtgatggttgctgttggccttggcggtcagactggccgggtgccatcagtcataccgcatgttatgcggcagtcaaatcagcgaacctgacggtctaaccggcgggattctattcgatgtcagtttcaggttgtcttgtcggttttggatattacccattttgatgtagatcggtctaacaggagtagatgtgccggtctgactgcttgaagacctcctgtctaactagtgtagttgctctagtttgtccgcctgtcgccgccgctggtctgaccgccatggagccgtcggtctgaccgggccgatgacgtcgatctgaccgcccatgtcccaccgattggaccatcgcacctgagaaaacacaaatcgaagatctctcaaaagtagattgaactttattacttctattcgtgtttacaaagtgcaataataacactcctctcaaaactctcaactaaactcgaaaccctaacttttctctaagctcaactccccctctttctatttatacctgaggtaagtagcataaagccacgaacccaacttgtacaagaagtcctataacttaggaaaactttcgtacaagaaacaatcttttgaaactccaatcacatcaaatttggacttcttccaaattcgactccacatcccatatgcacacattatctccatcgtataccatatgaaatcttcaccaaccacgcatattgatatttagcctaagcatctcgcatgatatcctaatcatccagacgtcatcttctcccaaaatgactcccgatccatcaccggcaaacactctccggaggtatatcaagacttacccacacatgaatcaaccaagaaaccatatctgagcacatgttctctccaacttgagtcaacattagcacacaattgtatcacatacgcatagtatcgatctagaagtcataaacatgaaccaatcatgagtatccaaataaacaacccgaaactgaaactgacacagagccggccggtcagaccatcacgccggctagtctgaccggcctagtccatccgatctaaccggttacacaatcagcaacccatttcgccaattatctccaaatattaaaatccaatcatcacgcatgctaattattcatcacaaagtaataatcaaacacactttgattctacagttttcttctcttacaaagtcatatttaccttagttttatctttccatgattaatctatgttgtctaccttcttttctttctctcattgagccatatcacctcaagcttatttttgaatgatcaatctatatatgatttaagtggttataaaccacatcatcttaattgcttatagatttctctcagtagtcaatcaactatgaaaattataaaaattacataaagttacgtcgtctagctaccttacatgttatttatactattgtcatacaaaacttccgtagtaacgcatagggtttcatacagttatctaaatatcaatgatcatccaaaataagctagaatcatttctctagcaacgccatgtcatcctcaatgagttcacttttatgttcatagagtacaatatagttgcaagctaataagttctaacttaaataacaaccaatgaaattatcttgaaccttatccacccatggttacaaataaagtaaacattaatgatgaattaatagctgtcatctcgagcatattcatttaatttctgtcatttttagtcttccgaagtactataaataaacatattttgaccctgccttcctaccctcaattagtcactcaagttttcacaatggtttgcaagattgtaatagttgtctacgtgttcatattcgcgctcctcttctcccatggtaagtattcaacacttgttaaatcgtcgtttctacccacagggctctcccatgcatgatataatatatcttctcccatgcaaagatatccgcctatgtaaatatattttcccgatgggttcttgatgcacttgcaaaaatttaagatttacatagtccctggttgtaggcagagaggaaaactccgtgtaaacataggtgcatgtacttttataccctcatcaatcgatatttaattgatgcttgttccaacacaggaatgtcgctcaacgagcattgcgataatg

SEQ ID NO: 27780 - DNA, 8172 bp, Oryza sativa
tatcttgactgctattatttccagctaatctaatatgtcaagtttcagatgtgaacaaattaattttagtttcgcagttgcttattatttggatggagtatttggtgaatctaaggtctgatttggaatgtacaaatttaggacaacttctgtggaaattgaactaatttacacgaaactcttgaaaaattcctaccttttctaaaggaggcctaaaaattttggactcaaccacctcctccccaaagagataacattaccttgatttttacaaccattgctttctcaaaatttcccagttttttatttcatattttactcccatgtttatatttctgggtcatgtgcagcccattagggctgaaagcagcaggcgacctccctagggccagcagcactgcaggttaacagtaccattgtggttatcattcatgcgtggttactgtttacagtcggtgttcaaattaaaggtagaaatgagatcgattagttagctacttcctctgttccgtattataagtcattttaggtttgtcctaagtcaaacttctttaagtttggtcaagtactaatattttcaacacagaacagatgtactacaataatatattcaatggttgattcaatttgaggttgtagatgttgctacatttttctataaaattcgttaaacttgaagaagtttgacttaggacgaacccaatatggaatggagggagtgtttccttaaacttagcgatatgtgccttaagagtcaagttatcccatctgtatgaagataggggttatatcctctttctcccttgcccttgtggtgcactgcctcaatggcattttcatgatacttgggtccagggacaccttacttggactgagggttctagtcccagcatgctcattatattatatataaacgttgtacaagtagcaacgatcatgaatacacaacataactttatatatggttgtaagtaaagcatgcaataaacttgtaaccattatctgttaagtttcgttgtaaataattggactggtgcatgagaagttccaccattagaattgaatatatatcatttcacatttagtttcagggtcaggcactatgtacccaactacccattttatagttcattatgttgagatttcagcagtatgccaagctaatctccaaatttattcagcaggtgaggtgaagaacacaattagatagcacttcccattgagaaagtatggcagaagctgcagtagtccaggccctcatcaagattggcacgacttttggagacgcggcattgcaatcgctcaaagacatcataaagaaagaagtagctctgttacaggaactaccagagctcgcaaaatccattgggagggaactggacatgatcaatagcttccttatgcaagtgcgggcgaagatccacagcactgacaatgaagttctgaaacgctgggtggtgagagtacgccaggtggcctaccatgttgaggacataatagatgagtactcctacaatgttgctctgctgcaggaggaaagctatttaagtagaatgatgcgtgcgacctactatggtgtaactttccatggcattgctactggactgaaagatgtacaaaatgatatcaagcaattgtcggatactaagacaaaatttgcagagttcttcaatgagttacatagcaacactggtagtaacacacaatctcatctatcacgtgatagatccctccatacagttaaagaaggtattgttggtatgacagaagaggtagatttactgaattcatggttatcacccaatgatctcactagagtagttttatctgtgtggggtctgtttgggctggggaaaacaactctggtgagaaaggtgtatgaatctgtgaaagagcagaagatctttgactgctattcttggattgaggtaccacacgagtacaacaatgatgtaatgttaaggcagttaataagggacctatcacaagaccaaagccaaatacctggaaacctggacagtatgtatggcagccagctggttgatatattatgtgtggtgttatccggcagaaggtacttgattgtgctcgataatgtctgggatgccgatgcatttcatggcatatcaagctttttgatcgacaatggtaatgctagtcggataatcatcacgactaggacaagtgatgttgcttcactggctcaagacacatacaagctcaagcttaagcccttgggtgatgaggctgcaatggaactattttgcagaagggcttttcataataaagacatgagatgccccccacacctgaaggatctgtgcgaacagattgtgagaaagtgtggtggcttaccatcggccatctatgctataggcaatgtgcttgctgtcagagaacagacagaagtagcatggaaaataatgaatgatcagttccagtgtatgttagaggacaaccctggcttgggagaagtgaggagtgccctgagtgttagcatcttgttccttccaaggcatctcaagaactgcttcctctattgcagcttgttcccacagaactaccggttgtcacgtgaaagccttgtgaagctgtggacagcagaaggattcataacgaagagaggaagcagcactctggaagaagttgcagatgaatacctgatggagctgatccgaggaagcttgttgcaactcctggagacagatgaaattggcagagtagccttctgcaagatgcatgacattgtgcgtgacttggctctgtcctactccagaaaggagatgtttggcctgagtgatggagacctccaaacagatcaaaaggaagatgttcgtcgcctgtcaatatccaagtgcaacaagaatgtgggatcaatcttggagtttcctcgccttcggaccttcgtcgctaccaatggaggcgcagagtcagacctgttacattctctcatacaaaaatcgaagtaccttgctgttctggagctgcaagactcacccatcgacataattccagcaaatattggagagttgttcaacctgcactatcttggattgcggaggaccaatgtgaaatcacttccaaaatctatcgagaaacttaccaatctggagactctggacctgaaatacaccggggtagatgtgctgcccaaggagatctgtaaactgaagaagctgaggcacttgttcgccgagaaactcattgaccgtaatcgccaagtgttcagatacttcaaaggtatgcagctgccacatggattttcacacatgaatgaaattcaaacccttgaaacagttgaggcaacgaaggactccattgagctgctggggaagctgactgcactgagaaccctgtgggttgagaatgtgcatcgcgctgactgcacaaagttgtttgattcattgtcagaaatggagaatctctcaagcctgctcgttagtgccagcgatgaatatgaggtccttaactttgatgcattcagtccttctgagatgaagctccagaagctcatcattagaggctgcctcgagaatgacacatttgacaagcttatgttcaaaaaccttggctcacacatcaaatacttgtcactaagttcctcgagactcggcaatgatccgttcccgctcctcgcaaagaacatgaagaacctcatctacctgagcatcaggaagtggtgctgtgctgaggaggtggctctccgtgaagggtggttccctcgcctgacaacactcttccttggtgacatgaagcaggtgcacactattgtcatcgagccgtcagcggttgagagcttggaggcgctgtacttggtttctctgacggctatgacagcggttccgacaggcttggagctcgttgggtcgctcaggaagctcgttgtgtgggggcagtcagacgatttcaagctggagtggaagagggagaactgggaaacgaagctgcgccatattccggaaattcgcatttaattgatcaagaactgcttaaaatatggatggattatatcttgcatgactactgaatcggtctctggactgattcctcctgctttggttccacctgagtgtgatttgtttctctttgtctgaattttacgtttgtaatatgtctgaagttactgaacttctatgatgtaatctaaattctgaattttcttgtaccaaactaccgattcttgtttgtgtactacatatattgcttcttaaggtccgtttggtatggctccaaactccaattcctagctcctaacttcaattctagctagaacactcttataggagctgaagtgggtgtgaaagtgtttggataaattggctagcttcacgccaccacgttccttgttagcatttcatcgaacacctagttggcgtcgccctgccgctgccgccaccattcaacccgcacgccgccgctcacccccgtcccccgccgccggcggttagcccatgggctgccgcggccgccgcacgcataccaccccgttgctcgcgcaggtctacccgcacgcatgctcgtccagccgctcgcgcccctcccgtgcgccgcctgcctcctcggcggccgccattgcacacgcgccacgcctccgctaccagtgcgcctgcagtgaggagagagaacaagagtacaggggtgtgaaagggggagttgagtggtatttttgtataaatagactaaaaaataaaaggctagttggtcttttggggtgaagtgaagctgtggagcagtaaaaacccagatccacccccatagtaaaaattagtggagcagctctcccaactttgttccaaaaaaatagtgaatctgtaccgtttggcacagcttcagctctaggtaagttggagttcggagttataactgtatagtgtcaaactgggccttatataaagctgtgaagcttcgtgttataagacctaacaaattttgattgttgcacctgatttatatgctacctgttgtttaggctttgttaatgtagttaagtgagaatatatatatatatatatatagtaaatttgtttggtgctccaaggtgcccgggcaccattgttgaaattgagcatatacccaattcaaatgagtatgaaactttttcaattacttaggtattaatattaactactttactaactagttcaaaacaaatttgaactgaatttgaacttgtttttgttagattttgattctaggtatatagtatctatacatataattagttaggtatgtaatcatggattatgaaataaagttaaatttgagttgttttgttgataagtataggtatgaatcaaattattataactaggtatatactcacaatttgaaaattttgaaaaatttgagtgattttgtgcatttgataccatggtgcccgggcaccatggtgccccatatgagtgtcatatatatatatatatatatatatatatatatatatatatatatatataactgtgcttttgtgaagcacccccgcccaaaaaacctgatttatgaaatttggtcttgaataaaatcctgaaactttaataccacacgtattgctttcagatcgcctataattatcagttactgatggtagcttttggagtactttcatttgtctcgtttctgcttgtacctgctgcagtcttataataaaacccccaaggtccttttgaaacaaaggatttgcagataagttttgtaggatttaaatcctactgaaaattttccattttgactgctcgtggattttagaggaaagttagcaagtgctttaaccttgtatttccgcggcctgtttaaacatctcgtatttcttttttgtgttttgtaattctctattttgcatatgcatttcttttgaaagtctttccgtttctatattttctcaatacttcaatccgaaggagtcctaaaataaaattctgaaatttaaatgcaacttatcaatcctacatgagaaattctgttaccaaagtacttactccatataagcttcacataggacagaggaagtctgttatataacttatgcaagtttttcataggaacagcattattttgcattccaagattggtttccctagggctggacggaaaactcgaagctcgttagctcgctcggctcgtagcaggctcggctcgactcgactcggctcattaggataacgagccgagccgagccaagattttagctcgttagtataacgagccgagccgagctaactcgcgagctgctcgcgagctgaacgagctgcgctttctggactgcaggccgcatccacctgtgtccgcaggccacaacccagtagcccaaaagcccccccagcccacacgcacatataggagaaaaaaaaaccctaagcctcttgcccttctcacttcctcagtcctcagagtctcacgcgtggccgcacaggcacctggccgccgcaagcttgcggctagggttactgcaacagcgccagcacgcgacgcggcgcgccggcgccgcgaccagcgcctctccgtccgtgagtccacgagcaggtccggttccgatcctcactcggtcactcatctttcctttttcctctagatagatctacatttgctgattgccgaactgctactaaactgctgactactatgctccaggtccaagccctcagtcggggtcgcagccatggagggtgagaataatgcatcgccgcatcctccaagtttggagtcgaggagtaagcttcgtggacgacgaggaacaagcactcggtcttcatcgaatcccactgtgtccttggaagtggtggtatgttatctaatttaaaattgctagttcgtacagtatagacttgaatgttgatttaattattgctatccagagtgctgtccagattatttagttacttccatgtagatgtagataatgaatttatccccaaaaatgaagaatgtcacacttaattttaatgcaatggcaacgattcagctatacattaatacatgtatatttccttatgcagccattggagaaagtttcagaagatgaagacgatgataacagcttcgaccatagggatgatatgtctgaaagcctacctacagttgatggtggaagtggaagccagaagggtgatgatgagtttgatgatggtggatcaaaggctaagaaggcaaagacaggagggaaaaaagctggtgttacagtgtctcccaagtgcaagatagcaagaggcaaaagagctgagtgctggaaacattttaaggttatcaatgtcccatccaagaaggagagaggtgtcatggtgacaaaggcaaagtgtaagttctgccatagaagctatgtgtatcatccaggtggtgctacaacaactctgaaccggcacctggctggttgcacacaatatcagaacaagttgacaaaggctaaagctcaaggtacactaaactttggtccagaagatgacaactctcttattgttaatcctactgagtataatcatgagcacactagagaactgattgccaagatgataattgctcatgagtattcatttcggatggtagaacataaatggtttaatatcttgatgaaatggatgaatggtaactacgagtttattggtaggaagtctataaaaaatgaatgcatgagggtttatgaatctgaaaaaaatcaacaaaagaggagtttgaaagaggcataatcaataagtttaaccactgatttatggacgtctaatcaaaaccttcagtacatgtgtttggtggcacattatatagatgagaattgggttatgcaatgccgtgtcttgaactttatcgaggtggatcctccccacactggaattgtcatagcttaggctgtttttgaatgtatggtagaatggaaaatagaagacaaggtcacaacaataactcttgataatgctacaaacaatgatactgctgttacaaatttgaaggcaaagcttcttgctagaaagaattcagtatttgatcctagttacattcatattcgttgtgctgctcacatagtcaatttggttgttaatgatggccttcaaccaatagataatttgataagttgcttgaggaacacagtgaaatactttaagaggtctccatctcgcatgtataagtttgtggaagtatgcaacaattattctgtcaaagtgggcaggggtttagctctggatgtta

SEQ ID NO: 27781 - DNA, 523 bp, Oryza sativa
aatgggtcctatgccaaccaatatacctccgcctccaccaggccaaaatccctacatgcctggcccgccgcgtccatactccatgcctccaccgccacacatgccaaccatggcaaccatggtcaaccccattgggattcctcagcctccaccacctttgcctccacaaccacctgctgaggagcagccacctcaacctgatgaaccagaacctaaaaggctgagaacagatgacgcttctcttataccagcagaacagttccttgctcagcacccggtaatacttcttgatatatttcttctccactttcctgttttctactaaacattcttgttagtcttgttctttttgtatgcgtatattgaattttaagaatttccatgtgctaatttcttctcttccctgcagggccctgctcacatctcagtgtctgtacccaaccttgatgaaggaaacctgcgaggccaagtgttggagatcggtgtccaatcactctcagacacagttggcagtctaaaggag

SEQ ID NO: 27782 - DNA, 764 bp, Oryza sativa
  unsure (1)..(764): unsure at all n locations
cattcaaatagtgaacatcttgtaagatgacaagtaggcagtgaactttcaagacaagcacatttcacaacagcaaaacagcagaagctaaaacatatattttaagtaacagatggccataaagagatatgtatgtctgacattcaaatagtgcaaataacagtgtttcaccacgtttaaacataacatgagaatacagaaattaataggcagcaaccaacaaaaatattctcctttatagctgcaagttcagttgcaagcaataacctgccagtgcactgagatacaagaaagctcatttctttctcccaccacgctccctcagtgttaaattgatcaccactccagggccaatgttgtagtaagcaagagtgagattgtctttgaggaaactagtccgcacgctcaacttctgcttattagcagnnnnnnnnnnnnnnnnnnnnnnnnnctcctttagactgccaactgtgtctgagagtgattggacaccgatctccaacacttggcctcgcaggtttccttcatcaaggttgggtacagacactgagatgtgagcagggccctgcagggaagagaagaaattagcacatggaaattcttaaaattcaatatacgcatacaaaaagaacaagactaacaagaatgtttagtagaaaacaggaaagtggagaagaaatatatcaagaagtattaccgggtgctgagcaaggaactgttctgctggtataagagaagcgtcatctgttctcagccttttaggt

SEQ ID NO: 27783 - DNA, 18712 bp, Oryza sativa
taccgctttttcgccggcgggcgcagaggcggaggtgggcttttgcttttttgggcgatcgcggctgatggatgcaggctcgcttttgatctccgatttggtttcgatttttttttttttttgtgagagggggaaggaggtggtggaagaaccgggagggaaacggctttttcgaacgttggtggggcaacggctctgccttcgaccttcgtaaccttcaggcaggaaacaaatggcttttgaaggaatttttggaggatatccttcgaaataaataaatggctctcctaaactgctttggaattcattagagttgtctttaaatcatatataggaattttgaaggatttttcaaaatgaggttcaacatcttgaaaaaaaaatttgtttgtgcatagacatttctacattgaaaaaaaatcctccattgatatacttgtgttttttatacactccatccaacataggcatttctatatttattagttctcttatgtatttccatttgtaggattttaggtgccaggtcactctaaccctacgggtttctttttattcatgtgtttcgaaaaaaaaccattcttaccaagctcatcttgccgttaaaaaaactaaatggtttagattgtaatatcatatataactttataaacatgtaaatataattcaatttagatagtgagggggaatacaaattcaacagctggcgctagtaatttagcggctagatttcatttggtacccagtagtaccattagctcgaggtattttctgtcataccataacaaacttctctaagaatgtgggttggccatttccaccgctggttttttccaaccttcaattgtaaataggtttatgcatatatatttgtagaagtgagcgacactattatataattcgtcgagatattttcactgttacttagatgctacgagagaaatgggtctaatattacagtcgaaataaaaaatttcctcgtgcttagattgagtttgttgtttgttaccgtgttttagtcttgcaaggtgtatggtctagtgtgagatttagtagaattctttacatctcgtttgtgtgagtattttctttaccttttttctatgagtgattgctttttgtgtggtgtgatgactgatgactgtgtgtcgtttgctaggtgggtaagggtgctttagggagcactaagtggtctactttgccatctcaaggggaaaaagtaatctgctttgggggaaataatgcatggtgatgggctagctacctcatggtggccaaaggctgaggttttgggctatatgatatactatgtgacaataatgtcaaatattaattcacaaaatttgactttgttctttatcaggttgtgatgttattttcttttatgttgaccatttttacgaaacaattccatcacatcactgtactacctccatctcaaaaatatcttatttccggctatgttcatgtgcatagctaaaaatggtcacaagaaggaaaatttcaacacaatactacgtgtatttttttttaacaatgaatagcagtaaacctaaacaataactatgaatgcacacaactatttcaatatctttctcaattataggacaagtctaaattgcacatatattaaaggaagaagataatggctactccagtggttgttaagaagtttaactctgtggagaccctttttattacagtatgtaaaggtaaataatgttgggatgattgtgtgatcccgaattcccgatcgatcggtgtcggtgggatggaccattcataatatgtttggtgtacttggtgagttttacacgatcgatcgatatgatttttgctctaaagcaacattgtactcgaaagcaacaaaaagaagctaagcgcgtatgtaaagccacgcacctaccaaatcattcgaggaatccatgtgctatgcatatacttagttcccaagtattgcactacatgcatgtcctgtgtgaccagttgtggttggcaatttcaattccatttctgggtaattcagttgatgaatctattgtcgattggcatatccacgtatgtaggttgtctaatcaatattggaataatatatacccattccgaggacataaatatttgacatttttgatagaatatgatcaaacttttatgaaactttaggccatcagtttaatattaaattatttttataaagtgtaagaggtttatatattaggacagagattggaggcaaatcattgaatatttgaatgccattttttatttctaaactaagcatcgagaaattattgagggttaaagttttaagagtttaatcatgtttttaataataaatatgaaccaaaccgtgtactctaaagattaatttatgaacgaaaggagtatgtataaccatcttccatcattttgcatgtttactacatcaacccgacatggatatataaactactatctatctctacaaatataatagatccatgcgggagcgcctaatgggcgggtgatcatggcacgcgattggcccacacccgaggcgcacacgactcccaccctaactcccaaccccctcccacggtgtgacttgttaaaaatatattttagattgattaaaaaacaaccaaaaaagaaaaaaaatcaaatgcgctaaaaatatacatgggtatagactttatacataaaaatatatatacattgtaaactttgcaggtacaaacttttggtaataacaaaaaagattgaaattcaatatgaatttgagtgggatatataaacttccgactataaacttttaagtgtgtaaactttaggtgtataaacttttcgtatataaagtttagatataatatgcggttctagaaaaggaaaagataagaaaaaaaaaggggaaaaggtgattgcggggagcgatcacacggtaattagcaaattcagatccatgttgctatgtacaggtgcaatcctgcacctaccatatagttcaccaactgagttttacacctgcgttactcattcttcaaatccaactaaccgtattcatccacattcaattgaacgactcaagagatcatcccatgctcaacctcccctcctctctcgcacggaagctagcgcccatctccgcacaccctctccaccgcactcccatcctctctctctctctctcttgcactcacccagaaaccctatgcccgcgcccccttctccaccatgctgccaccaccatcgaatccctctccacagtgatctgctacggatcctgcgtcttctgctatccatcacgccgccaccgggactcctcacccacgcatgccatcgatcccgatttaccttggccttggtcttggtcttgttttctttttgctgaccatgctttgccttgttcttgttttctttttgctgtttgcatggctgatgtggaaaacctagctgattgagtgactagataattagttgattgagtgactaattaaaggaagactagcaaaggcgacatggatagatcaggaacaaaaggtgaacagtgtgttttagatggacgtagttctagttactagacatgcgttttttacctgagcacaccggcacagcactcagccaagcacgtcttggctcactttaagaccgtgtaacttcaaaaggtgaaaaataactaaagttgcctgattatattaattaggggacgagccacttgtacacaactagatcgatgaagtgacctttgagaaagatgccagagatttcaacatgctttgcattttgtaagcaaagctatccacaaagccattgtgtcccagctccagactgactgtgcatacagatcgagtgtgaatgcgtgattggtactatgctttggtagcctagcatgcaccgatagtgcagtggtaagaggtgtgtgattttaaccccgaagtctcatgtttaatttttaacatgctcacaatttcttcttacaaaatgtttggagggagtccctccaaatctcgtttttttttaaaaaaaaaactttggtagcagcttccagcaaaacaaaaacgaaattgctaaaaaaccgtcgcaagttttttgtgcaaaaataatatagctgtagtgtaactacagtgtaattatactacagttacattgttactacattgtagtctctacatataaagttgcatatattattttaatacttatataaaatttatattttagttatagttgaattatattatagttagatttgatagtttttttaaagatagtcctaataaaaaaacagagagagagagagagagggtcttggttgctgggcctccacagagtagaattgccaagtgcaccatcggcctatgaaaagctcaacactaacagaagcccggtcgtcctcttctggcccaaggtttgtctcagcccagtctcatttacttggatgttttgaagttattcatttttcttacatttttcaaggacgtaactacacagctagtggtagttagtttgtctaaatcagctaccattctatctataaaaaacaccatccacctatactttaagtacaattttctcttaaactactcatccgatctacgatttgattacaccgttgtgttcataacaattaaatctttacaacaagatctcacatcattatattttgataaaaaatcacaaattacttttatgatatgtctaaattacttttagatttcactaagttacttcttagatatataaaagtaaattcagtaaagcctaaaagtattttacatatattatagaagtaattagaacaaaacgaaggtaacttcggcatgtcatttgaattaaatccgttgtagaaataaaaacatgactctatctagaaattaaattaatcagcacaaattatggaattaactaaaaacaataataaaagtaatcacctcaaagcattacgaatgtataggaagtattttaatcaaatctaaaaagtaaattatatatatgataatttgttcaatgaaaaaaaacattaattaaagttactttctttttatataagttacttctataatatatgtaaattacttttaggctttactaaatttacttttatatgtctaagaagtaacttagtgaaatctaaaagtaatttagacatatcataaaagtaatttgtgatttttcatcaaaatataatcatgtgagatcttgttgtaaagatttaattattacgaacacaacggtataatcggattagtaatttaaaagaaaattttatttgaagcatagataatagaaatatttcccctacttacttaatggattagtactatagtaaagtaagattcttccagctaacacatatatggattctggatgtccgtcgctatttatgactaaattgagagtgctctcgaattagattttgcgatttttcaagtacaagccaacgctcacacaaacaccatatatactcatgtccacacgattacacggagcgttcaaacacagggtctaaatacgattgaaggccaagccttacacatgctttgacccctgaacacatccaaacaaacaaattctaggaattaggagagaaaatgcaataattatataattcagaaaatgaactagaagtcaggagctaaaaaaacccagttttttcatattcttataaattggctaccaaccagtagcttctcataatgttaatcttcccctaaacaggcccagagatttgaatccattagatccgtgagaagctatcctaaccgaattatacccttttatttaagctatattgaattttaggaattcacaaaggtgatggccgggacaacactactacactaggcggacgtgccccacgagacacgatcagggggtgcgcgcattatttcgattatagaaggaaaaagagaaattctaaattttaccatcgacattatcggagccatcggaattataagtgaaacagcatatttgcaaacaaagaataatttgtgaataaaacttttatatacatgttcttagcgatataaaagcaaatgctgaaaaataaatttcgatgaaaaaaaccttaaaatcagctccaaatttaaggttaacaatttaaattttgcctgatgagcataagcataagcgaaaagataaagccatatgtcgttaatagatgtaaagttctaccgaatgccatcttacgggtaattttatcccttttcgttatcgccttcatttgcccactcatcgccgaggtgcccacccataagttaaaccatatatgagccgcgcctatgagtttgttaaagttttgtgagggcattttagacattttaaataaataaaatcggactaactgaatgggatggacgaaaacctgcatatgatggcatttataagacaaactcatttatgcactttactgatggcatttgttagaatttctcaaggaaaaaaaaaagaggattgattggcaagcagggtacgttgtacactgaacaagcagagcttatattggtacaaatatttttttttcaattttttctggagaaatgctaacactgtgatatatatccacggattttcataatttactctatgcacatcaacctatttccctaatttctacaacaattcatcgatttattcatatttattgctcccacaaggggctgtacacttgctcatcaatggagccatctccatagtacaaatgctcgtcgtcgtacacgcaccagctcgccgccgccggcaacgccaactccggcggccagccgtacccgaacgccccgccgccgtagccgtcgaggtcgtcggaaaacatgtcctccagccgtctgatcccagctgctgctgcgccgtcgtcgtcgctcgccggcccggcggcggccatgctctcgtcgctgtccctcgtcgccgtcgccgccgccaccgccccggtggcgccgccaccgccgatctcggcctcgagcgaccggatcacgcggctcagctgatcggcgtcgccgtcgccgtcggtcgttgccgccggcgacggcgagtagtcgtcccccatctcctcctcgccatcaagaagctccatgaggagcaccactccgtcgtcgtcggacgtcgccggcgccgccacggccatctcctggtcgacgaggccgccggcgccggtgccgccatggtagtagtactggtactcgccggcgacaccgccgccgccctggctccgcatcatcttgtccatctgcgagcaatggatggagagatgatttcttggcttctcgcccttcttggttgccaaggtgcaatggggtttatatatatggttatcagctagcttaattagcttgcaattaattaactagtttaattagccacttggttagttaatacctccattcaattctacctcccacctgtcatgtgtaccctcttcatctctcataaaacataaatatagtagcagatacgatatattctagatcttcgaatctaaatataaatatgttcagattcgtagtactactatgcgtcacatctaattttatattcgtttttttattatgtagggagtatcatgattggtgtcatcgattagatcattagcaatttggtttttatttaatacaaatggattagtgatcataattggttttcgggtggacaattaacggccgtgcttaattatagtaggaacggtaggttttgggaggcaacaagagaggaggtgattggattgtgagttgatcatggagaggtgaggagacagctaacaggttgggcaggatcctgcattggcctacattattgccaaattatcctgctatccacgtcagtgtagcgtacgtccttgcctgtgtacttgattgtgaatctgcttatgacagttttctgcgaatatttttaggtacacttataggcaccatgatttgaaccgtaagattggatatatatccactaaagcctcgttctttttcatactacatcataaaaaccgattttcgtgacaccgactacctgcgaaaatagatccacttttacgcagacctctaggccaatttctcgtgatggcaagcttgccgaaagactgtggcaagcttctttctgggcgtcagtccttttccggcagcggcttgccaccgcaagatggccatgctagatgggtcagtgcgggatagaggctatgttacctggatacgtcacaaatgcaacgtatccgtatcagatacgtggagggatacggatacgtatcggatacgatccgatacgtatcgcgtacgtatcagcgattttcgcaattttcgaacaattaaaataaatctggatacgttctcgatacgtccgcatggcaacgatcaatatgctgtctccacttttctcgcctgatgcccaaccctcgcggcactttcccccgccgccgccgccgcccgagacgccaaaggccgaactctgagccgccgccgccaagcgccgaacgcagcgccaccgtcgctacatgccggaccttcagacgccgaatgcagatctgcgtctagatgtattcaccgcctccaccaccggacccaacgccaacaggcacaatgccgccgtagcagccactgacttcctgctcccggtgaggcaagttccattgaacgatttgacttgttttgcttgcctcttcgatgcttgagtgcatgtgatcttatctgttcgatcttgttcctctttcctgttttcttggcagaagtgcaatatacagagatagctagtattttttttagatctgatgatttttgggattggaagtgtcaatgcatctagcactcctagagctagtgcggttgctaatctagctgcagattcatcattcctccaaatgatggtgagaagaagccactgtgggatgcggtgatatgttgagttgttagagaagaaatagaatagtcaaagagtatacggaaaaatcaaagagttttttttagatatattagttgtgctatttctcaactagtctacacctgccatcgtttcactttcacccacctgaatcaactacaagagataatcagaaaaattgctacattgtaattagctaatttctttgaatagttgatatttgtctttatatatagatatttatatacatatatgtgaacgtatccccgtatccatgtttttcagaaaatgacgtatccccgtatcgacgtatcgcgtatccgtatccgtatccccgtatctgggtaacgtaggatagaggggaagacaggggatccattcttctctctcaccctctccctttccaacccaaccacgtggacgaagctggagaacaccggagttcaagacccttctttgttggtcggccgacgacgaggcatcggcgcggtgcctgcgcgtcgaaggggactagctggtggttactgctgaatctaacatgtctcattggtgcgggagagtaggaactacgggcgaaagcctagccttcaggccggcaatggcgacgcctacgggcgtcgctttccccatggttcgttgctgcgttttctctcctctcccaatggtttcttcaagtgaaaaccacgtcctggttctctaggacgggcagcggcggtgctcttggcgtcatttccttcttggaggcgtcgtttagaagacccatcccttaggggtgttatgggcttgttctgtttttaacagtaggatcagacgtagacgcgtggtgtggttatcttttctttttcctgactatagtctcccaggactgtagacttatatttttttcctattatatcaatagaaacgtcgcactatcttgtgcgagttgttttaaaaaaaatgctcgtgaaaataccggcctacatgcttgaggaaaacaactattggtataaaatcaagtgaggcgcaggcgagagcgacgacactcactaagttcccggccctcccccgccccagcaaatccactggccctctctccgtctcctctcccttctagcttcgtctctcgcttgtcctacctcccctctctctcgactgcgaatcggtcagcgacgggagtaggaggtgtcaacaagccctgggagtggcggagcgacgatgggcctagcggggagcggtagatactgcacccatagttgccgggcgccgtggatcaacagcagtgggctcgggaagcgacggatcgatgatgggcatacaacggggagcagcagattcgacggctgcgcccctcaagagtggcggcttcggcgcccacaatcaccgggaacaaagtggtggatcgatcgacggcggcatgctcgagaggtagcgaactggcaatcaaagcgatgtgctcggggaggtgatgaatcaacaattcaacagccacgggcccaggaagaggtggattcgactatcgtgattgtcggcaccggcagatggatggcgatgggccaagcggggttcggcggatctagtgaccacaatggattgctgcggtgaggatggcagcttcagtgatgaatttttgcaaatgggtatcgaagcggggttctggaattattttttttggttttttagttcttttttcaaaactttgtgcaattgggagtattgatgtacccgtttaggaaaatcattttttctagatggccctcttaaggaggctttctacgaaaatcattttcatatacggtttcggtacccgcttgtaaaaatcgtaacttttcatacatacatcttgctggaggcagtagtggtgcccgtatgtgaaaaaccattttaaccatttgggaagatctgttttgtagtagtgctaggatttgaagtgttcgtgcccgaatccgtttgtatatatagtggtaacttgtgttgaagcctagggaggggtttcttcttctatgcctcgactgatagggtagtcagcgagcaaaggtactgtggatcgaatgtacccacgctggcgatggcgaaggaattggccaaaggtgagggttggtaaagaccgagggatgagataggatagaaataaacttattttgtgatacttattttgtgattaataaatgggactaaaaataaatttattttaagactgagtaacttagatgtgagtagcagcagcacgacatgccgcagacttcgataattaattaattaatcgccgctgcaatttaaaatcacgtcggcgccgtcgtgtggctggacgggagttggcccactacctgtacgtgtgttcgttggcttcttcgtcgtgaccgattggatatttaattttccaaagaaacttacaattaggtcgcgttttagttgatgtttcgtgtctggtgtccctttcttcttccttgctctcggaagcaacttgcattgtgcagttaagctgtttcaagcagggtttacaagaccatttttttttttgtgaaaaccatttgaaaaccgttcattatagctaaattcaatcctaccacataacagactatcttcgacgttcaccgacagtgataaaaatatcacttctatgcttgttcgcaccaaacccgctcaaaatctgaagaatcaacggtgatacaatggtgctactacgtaccgtgaaccagaaactgatacctaaacctcaattattagttcggggacacctcctaagtccgaggagcctgttctcctcagactagaggtctgtgagggcaaattttcagctctaaaacctttaaaggccgataaaagctcgatgcacgatttcacgcagtttttttttcttatttcaaagtatatggccatttttgtgcgttgtatgttttatttggtcatttatattgatctattttcgactattctctaaatataactatcattttatcacaaacaagattaactatatagttactaaaactgtacgaaaatatagacatagtagagttcgagatttttaaggctacaattgctagtaactcccgaagtattgggattggtttacttaactccgtaaaggacgaaaccggatattctacccctgaagtatgaaaaccggttcaaataacccctaccatagttttgtaggtgattttgtcatgtaaatgattacgtgccagcggtattggcttgcatgacacaaagattagtctaataaacccaagtttgtctaactattacttttcactcactgatcggcaagattaaaatttattactccatctatccaatagtataaggcatggtcaaacttggtacggttgacttataatttctcatgtactataaagtttatagcaacaaaactataatcatatgaaagtaaattcaaatgtcaatacaatataatattcttaacaaataaaatttaatttatattatactaattaatggttaaatattttagaagttgaatcttgaaatgcttacaagtcttatatcatgggatggagggagtatatcttaatactaatttacatcattcttaggctgattcacttattgcatagcctgttacaatagtctcctttaggtccaagaggccaaaatcattgccatgtcatcatgtgcatagcaaaaccattctagagggttatttaaactggttttgatatatatacattttttttgtggggggggggggggttagaatatcatgttttgtacttcggcggttacatagactagcctcaataattcagaggtgaagtagacttattccaaactcctatttcttcttaacaattccctctaaccaaacgcacttaacgtatttcaatatttttaagcacatatcttagcgtattgcatagaaaaaacatacttttaagcacctattaaacatctaggttttagaggtggcatttatgaattcagccccaatacttcagggatgaagtagacttatttctatgaatttaaagtgcgaggtctctgtatgtaaaaaacaaaactcccataaccaattcctccactagcttcatcctataaactctcaatttcttcctttcttctgggtttccttacaagcagcacaagggacatgttcaatacgagattaagcgtgcctcatgcgtcaacgtcgcacgaaacgcctcgcccatatctgacatggcaacaatatcggatatttttaaagctaccctctaactgtgcgttggaggtggtctaatgactctagctagagacgatccactgtgtgcggtgtcttgattttgctgttgatttgattctcactcattaattactctagattaaataagctgatttctttgattttcttttactgcacgtgtgaacagtgatatttaatgacaatatattcaccccatcataaataaatatatattatttaactttctttagtctttaaagtaaaactttaacaataattttatattagaataagtactacgataatactccctgtggagggagtacccctttggacatgtagaatgatgtttaataacgggctctcttcgttatcatgtaagtaaatttggtaataatgtggaagaaaaagaaggaagaaaagaaaaacgtcgttgctacacgtgacattggctcagagtcgactcttagcatttagtatttattaacgaaaaatttgttacatgagggtggagaaaaggaaaaagtgataataaaaaatatttagtgcattaatggttaaagaccttattatctctactattgcagtaggatgctctctaacgacatgaattattaatacagagagttaatattagactctacttcgtacctttttacatggcttaaaggcaaatcaaacaaagcattaattctataagttatatattgattattgtcagtatttcaaaatatcaaaactttgattaagtattattttagactttaaatatatttataaccgaaaagagtaatgtataattctttctataagaaaataattaaattgtccttgtcctatttagccgacactgagctagctagcccctctcatgcattacatagaggccaatggccggatcacatggagatgtctgcttaatcagttgcttctgcacgatgccatccatgatcgataggccgatatgatcgatttgtgtgccttgtagatttggatctgatcgatgatatccgggggaatttcccagctgccaagtgccaactagtgataggaaaccgacggccaccattgaacgtgcgccctactagccacggtgctgggcgtccatccatccgtccatgtcaaaggtgctttcctcgtgggcttgtggtcgtattctagtagtccttgcaaggtatggttgtcaacagcaataatcgaaaccatttatatattattttgttgtttcaatttgtactatcaattatactgtatttcattatcgtattattatagtcctattcggatgtctaggcaatggctataacccagtgccataagcacagataagcagtggactcagcagccgcagccataaaagataaaaccatatgttgaacagattctatagcccacctttagtatgagtgtaacagtatataatatgtagtgacccgttcaaaacattttcttaaagatagacatcgcatgcaacactgtaggtactccgaaatattaattgttatgtaaatttcaccgtctataaaggaaaattttggtcatgataaagctgaaatattgcaaggaattgaaatctgaaaattttgatcaccttagttatgtctaagatttttttttaagtaaggttatgtctaagaattaaggaattggaatcgtcaagaaagctattctacaagctagttctacaccctaattatatagttttgtgtttgccaggagggaaaagaaaaacataagaattgaagttttatatagatgtatacatgcttagaatcgtatgcacaatcattcataagtgcgcacatcttcggttttcggcgcatctatctgctcattgtgactgctgcggtcccagattcggattatatcaatctctttgatgatgtcctctcatctaggcataggtcatgtactatatgaactttggatgtacttcctcatcactcttttctttttacaaatgatgttttaatttaccctagagcacaaattaagtccaatagctcctactaatagcccccacgcatgcatcatttccaaccaattcatttcaaatattccattatcatgttcctattaaaaaaaaactccaccggcaaaagaaagaccaccccaaccgctttttcaagctaagagaaacctcaaccaaagctaatagcgaaagggcacacactctggcatcttgacacacagatccgccctcacggtttgggccttaacatgtgttttgagaccattgccttgtgtatgactgccgacttaccataggtcagtttttaacatttgttttgatccaagggatgagtgagtgatcatttttaaatcaagtccgaaaattcacttgctagtggagtcaaactcgggaactggtagttgctactaaagcattatagtgaatataatagcagactacaagttagctgtaagcatacatggaggagataagagaagaaagagaaggaaagcggattacagatttatagccagctgcaacacggactccaatacgttatgtgtataagatgtgggagcatatattaatgatgtagtatatgtttatagataattattgtatgaatgagctattaaattggctataaatgaattggagtcgatagttggctatactattaaacttgctcttacaaccactatgatacaaatcacaaggttgtttttatttctatgggttgggaaccatttcctgcgctcggaaaacggaagggtccattagcgcgtgattaattcagtattagctaattttttttcaaaaatgaatcaatatttttttaaaacaactttcgtatacttttttttaaaaaaaacgcaccatttagcagcttgaagaacgtacgtgcggaacacgaggaagacgggttgggaacactgagcaaagaacacagggttagaaaacatcgaaggagaccacctctcgcatggcttagatatatagcatggtgcgaaagattaacgacaaaattatataactgtagacaaccatgaattagctagggcgtgtccgttggaaggagatagagcgaaaaaaaatatttgctttttcatgtgcacattttctgaaccgttaaatggcacattcttcttttaaagaaatatatagaaaagttttctttacaaaatcttattaatctacttttaagtttagaataattaatatttaattaataatatgttgatcattcacatcgttttacatatattctcaatcttctttttctcctctcaaacacatccttaccccttaggaattcaccagaaagcagacatacattatgcaagtactactaattaattgtcttattgtatgctggcaacttcgagagaatcctgagaatttttggttgccagctcactgaaatcacatatgaatgtgatctcaagaaaatgtaggattttctgatcttgtgtcggccgaaacttctcatggacgcatcaaggacaatgtaccacttgcttgatcattcctgtgcccaactgcctaattgtctccatggcatcagggcataggcacctggaccaggaatcaatctaccggcaaggccgaccaaactcttgttgctaattaatcacccaacttgatttatcttaaagtccatgattaaaaaccgaagtgataaaggcaataattatgcttgttagctctaattaagtctaccggtcagaaggtagctgttggatatatcatatatattcgggtgtctaggttggggcccttggtgattagtctccatttgtcataaaataaattaacttttatatacgaatttagacataggctatgttaagatttattttgggatatatgaagtatgttcctattgttcctccatccaaaagtcagacctgtttcttttggcatcaagactaaaaaataattaactcattcacaacgtgacaaaaccaacaaacatgtaatcaataagtataaaatagctttttagtttcgattaacaatttaatttagcacatagtgactacaaataggatttatttctttttgaaaaaccaaagagttgaatagttcttagaattttagcaggagggagtagtatagactacgggtgtttaattaagatgagattagagaaggcattaataagtgatgattaattgggttgggatcgtgtgtaggaggatttgacccactataaatgcgcataatgcaaaggtgacatgcatatgtgctgcatttttttttcgattgatgattgtgtgattgaaaagatgccaagtgagatctaagtgagctggagaccaaatctttgccgatatttgatacgaaccagcctggagtacaggaggagatgacataagctgccctgatctttgcagcgtgtggtcgcgtactttgcccaagtattgcatactccattatttagagccacacgggacataaatttataataactctgattccatttctttcatataatgaaatgaaataattgccgcaccaaatttgatttcacaaggatctagaaagacgtctctaaacaaaaataattttcaaaattaatcatagagaattctaccatcgtcagaaggttgtattatttcttaaaaaaacacagcacaaatgtagatggtcacaactcacaacacacactctacttttataaacatcttcaaaatactggaccaatatatcttgagattaataaagttagcatgaacatctaactgttaacgggtatatcgttacaactgacagaaattactcgtgataaatctcagtaaattcatcaggcacaatcgcaagtacctgaggcaatcgagtgcaatgataacagttgatgataattttcctctactttttttctgcgaggggcgttgatatctttcattggtggtacggatctaattactgtcacgaattcggccgacgacggccacgatataactgaattttttttaatttttaattttatttagtaaaatattgacaaaactatttttaattaaagttttacaaatctacacccctaacgtccttgggagggtgtttttaaaaaatcactcttctagaggacattttttaaaaatcacccttctagagaacattttttatgatatggcacacgtcctttggcgttttttaatggttgtgtgaaatttaaaaggtgacaccctttagcactctaggacggcggtaatagggctacctgttaaatagcgacctacgatattttgcaaacagccccctcatagcactctagaagggcggcaaggggtcaacctgcaaaatagccaggcaccctccatgtggttattagaatacaccaacggacatgtgccacgtcataaaaaacatcctttgaaaggatgattttttaaaaaagccctccctgaggatgttaagggtgtagatatataaaactttgatgaaaaaaattatttttgtaaatattttattaaataaattaaaaattttaaaaattcgacatagcttgacctactactgaattcagcccacctacttctgctcaaagacacgagtgaattaagcccacctattttggacaacgaaatcagcccacgagtcaactaagatgcctacttaaggtgtgtttagttcacgctaaaattggaaagactaaagtgtacggacagtccttggggtgtgtctctaagttcctaaactctcaaaatatatatccaaatcctagaacttgtcatagtgtgtcatttaggtcc

SEQ ID NO: 27784 - DNA, 1898 bp, Oryza sativa
agaagaatgagaagagaatgaaaaagaaaaataaaagaagaaaaaaagaaaatgacatgtcacgtctatgtggcatgccacatcagcgccacgtaggatcctagaggggatgtgtcgatttgggacctaaatgatacactttgataagttctaggacctggatatgcgttttgagagtttagggacctatatgacacaaccctataagtttaaggaccgccaatgcactttactcaattggaaatttgattgaaattagaacgatgtgacgggaaagttagaagtttatgtgtgtaggaaagttttgatgtgatggaaaagttaagaagtttaaagaaaaagttgggaactaacccaagccttaattcagagcaagagtggattaagccgacaacgaccccatcaactaattaggcctttaaattcagcccactgctctgctctaatcacgtccgggttcggggattacaaaaaagaaaactccatagtgcctccttcaactatggagcaagtatgatttacctcccgcaaccgtatactataacacattcttttaacattcaaaaccagaccaatttgcctcctttggtgctttgcatattggttttatccaatgtgacgcggttttacctgacgtgccacatttaacttgattcacatgttctcacacatgttattcaaggaaaaaaaataaaaataatagtacggcccacatgttagccctcccttactgcttccccctctctccctcatgctctttcctctaactagacatttgggcgcacgttgtgcgccctatcagtgagggcaggtagcacaacaatgagagcactcgagcaaaccaaataatccaaagcatagttctattggggagtccatgaaagtataataaaatatattgctgtagacggaatttatgtttttacttgtcaatatcagataaaaccataaccatatggaacaacataaccattttttggacagatagtacgtaaaaaatgtgccagaaaaaacattctttccactgttacatagtttgcagtacataacaaattgtgccacggaaatatcagccaatgtgttgcgcatcctatcaatggacagacagtataatcaaggagccaaagggctaatatttagaacaccacatagttggttgtctgaaaggccattcttaaggcttgattataatcagtttttatatgcaatacaatcaataaaatttgccaaccacattggctcgctaaactgtagaatacatgcaacaccggagtttcatctaagcaaaagtaacggaacaacattagctttcagtcttgaagtacctcagaaccttagtatgtttaactgctatagtaagtttaagtgctatgcatctaaaattagataatatataccccatctgtattttaatgtatgacgccgttgaccttttgataaacgtttgacctttcgtcttattcaaaaaatttatgtaattatcatttattttattatgacttcatttataatcaaatattctttaagcatgacataagtatttttatatttacataataaaattgaataagacgaatggtcaaacgttggttaaaaagtaaacgacgtcattaaaatacggagggagtataattgaagcagtgcttcagagagatgccgttggggagtgcgcataagctgcagctcatggtttttgtaacgttgatcctgcaacaccttcttgatggcaactcttttcctgtctccaagcacttagcgtaaatgtcaaaaccacatcatttcgattcagaacatatcaaagaaatgtactccctccgttttaaaatgtttgacaccgttgactttttagtacgtgtttgaccattcgtcttattcaaaaaatttaagtaattatttat

SEQ ID NO: 27785 - DNA, 1182 bp, Oryza sativa
tcgaaccgggggaagtataatacacactaagcatgcatttccataagaccaagcacattacgtggaagacaatcccgaatgaatcatttcctagaactcgctctgccatatatctaattgtctgcagtgaaggtaaaaagcatcacatgagaaatagagcacaatatctcagattgacatattctatgttgtgcatcagagtcccagcttaccatgactaactaaaattagaagtgaagcatatctattaccttccctagaaagaacagattgtgaaatagcgaacataaaaggaaatcatctttcataaaccgttgcatcaactttgttctatctatggtagaggaatagaccaaatgaaacctcctgtattacatgcacagtatcaaatggaaccaaatttcttgtttgcaattttttaacggcgagaatcttaagttgaacaacaaaaaaatatggggaagggaacactacaacctcatcaaggaaaaaagtggaagcaaggtatgctctgtcatagtggctggtggaatcagagaatgaaaatcagtcttcagaacttctctgtcaaggtagaagtggaaggaaaattgctccagcttctgtgttgtgcttctgaccacacaatttccatcatattgttaggctgtgccatccatcagctgatattgtgagacattgtatgcattatgagattgtagaacatattggcaggttggtagctgatattataccataaggaactatatgcattatgaaactgtagagcaaatgatttcagatctaacctgcattgtccagattaacttgctaggttattatatgccacttggacatgaaacatcagattgatcaagtctcaaccaccttctgttagtaattctcagaagataatgaccatcttctgttagtaattctcagatgataatgattaaatgaatgttgcaatttaggctgcatggattgattaaacaaaaagcagtaatgcaaacaaatgattcaatatttccatcctttattttacttcaatgggtaaattgaaattagaaataatctgcaacagagaagctacaaacagtagcctaggaagtataaagagaatgcagtggtgatcgattgatctagcctaaaagttgctttgacacatacatttcgaagtaccaacagataaaactcaactct

SEQ ID NO: 27786 - DNA, 14962 bp, Oryza sativa
agatgtgaatctgtaatgtattattgtgtaagatgggaatctgtgatgaattttttagaaccctgtgatgtaatttttttaagagtttgtaatgtatttggagatgatttgtttgaggatttggagatgttctataatatgtgatgatttggatatgggaggggatggtgtgaaatcaatattcaatattaaaagcagaaaaaaaaagaaaaaatatctttagtcccggttggtgttatcaaccgggactaaagatgctcccatctttagtcccggttatttaaaccgggactaaagatagcgatctttagtcccggattcgtagtcccggttaaaaaaccgggactacagggggttacgaaccgggactaaaaagcatttctccaccagttatggtattctccacgagtatgacatactttggacatgcaaggactcaaaggagaatgtgaagacgtaactgattacatattatatactgtacattacaattaagaaaaacatgcaagacaatacagcagttaactagtaagagaaacattaggtacccaccgtttctatcgataggccggaatacaatttcttacgtgaccaacgatcgaggcaacgaccccgtatatatatatatacagcatgaatgcacacagctggatctcaagaaggaaagaaaagctaatctattatattattaaagaaatagaaaaatgagcctctacgttcgctctcatggcctagaaattctcacattaattggagaaaaagaaaaagcagagtccatataaaaatacaatttagaaatagctgaaattcggaattaaaaaataaagaatattagaagaggagactagagttcatatagaaatataattagaaaatagctgaaattcggaattaaaaataaggaatattagaagatgagtatagagtccatataaaaatataattaggaaataataaaaattcgtaattaaaaataaggaatattagaagtagagtatagtgtccatatagaaatacaattaagaaaaaaaatagaaattcggaattaaaaaataaggaatattagaagtagagtataaagtccatatagaaatacaattagaaaataatagaaattcggaattaaaaataaggaatattagaagtagagtagagtccatatataaatacaattaagaaaaaaaatagaaattcggaattaaaaaaataaggaatattagaagtagagtataaagtccatactaaaattcggaataaacataataaaattaaaagtagtgcttagagtccgtataaaaatataatttataaataactaaaattcaaaattaagaaaaacatgggaagaagagtttaaagtcaatataggaatacaatttagaagtaactgaaatttgaaattaagtttagagtccacgtagaaatacaattagaaataatgaaaattcagaaattaaaacaataaatattaaaagacgagtctaaagtccatataagaagaatatatataatttacagataactaaaatttaatattaaaaataattaataactaacacgtatgtaaaatacaatatgaatattacacattagtggtttcgtaaagttattgcaaaatttaaaatgatgttgtcattttaatatatttgaataatataatgagaaaacatatgtgctattatatgagagaaaatataatgatactagccgcacaatctgtacgggccaccatgctagttaaggtgaagacaattgattaagaagcaaccttgatcgagctagcaacaacagcgtcgaccagagaggaggaagaagagatcgaagaagatatggcggtggcggcgccatccttccccgggatggtgcaatggtgggaggagtggcagctccgcgtgctcgctctcaccagcctcttcctccagctcttcctcctcgtctcggccacgttccgcaagtaccgcgtcccgcgctcctccggtcatgcatctggctggcctacctcggcggcgacgcgctggcgatctacgccctcgccaccgtcttcaaccggcacaggcaaacggccagcacagatcatggctccgtgctggaggtgatgtgggtgcccgtcttcctcgtccacctcggcggccaggacagcataaccgcgtacaacatcgaggacaacgagctgtgggcgcggcacgccgtggccatgtcgtccgaggcggcggtggccgtctacgtgttctggaggtcatggtccggcggccaggtgccggagagctccccggcgctgttgctgttcgccgctgggttcctcaagctaggcgagcggctgtgggctctccggcgagccagctttaccaggctagccgccgtgaggtcctccgccgccggccggaggacgccggcgagggaggaggaggaggacgccggcgatgatcatattccgttagagagctatgtacacctagcaagcggctacgtacagagccaggctactggtgaccatgtccctaggcccaaagacaattacgtgttccatgtccatccgctgatcgaacccgagctccaagatgtgctcatggagctcttcgtcgacttccctgcaccctatcctcgccgccttgcctacctcaggtcgttcttggcgcttgaggacgacgacgcctacgaggagctctgcgccctgctaaatcaggcgttccagttcttctacaccaagaaagaggccgcgtacaccgtcgtcggcatctaccttcgcacccttcaccatgctcctgggcatcgcggccattgcaagcttcaacgacagtcgcaaggacgggtttgacggcagcgatgtcgtggtgtcatacgtcctgctctgctcgacgctcgtgctcgagatctgcgccctgctgtggctagccgattggcgattcgtcacgtcgcggatccagccggagatgcagcgcacggttgcgcagttcaacctaatcggcttcgccactcgtagacggtggccaaccatggtggtgatgcggatagcggcgttgttcagatgcaaaaagtatgtcaaccagcactggtatcttgggcatctttcgtcaacccccataatcatagagttcatcggcaaagacttgaaatctagatgggtggatgatctaaccaacgccgccgcctaccggagattcaatgaccggagaggccagtggactctccggcgagagaggtgctaccaagagttgggatggagcgtgaccgagctgccgtttgacgaggccgtccttgtctggcacatcgccacggacatctacctcgattgcaataatggcatcgaaaatccaccggctaccgccgatgagcgcgccgccgtgaaatgctcgcgtgagatatccaactacatgatgtacctgctcttgttccaaccggacatgctaatgcccggcacccgacagagcctgtttgctgtggcctgtcgcgaaatcaagcacgcgttgagggaccagaggcagcggctcgatgagaggggagttgcacgttggatttctgaaaacccaaatgctgcacaacctggagaccatctcgcagctgcacgtaggcttgccgaagcgatgatgcagatgaacgatgcaggaaggatgttgaaggttatcagtggggtgtgggtggagatgatatgctactccgcgagcagatgcaggggattcctgcacgccaagagcttgggtgccggcggggagttcctcactgtcgtctggctcctactacatagaatgggcatggaggtcttggccgacaagctccagaagccggagattcctcgacatgtacaaattcttccttagctttgtttttaatccataatcctctgttaaaatgttttgaggacaattgtcatctacatgttgaatgaatgaatgaaattaatgaatcagacatttgagggtgatcattgtgtaaacaaccattctagttcttgtattctatctatctaccatatatagttcaccaactgagcggggtctcatgtacatatacaactgacacttatattacttattcatcaaatccaatgtcccacgtacatatacaataattagatggtcacgattgactccacatccctctgacacccgccgcctcatcccacccgacccacgccccgctaccctctccacccgtgatccctcccctaaccctaatgtgcgccgatgccagtaacgatgaagaaagggaaagagaggagggagggagagaagacccggtcaaaccaaacatgtagacaccacgtcagctgaaaccgtcatccaaactgtcttaggatcaagtttgcaccggtttttagagttgaaggttgcattgcatctcgtattttagttcaatgatgaattttagactcggtgtcaaaatgaaggatctaaagtgaacttattccatgaacccacaccacgtacttcccatcaaagaattcgtcggtccaacccacacgaactggcgaaattggttgggaataagttcacttagactcccgttgagtaatcaaatcttatttgtatccctgaactacaataccagatagctcgaccacccaactattaaaaccgatgcaacttgactccctcgacagttttcaagggcggtttcgctaatgttgcgcctacgtggtggtattgacctagtcttcgtttcatgtgatgttgacatggctcttatgtggcattaaaattaaaaaaaatacatgtgggacctatttctcattcacataaaaatattataaaacccactgacgtggtagggcccacgtgtcattctctctccttcccttcttcctcttcccttctctctctttctttccgtatttctcctcccctttgacgtgcgcggggagcaggggccagatcggtagtggtggcggtggcaggtgggggttggagaggcggacgggcgctggagcggcgacggcagcatgtggagagagggaagaggataaggaaggatgaggtggctaccttgcgacggtgcgagaatttggattggtggcgatggcagccggagagggaagagagagagagagagaagggggcggtggtggatgaggatttgggagcgggaaggcgagcatggggtagtgtggcgaaaagcgaagctcgctggcctttttataggtgagcgctagtgctacacggtgcgggagagaggcggtggtgtggctcccggtgtggcatgtatgtgctggccgtggcagtggcacaatgagcatttggcgtgggtgacagcgccatgatgacgttgggcagcgtggggaagatgggatgcagggcggccgcgacgcgacgatgatgggttgagttggacggcgccctttccgccatccaattggtcgcaggcggcgatttaaatgacacgcttccaacaggcgtcgctgtccttctcccgtcctttccctcctaatccaagctgtccacacgactcccgtcctccactctttgcttcggtatctttcgttcatcgagaaccgccgccattcaccagaataccgtcagccaccatcggtcgtcgatgcgctcgcctgcctccacgtcgcacggcttcagcaagaggtggccgctgatcgccccaccacgctcagggcgctcgacatggggctaatcataggggggaaacctcttccgggccgacctcgagcccgccatagcgcgcatcatcgccgaccctggtaacgacggtgaagcgaaggccatcgatgaggagacccagccggtccttggttatctcccgcagcagcgtagccctccgcccctcctccgccggcggcgccctagcccgtggccaaatgccaccgcctatgctcctgctcccgccccccccctccaaacgaagagaaaggggagagagaaagagagaagggaagaggaagaagggaaggagagagaatgatacgttggcctcacatgtcagtgagtcctacaatatttttttatgtaaatgataaatggatcacacatacatttttttaattctaatactacataagcaccatatcaacatcacgtgaaatgaagaccaaatcaatattgctacgtaggcacaacgtcaacgaaatcaccctccaaaaccgctgaggaagtcaagttgcaccggttttaatagttgaggagtcgagatattcggtattgtagttcaggatacgaatcaaattcggtcactagataagggaatcacactgaacttattccaattggctgacatatttttagcctacgattcagcccatccaaagacgaaagaattaggccagataggccgggaatgcatctcatctcatgttagaattgctcgccacggcaggcctgcagcagacttgatatagtttctttacgagaacccttcaattgagagttcagacaagctcagatggcaggaaaaatgcaattatcacatcaattatgctaatactgggagtctgggacgccccaaaaggaaaagaaacaagaaaagctaatccagggacagaagccaccacaagctaataattcactaataatcttgtatggagtgccaaacttttacatccaaaaagttccaaataacatgaaaacctggaaatttcagagcacatgcatttcactttccttctgttctcccctcttttttctaccagaaacgctaattccaaacggagaagtggagggcaaaataaccagcaaaacaggtgtggcctatgcctttgcctgtacagcctgcatcttctgttgcaacttgaagatctacagaaacaaatatattttttagtgaggtcttcaaaataatcctatttcatagggttcaactaaatgcaatgtcattattgtcctatgtcatgctctgatgatgtgcaaagtacagccaagtcaatagttctagaaaagatttgtagcaattaaactaaactaatctgttaaccgtgccaagataattgaaccttttacggttagtatggcatcatgtaagaatgcaggaacctaccagcaaaacaatttcaccaatactatctcagtgtcatgctcaaaatagagaagtcagattaagattctttccaaaaacatatatcccagtttttaatctcagtcctaagactgaaaagacattgcaaacctgtatgagcacacatattgcagcagtttcagctagtttgataagatgtatttggtttgtactctactgtctagtttctagatgtctactccaaagaaccagacaacttcagcacagaacatacagtagatgtccaagcaaagaagacaaaagaacgtctagggggccgccccgtcttcaataaggaactatctttctgggcaacacacatgttgatgtattataggctgaaaacaaccgaaatacccaatcgtggtgatcaatggatgaggatgcaaactgaaattttttaaaaaaactacaaactttaaggctctctgcgtaatcaaacagataaagagagaggaatgcacgggagaccctgagaggaaggaagatttcagatagttgcgtcaagagtcacgaccagcttgcaagccaaccatggcacgggttcagcactagcttcctcacctccaagctgctgcctttttcattcagtatgcctctcctatttgactcagcatactatttgccatagcatactgaatgactctgtgtcctagttgattcagcacaagaccacctactattccatctcacaaaagtacaaaaacctttacaagcatcaaagctatggcaaagatttggggtagttgtatggtggatcaagactgcaaaataatcctagctacttggattagcccaaaaataagtcccagcgagaaggaaatatgggcttataagaaacataatcaagtatccctaagttcacgccaagagtcaaagagaacatcaccatgtttgaatacttgaacaaccaaatttattttatttcacaactctttaaccaaccattctcaccaacaatgtggcatataagtttaaacattgatggatatcattctaatccttttgccaagtaccttctttgtagttcctccattttcaaatacttggtgcaccagacttctcgaaaaaatttatcacgatttacccctatgcatgcacctacttttccacctcgtcatcagttcttgagataataatatggtattgtttgtcattttttattcaaagtacaattgcatatatgcatgtcctggttaagagtataaattattcaaaaacagaggggtaatttcttcttcagcaagggatctcaagtatttttttttctttattttcaatttccatcaacgtgtccaattcaacctatcattaaaactaaactaggggcaggcagtagctatgcatagtttagaaattgcacatcatattcatctgtaaaaaatcaggtatttattatctatattgatcagaaaatcaaatagattgtagagtatatagcctgtgaaaacagtaatgtctactccgaaattcaggccacaattttaaatggtcctacataaaaaggaaggacaaatctctcataaccactgaaatttcaccaattcagttatttggcatacgttgtcttaaatgcccgtctaggtccagggcctatgtgtcacagacattaaacgatcgtgcgaaatctacaattccagtagggaatcgccaccaaaaaagaaacaattacttctatgctagtccgcgtatcacctttgaattgatgttcctaactgacctgccaataaaaccagaaataataacaagaagatgaacataccgattccttcttgctgttctgcttttcctccaagtccttgagcgctcgatccatccgcttcctgccgccaaagaatcaaccccccagcatcagcacaactcgatacaccccaaaaacagatcaagttaatcagatcaccaaacaacatcatctcaatggctactcacagctcagcggagatgtactcgatgcgcttcttgacgttggccttcgcctccgcgagatcctgcttgaccagcaccggcccgatcagcttgtacacgttcgcctcgtcattcaccagctccagctcctgcgcgagaccagatcgaatcagaaacccacaccaaaaaaaaagaggaaaaatccacatagagcggaagcaagagagcgcggcgagcagggcatgccttgaggacgagctcgttctcgccgacctggatggtgtactgcttgcggacctggtggttcttggagatgtctgcgagggggaaggaacggacagagctagggttagggtttcgggattccgaggtgacgagaaggaaggggaggggaagggggggtttcgagcgtgcctttctggatcttgctgagggcgttggcctgggactcgaggtcgcgctgcatctcgcggacggccgccggggtggacgacgacgccgccgccgccgccattggtggtgctgcctctgctcccctccgccgccgccgccgccggattccggtgtggtgcggaatgctagagttggtgtggtttggccgtttgggctttcgctggctttcttttccctttgttctgagttctgacatcgggtactattttgggcctagatgggctcaatttggcctagctaatctaacccaaaaaatgcaaaatgggctgagaaaagcaaatgttattgtttgggggaaaaagtacaccgaaggtccctcaaaaacgccctcaaaccgcaaaaccagatatgcggtgtcccttaactatacaaaaccattcacccgaggtccttcggtggttatgaccccagttttggcctatgtgggacccacgtgggccccacatatcactgtgccacgtcatcaccatctctctctttcccttcgtcctctctctctcacttttcctctctctaggctggcgacaggcgacgctggaacaggcctcccatcccgacagccaacgcctcgctcttcttcacctacaacgaggccacgcacccgctcacgccgccggcctcctctgtttgtgtttggtgagtggtgtttgatcggcgtcggtgtttggtggatgccgtgcaagccgagcggatgcgcgcggggctggaggaagcgcagcgacggcacgtccgggcgctggtggcggccgcggcgcgcgccccgacggggagggtgcgtgcggcggaggccaagctggatcgcgcatgctgccgcaacgcggagctagaggagaaggtccgccagatgagggcggaggggcaggcgtggatgggcgttgccaagagccacgaggccgttgccaccggcctccacgccacactcgactagctcctccagtccccctatgccgtcgccgccgccacgggggagggcgacgccgaggacgcgcagtcatgctgcttcgagaccccaggcggcggcgccgccgccactgccgctgacgcggtgtccggggcgacgtcgtgcaaggcctgccgtgtcacggaggcgtttgtgccgttgctcccgtgccgccgcctgtgcctgtgcggcacctgcgaggccgccgttgatgcttgccccgtctgcgccaccaccaagattgcctccgtccatgtcctcctctcctgcagtcactcatatgtgccacaccagccacttcatggagtaggaaatttcgatagcgcaacagctatggccagaccgaaaccgggcatccgtcagccaactccggtgtcaagcaagctaacaacaatcatcctgtcccaagttacatggaaattcatgctagggaagccacggttctgtgcatcagtgatctccgggccatgcgagttttgtcggtggaaacaacagtgttcggtgcggtgaattgaatggttgattgccgatctcatctgccgcaggtaccattgcttcaaatatttggcagcccgggtcggcacgcacgccgccccgtctccccgtcggccgttgctcgtcggttgtcctccccatcggccgccgcccgtcccggtaccccttctccccgccgatcctcacctgtcgacgacgtcccggcgccgctccccactcgccggccaccgcagctccgcgcctccgcttcgctggccgccgcgcgctcacacgccgcctccgccgttcgccactcaaccccccctcgccgcccggttgtctgctccctacccgtcggccggcctgagaagagtgcgagagagagagaatggaggaagggagagaagaagaggggaaaggggaattgacgtggcacgctgacatgtggagcccacgtgggtcccacgcgccacataggctaaaactgaggtcaaaaccactcaaaggacctcaggtcactggttttgtatagttaagggaccccgcatatctggttttgcggttcgaggacgttttttatcccgatgacaagttgagggaccttcggtgtactttttccttgtttgggatcacctatacatttgtcaatagatgtaattatagtacaatcgagaagtaattacactgcaacttgcatgtgacttgtatgtaactttcaaatatctctccgtaacatgattttggtgaaacggaagtcgtggggatgaatcctttcactgtgtgcgcatagtgacttttttccttcttcacttgtacaaatcttgaaaaaaatataatggttcaaaattatgtgaaagttacattgaattatatgtaagctgtatgtaaattacagtgtaattacatgcaagttagcatgtaattatactacgattatagtgtgattacatctgtcaaatttttaggagaaaatttatcgacaaatatatagcaaaattgtattgttttgtggctcaatgtccataaaagacagagttttttaaaaaaattacagtaatatatttttcttttacaaatttacgaaaatatacttctcccaccctttaggaggttatcttttttataaaccgccttctgagagagcagctctaatgggtttgttcgttagcaggatgctacaaccggctgcggtgatagctgcactgcaagcagtgtaatttctgctactctactgtagcggcttatgaatctctctactgaataggtccaatgacatagcgcggaggggttggagtttaacatattgtttgcatgaacagatatgtgtagaacctggtttttgctggaattaaatggaattatcgagggagtgggataaactgtgtctttcccataggacttcatttgccacaatcacgtacgcctgtaaaaaaaaaattaaaatcctatttgggtccttcccgctctctatctagacggtaactcgaaaaccgtctattagaaggacagaaagggcctatatgcaaaatttctaacgtgtccctaggccccgaaccctctacgtcatttcattagatatatcctctaggattgtaaaaaagaataatgtatttctataaacttaaaaggaaaaatagttgaaaacattgaaaaagcaagtgttggaagatgggccggcctatattggattagacttctagccgagaacattttttgcaaggtaggcccatgtactttgttagttgcatatattttgcaaaagtaaactcctctgtgtttctcttcctcttgctatggttgtttcttttttaatgagtttttttttgttttcaaaaagtgggtctctttcaatggtaatttatcttttatgagttcctttttttccctttttttgtggaggagacttaggagaacttcttggtgtaccacaagctacaaaaaagagactccaaacttgcaacttgggaggattcctcagcccatcatatgcaaaggccaagatgagcttctctgcagaacaaatgattgggtttggactggccaacagccatgcttgcaaacaacaccaagagcaagtagtcaaaacagcaccttcttttcctccgtttccccatcaaattccctctctcatcctctctttacaaggaatttcttcttgatggccttctttctaattcctctttcaaaaattccccactgttcattttgtgcctacaaaacatgaaagaagaatcataacggccattgattataaaactatatatgttgccacaattgatggaatggaaccatttgggcgacccatttgtgtgcacgctttgcctacattggtactactacttttgcataatatcaagaccgccaatttgagaatctgagcctaacccaaaaggagcatatgaatatatgatctccttttgttttcctcttccacttcttgttcttctcataaaatgttggcacttggatgcatattattggatcctcagccccacatacttgtggaggtctctccttagactccaacccactttctcgagataattcctagaaaaagctaattgcattgtgttgccccctcttccaaatttgattgtgtggggaggacaagagaatatcggtgcactcccacttaaactaactcttggtgctagtggaagttatggttaattgctttctttattgaaagaaagggtgagagtgtgagacttccctttgatggacaccttgaggaccacacaatctcagccaactattgccaattcgacgctcactatcaatctcattttggggtccattgatttgtacatctagttttctaggactggtctaaaaaacaatgcaagaacattgctgcacaatgagtcccaaaagagactatggtttgtatgcaagtttttaggaaccaaactgaatatgttgacggctctttcagtgagatcttgaaaagtatgatctattctatatcaaagaatcaattgtgtatatgcacaatgtaacactgaaatttttaaaattaattatatatactttaataactttatttctaatatatatataatttaatagattttatttacagaaatgtgatgccaatggaatatcatttgttatctgtataattacaatgtaaaaaaggagataaaactagttaaaaggaagtgcacgagtttattagaatcaggtagaaatagtatgataaatattatcatggtcatacatattttttgtggttcctaattatgcacatagcttagctaggaccagatgaataccatatgaccagaaatccagaattgtatcaacctagtttattttgcactagggatagtaggggtttctctagtagcgcttgtttgcatagtttaagtgttcaagttgctacttatttttaccaatattatcatttttgcatgcaaatgagcaatttcatcaatataacctgcgttatttcacaccaataaattattaggagttcgtatgctaatataaatttctggtttgaaatggtacagatagaaaggaattacgtcacctggtcacaaaagacacttttatcccatagaggcaattttcgcctctatattgtagaatcatacacctagaaaaattttacaagtttatgagatttttttatgacaaacatgcacctatcattcttcacacattcaaagctccaagctatacattctagattaaaaagtagggttaattggatccatgccattgcaaatttatctattcagaaaaatatcactacaatttgtctatacgtagctgtgctactggaattttacaaaattagaaccataccactgccgtcacgttctccatccatctcttttttttttgtcttcttccttctttctcccgtatcctctcactctgctttctttgcccggcacggcgaaggccaaggtggtcgccatggccactaaccctccgaccacggcctagccactaatggagccgctcctccagctcggccgcgcggcaacgggtggcgtcgagctcaacctcgttctcccacagccgccgcaccgctgacgccaatgcgtctcgaagcagcagcactgggcgtcatcagccacgccaatgaggggtcaaagttgttgacttgggcagggacggcatgaaggaggaggtcaagacatgtggcggtgacctcgtcagttagagagcgaggcggaaggagct

SEQ ID NO: 27787 - DNA, 18013 bp, Oryza sativa
aggcatccagcacggctcagatatggtcaccgttgatcccgttgctggcccgcctggacaggaggaaggcaaggcacgcggcgcaatcaaagtcaccgacttgggcagggacaatgcgaaggaggtggagacaagcggcggtgacctcgtcggtgagagagcaaggcggaaggagctcgggtcgatctggtcgtcgtcattgtcgttcccatcgctggtatccgacgcagcttagatctggtcgctgtcgatcccatcgtagaccggcctagacaggaggacgacacgcgcgtcggcgaggcgcacggtgccgaagtgccgaacatgagccctcgctggcacccagcaccgcggcacgtagctacttggtttgcctagcgtcgctgccacgccgtgaatggcttcctcttcctccttggctccaccatggtcatcttggtctcgccgtacagccatgttcgagctcaagagacgggagaaagaaggaagaagacaggaaaaaaaaaagatatggatggaaaacgtgacggcagtgacatggtcctaattttgtaaaattccagtgacatggctacaaatagatgaactgtaacaacatttttcttaaatggcaaatttgtaatgacatgggtccaattaaccctaaaaaatatcataaacaacagcatcttcagctccatgcatggttcacgaaatcgatcagttttcgtgaaacctctaggtctcggcttataaaaatcagtcagtatttggtggtttctgtacagcattgaccgaaagtcaattggttttaccagtttttagtaaatcagtgaggagcgattttcacttcgaaaacgaaaggtgaccactgacttcaatacttcatgcattcagcatttttcttaagagtaaatttcacaaaactacatgtattttgcacaatttatcacaaaactacagatttaagagcttgtttcacaaaactacagatttagtatgcccgtttatcacaaaactacaggtactttgtacaatctatcataaaactacagatttaagaacttgtttcacaaaactatagaattagtgtattcgtttatcatagaactacacattgagtgtcttcatttatcacaaaactacaaatttagtgtctccattatcacaaaactacaggttttgacaatgctaaaacctgtagttttgtgataatgaagacattaaacctatagttttatgataaatgaagatattaaatctgtagttttgtgaaacaagttcttaaatctgtagttttgtgatatattgtgtaaaatacctgtagttttgtgataaacgaagacattaaatttgtagttttgtgaaataagttcttaaatctgtagtattgtgatagatcatgcaaagtatatgtagttttatgaaatttactcttttcttaatgaccggagaggggatggtgcttaattttagaatttaatttaaagggttttttttcatgctttctgttttttaagttgtgtttccatcagaaaataattttattttgcactcatctcacacaaaccaatacaaagacaaaaaaaagagagatcaaaataacatccaatttaacaaaccccaatgcaattatctcccactctaacaaactccaatgcattaatcctccactttattccctcgctttttattacactagaaaaaatgcccatccgttgcaacgggtgaaaactatttaaattttgttattgttataggtttagttaaagtgaaatttactatgggattcgcttgaatatatattttcttagaaaatcatgagttgcagctaggagtctaatcgtcttaagttagcatgcgagtttattttaaagagatttctatacaactccttttgtattttcaaaagcggaccaacttaaaaacggagtcaaacatggatatgtattttcaaatgcgaatgaaacttaaaaaccgactcaaacacgaatgacctaccaaagtaccggcaaaaacatctttaatttttataattgtagagatacactaaagtactttttatttgcttctggcttgtatatctcttctctactattataaaaattgaagatatttttgccggtatatttatacatcatcattgtttgagtcggttttaagttcgttctcttttggaaatacatatttgtgtttaagtcaaattttaagttcgcttgcttttagaaatataaaaggagtcgtataagaaatctctttaaaaaaactcgtatactaatttaagatgcaaatcggactaataattgcagctcatgattttctaaaagaaaaatatgtccaagcaaattcacacagttaagttcaccttagctaaaccgtataacaataataagattaaaataatcttcacccgttgcaatgcacgagtattttttctagtcccataaaaaagtaaaaaaaaaatctggaaaacagtgttttttttaatcaccggtgccaatcgtctgtagtacaagaaagaaagacgcatgcattgccttgggccctaggtgataactaagtacaaattccacctttaaaaagttctttcgtgagtattttaattggtcaattatctagtggctccaggggcttgatcatctgccaaactctcttgtgctccagtaagtcccccccatgaagaacaagaaccgaatagtacccttacacacctctagagaactcaaaaggcatcgatccatcttatccttgcactgatcgatcttccaaagtccaaactcaacttaaactaccactatggcgtaaaacaaactacagctgctcatcatcatcattggctcattgtcacacatttgagatcgactgatcatgtaacgtgaagatcgagctggcgccgccctgcagtgccgctgcatgctgctgctcctgctccgtgccgaactcgattctttctcctcgtggctttcgtgactaaagaggagaaaaaaaaaatctttagagcagcatatgccatggctgaatagccagatgatttccgataattatttaagtgtgcaaacaaatgaattaactattttaaaatttgatttagaatatttctctcagaaaacatacatcgtttttttttttttgcaaaaatcacatcatttaaaaatcacttggctgggaatttgtcttgggtaacacacgactaaagcaacagaaaataacattaaaacaggtgaaaagaaaacacctaaactaattaaaattaaatctcgaaattcaaactatggcttataatacatagactaatttgaaattaaatctcaaaattcaaattatggctttgtttgatttagattattgacgcgaatttatctatttgattattgatcacaagaatagttaaaatattttaacaaagaaaactaactaataactcagaacgtataagcaattcagcgaaagaaagttgtctgagaaaacatatttctcgaaacatggagcaaaattatccgtttcaataatccgataaacacacagaaaaggacatgcgcacaaatgtaattaagcgggcaagctgcagaggtactccctccgtcccgaaaagtcacatccagtactacgaatctagacatctctatccagattcgttgtattagaacggagggagtacacaactacacaaacgcgcatgcaacacgaagttgatctgtcggtcggcacagcggccgtggcagcatcgacggccatttgtcgaagctgcatggacgctgccctctgggcgaacctactactaatctcccgagaggaacggggaggaggccgaccaccactggggtcgttttctggagcctctgcctatgcaatattgcatgtaatttgcatttgcacacccggccggtggccactgccggtgcaggtgcagcagcgacgtactactagtctactactactactactactacttctacctcatccccctggatggatagctcatagctgggttcagacttgatctagctacatcgtcatcatcagtgatgtgaaactaacattggcttagctagctagctaggtgcgcatcgcaccgcatgcagcagtgagtggctcatatgtgctgggagttgggaccagaccggtttggtcagaattatcggcaaccggtggtaaacggccaatatcattacaaatttaaatttgttttattattttttcattctcaagtttgtaactgcacggccggatgtgaggacctgcaagtcacagtgatgtgtgaggtttacatacaagaatagagttaaatacccgtccacgaatataagaacttctagcatttaaaattttatccataaatataagcatttccgaagaactacttccccctccaaccacccctcagtaactgtttgcgcagttttatcccaattgtagtattataaagggcctttcccatctcaaaagctagccgttgaggtgaggagctcccctacttatatattaggtccattgccctttcacaaccaatataagactattcaacaccaatcaccccttatttaaccataggcatcatagtcttttcgcttcatttttaatctctctagaagcccttatatttgtggacggagagaccgagagagaatagacaacgctgtcaatgattaatcagggtgtggcatgaattgttcaatgggggtctaccagaggtactaacatgtaatgaccaaaggatcaagtggctggatgatcaagaattcgttgttggaaccttatcatgatcattgatttaattgacagctcacttagagaggagaggctccattaatctgcatggccaaattatttggactgtgattatctataatttgcagaggttcaggtatgctcaatctggtaaattcctggaatcattttctctttctggttcatataagaacactaaattatttccatataatcctctaagataagcaatcacaagatatgaaggaaatattgacacgcaattaaggaatttttcactttaaaaacaaacaattcctcctttttttttaaaaaaaaaagaaacaattccttacctctcatatcatatcccaaatcttcattcataaggtctggcaaagattctaaatcacccctggaatcatttcgttgtcgacagcactatcacctttcacaaattctgcttcatctgtttgtggaaattgtactctgaaagggaccaatacaaatagaaggcagtaagttagtaatcaaccatggcgtgcacattcaacatgttattttcgtgaatccaagtaaaaatcaataaattcgacaaagactaaagatatatcgatcacacccataatcatgtgcacggtaatatccttgttgcaaatatctgtgtccaaattttgacacaccttgtcagccatgaaaaacaagcaacttattgaccaattttattatcagataaaatagtataagctaaaattataacaaattatcattgtaactgtgaaaggcaaaagcgtatcaaccacgctgtcatcaagttcacaaacagaaccatgataccaaaaagggcatgcaaaaggtatggccgtgtacgcaaacaaatgattccaaaatgctgatatgggaacaggagtgctcaaagagcagatcatataagccagataacaacaaggaatagaattagataagaccaatcaaaagtacagaatataaagagaaaagaagatgttactgaaaatgactaatcaggatggaaccatatcactgacgatttaaagatctgaactgaccatggtctatagaataggaagttaaccctcaacataaaaaatttcacaagtggctgtaacattattagccttcagcaacagctaaatatggcattcaattgataagcagattaaattagatttgaacttcacacataatttttgagacgttgcaatcagcatggtctatgtattaatggtactacccatgtgagaccttcccctgtgttgtttgaacataattgcaacaacgtttcaaccagctcatcattataaagacgaacaccatcgccacatctcctaataagtaagaacaccatcatccacagttgaaagatgcaacaagaaaatgggaatggacacatgcatgcacatgcctgcaaggaccgccacttcatcgttcaccactctcacatgatcacctgtgataatgcagacgacatcccaacagaagcaagatatcaggaacacaagaaacacaaggaagtggctgaaaattctggttgtcagattgttttaatggtcctgtaaagcaccagcttttcatagaacaatctattaaaagtactgtataaaagatattagcacaaaagtgtgtttgtaatacatcccctccaagctagttgatattgtaaaaccatcaaaccgttagtctgcttcacctggactatatttttagtattatattcttttttcaaaaattagaataaaaaatctatgagcagtgctgaacaaggcccttcaaaaagcagtagaaattcgttgatatcaaaagataattattccatcttaatgggataaactcaatgtagttgataagaatcgaaattacagaagatgcaaacgaatcaacaaaaaaaatgcatatttaatagaaaaaaggttgacatcccaggtagaggatggaccagtagtcacctgtatggaattctgcctctgaaagtatattgaagagcataccagatagggactcgtatggtttagcttttggccaggcccacaaagatagtactaatacacaaatagccctgaaatttctatttcctcgtgtccttcaaacacgtgcaatggcataatgatggctaggcaacaatggataactaatgcatttatcattgctaaattatagacaagttcaacatagttccttttttctggaaaggtttttaaaatagaaaatgagtaacattggacgttattttacaatttaaaaaaatgtatagtttaccttcaaggaaaagatttaaccagtatatgattgtcaatgactttgacatcataccagaaaattacagaagatgtacgaaaaaagtatccccagcagcacatcctaacatcaaagtaggcaccacttattgttgtcagccagtatgccatagtaccctgcatgacatgtgagcatctgtcaggatagcaattagcaagtgctatatccagccagcaaaatcattacaaaagtaaatcatacgcttattattcagttataacatcgacaagcccaacaattagtgtaccaagaagaaggttttttcctttgtctagaatataacttcggggtccattgcaaagcacaagatatgaagtgggtaccatctgaccaagtactggctgattcaccaagaacgcgatacaagacagaacttcaaataagattgtaaacaagtgaaacttttgccagagatcacaataatggagatacagtctgttcattcctcactggtcccatgaaaacaggcagcccaatcagtgcaccggataaacactaattgcagcaactggtaggcatcagaacacggaggctacttagactgagtgactgacaagagattgtggatgatcttattagccattcatctgctttaattagttgagatgaacgtagagaatggatccttcacccccactaaaacaaatcttagttgaacacaactaccaaaagaatatacccaacgattaagtccattgcagattactggcagaaatgacatccatgattccggccgtcctgttcacatttgcacaaacatgtggatggcagtgctaagaaaaacatatgtcagaagtaaatttgactgagattaacagaatgccacttactgatgcacgagttctttttttaacctttgacttgggaaccaatggctactacaaaagtaacaattatgaagaagcatagctatccagaaattaattactagtcacaattgccacttcagcacaaggactggatgcacaacacaccagcaaaacaatacacaccacagactgttcttggttgaatcgaggagagcaccagtccacagaaggagcctgcacattcaccagagcaaatggttggagaggagcctgttggttcttgctcaacagaaggcattcgcaagagaatctatccttgcagatcagctggaaataaattgcttcaggagttaatttgactgcagctgatcatctaccaaaagaagtcaactctgtctcgtgatagaatctgccgacttgtcttagctaacagcttcccacatctcccatctaaaacacgcatgccctgtccgttgttttcctcgtaaggtacaggacacgagcagtttccggttcccttctttttaaaattcctcaccttgaccctgcatgttcatcatgtgcagcatacatatatatatatatataaagacccagcctccacaccctctgcaaacagagttgggtggccaagaacaagaacagcaaagcaaccatgacccaagctcactcaaaatcttgcttccaccagttctgggatggactccagatcaagaggagcagcgatagcttcactgtagagctactgccatcccttggtgcaactataaaccactccaacaagttgcagaagttcatcatatcgccttatgatccccggtacaggtgaggttcacactgcactttctgtacctatcacatgctgcaaggcatataagtaaacagcagttgctgacatgatctttgtttgctttgtctgtgtgtctctcagatcctgggagctgttccttatagtcctagttgtttactctgcctggatttgtccgtttgaactagcattcctgagggacttaccatctaagcttttgctagttgagaacattgtggatatattctttgccattgatattgttttgacgttcttcgttgcttatgtcgatagcaaaacacatcttcttgtggatgaccgaaagagaattgcaatgaggtgtgttcctgcgttactcattcctatgatactttcatgttagaaaccccacatttggaattgaaaaaggcccaaacgattctgccctgacattagcaaactacgatcatctgcaggtacctatccacttggtttatctttgatgtatgttcaacagcaccatttcaaccaatcatccttctatttacacacaaggggaatgacattgctttcaaggtactcaatttgctcaggctgtggcgtcttcaccgagtcagttcactatttgccaggttcaaaatcttgtccaggttctccataatttgatggcgaatcacaagtgacaactgcaacaatttaatcattctattttatcaggctggagaaagacatccgattcaactatttctggactaggtgctcaaaacttatttctgtaagtccttctgaacaaaagaaacttaccttctgtgttctgtgcaaaaatttttctatcttgcaaagtactagttatgtgcctataggaagaaataagctggttcttatgtgtataaaatatgtattgaccaaaatgcaggtgaccctcttcgcagtacattgtgcaggatgcttcaattatatgattgctgacagatatcccaacccagagaaaacatggataggagctgtgatgtcaactttcagatcagagagcttatggactagatatattactgctctttactggtccattacaacactgacaacaacaggatatggggacctacatgctgaaaatccaacagagatgctatttgatattgtctatatgatgtttaatctgggcttgacagcttatctcattggcaacatgaccaacctagttgtccatgggaccagccgcaccaggaaatttgtaagtttctctacttaccagcaaaaatgtcaatggcaaatcttctgtctacagaaagatcattcagaaatgtagtttttagtgagatttatatagtgctgaatgcagcagattatggcagacaagtgaaaattttagcatttggaatgccattacagatgtgatacactaccctttgatcataaaaatacaaataagctgcatatggatgccatacaaataaatgatgtcaaagatctgagaacaaactagcattttggttttatgcgtggtgggatgtatggttacatataaaatcatgcttattcaagagcatctacacagttatacaatttatatgaattgtgtcataggaattagttatatctaagacatccaggggatcaacaccctaagaactaagcaccatacattcataatatccaatgggtataagaactattatagtttcatttacaaaaaaaaatggtcatgctggaccattcttttaagttcttgtgcaaatggcagaggcgggttttcaaccatagagcaaagcaagggaataaatgaatagaatcctgttcttgtagtattccacaaggtacaagttcttgtatccctacgtcatttgaccattctaagggacaacaacatcaacaaaatatcattcaactcaagggcaagaatactaaaagaggtctgaagtgaatgcaaatagcatagtcatcattttaactaaaacggttactactaccagcattgttgttccaatatatgtactgctatattgatgatcctttaaaaaatatatgtgcagagggactcaatccaagcagcatcagagtttgcagcacgcaatcagctacctgagaacataaagcagcaagtgctatctcacttctgcctacaattcaagacagagggactcaaccagcaggtcatgttagactgtctaccaaaaggaatccgctcaagcatagcatacagcttattctttccgatcatccggcaagcctatctcttcaatggagtatctggcaatttcattgcagaactggtaaaatcatgaaataattcaatattttcgtagtaccatacaaaagcaatactttccagtctttactaattgaatatgttgaacaaaacaggtcatggaagtgcaggctgagtacttcccaccaaaggaagatataatattgcagaatgaaggagaagcagatgtttacatagtagtttcaggagcagtggttagtattctatctccaatttagttcagacatgaaatttcactaaggctttatctgtacgctaattgcgcttttcttaatgctttttctatgtagaatataataacaacaatacatgggaatgagcaggtacaggttttctctgtatatatctattccagatatcagtaagatttattcagatttaccaaaaattatgaattgtttgaaaacaggtatatgagaaaattgcagagggagaaatgtttggagaggttggttctttatgtaacataccccagccatttacttgccgcacagcggagctatcacagcttttaagaataagcaaaacaaggcttagagagatcattgaagaaaacagggaagacagtaacattctaatgaacaacctagttcaggtataacttcaattttattttcaaacaattatactgcattttttacagctaatcagaagttaacaactctattccaatgtacagaagctgaagctacgagaaagtttacctgacatgaatcaaccagaccgaagattcttgagcaagtatgagctattccacgttcctcgagaagcatggctgctgaaaaagtcacaactacattacacagagcacacaagtagggattctagtaacaacactccagtatttggaggtgacagatattccagacagttacttggagaagcaacccgatcttcggcatcagaaaacgaaaatagcagtatgacagataaagaagagaaccatgatgaagttcacacaaactgtgagatcaaaaaaagaacggaagagcactgtatccagataaactctgaagatagcagctccacatacagtcagcgaacaatgaatgcaacagtgcagacagggtctccacataaaacagaagaaaacataacaagaagaattccagatgagtactacataaaagaagcaaacaaaagagttacaattcacaaatatcgtcataactcaacagtctctgctgcgcaaaatggaaagcttatcaagctgcctacatcattggaggaactgttcaaaattggcagtaagtaaaattaagttttaaactacctattttaactgtgtttcgcctatgcaatttactgagtggatagcagatgtaaatctgcaatttactgtatatcagctacggtagtatgtatttactctcatcatatatattcttcgcatggcaggtcagaagtttcaaggttttcatcctagaaaggtggtcagtagagattatgctgaaatagatgatgtcagtgttatccgcgatggcgaccatctattccttcttgagatgtagagaagaaaacgccataacaacctaactggacaagttagaactctggcataagtaatggatgcacatcaagattcagaactgaagatatgaagaggaatgacattttgacacttcaatttgtttaatagttactgacatgatgtaaatgcctgatattgtatgacaaataagcaaggcagccttaatgcatgcagtcatgcaaaaaatcatgaaagcatgtggccgaaagcagttgtgtaggtttctactgcaaggatttttaacctgaaattgtacatccattcatctcttttaataggaagaaaatgagcatgttaataacagccctgattcattacttccctagacttgacgacttgtgctacacaataataggagtatattgttcctcttggtgtttgtgctctattgtatcgtaattggtgtagtccgatgcaactacttcatatttcaaggactatcaaggtgtatcttgtactctctttatcccaatttgatcatcacttgtttatttgtgtcaagactaaatgagcatcacttaatgcactacgtgcaacccaccaagattaatttctgttggtccaactacatgcaatatttaaaacttgatgtaatccatggaacacaaaaaaacgtagcaccttaaccgatgagaatcaattacagaatgatgaatgttttattgtccttgatctatgctccctttgcttaggtgatgatcaaaatgggatggagggagtaatgcctaactagtaatcagtaaaactttttcaacttaagttctgaaataccatgagtcaataaatgaacagcagcaagactattggattttactgttgacttcttgagacgtgtactaaagcaatagtagatactgcgattctcgtcatccaaaacatatccagcggtgatctagccagcctaactaaaaatgtgtccataatccccagaactctaatacatctaattctgcatcagtcactttgaagaaaaaaaataactccaaaatctcaaaattagacgagagcacttcactcacaaacaaacaaacaaacaaacaagaaaggcgtagggtgcggggtgccccgccagaatacctgcaattttgcgagggcccaagtgcaaaactcgcccctacagtgcgtgcgagaaagagacgaggagatggtggtaggtcacctggcgacggcgccggtcggagagcagagcggccccgcccgtggtggcgggctccacgcggagccaccggtggaagccggcggcgaggaggcagaggatcgttggcacgcgcgtgggttggggtggggggggggggttggaggcgcgaatgcaggcgccattgacggcccgtccccacgagccgcggcgagcgatcgcgccggccgtgtgggacccgacggccgccgtggtgtggccgcgccgcgtgggaccctatccggggatggaaacagtgaactggaccgtcgaccatttttctcacacggatccaccaaatctgtgtaggtccattttgcctccctcggctatagcctcaccctgatatttcaattttgatatacatctgttgataaattttctcctaaaatttagcaaatataattacatacattgtaacttgcatatacttccgagcgtccaaaaaaaccaacctagaggaaccagattcgttatactaggaggggaaggttggctctttttggaacggagggagtacagtgtaatttgcatgtaactttcaaaattctcttcataacatgatatttcgttgaaacggaggtcatgggaacgaatcctcttacatgtgtgcgcgtgctgcgacttttttcctttctcacttgcacaaatcttgaagcaaatctaacggtttaaaattatataaaagttacatacaatgtacaattatattgtagttaaatgcaaattacagtgtaattatactacggttgtactgggattacatctatcaaaattttaaaataaaaatttatcgacaaatgtataggtgatcccgataatgaatttggacacctctcctcctaggttgagtttttttttctgttggacggtgggagtataggtgccattacattcaacaaaagaaaatttaagaaaaaataaaaataaggtgatgtgtagcaattcccaaaaatatggcgcagcagatacgatccgtgtaaggaagatggaggccttgttaccaaactagccatgctccaacgatctgagatgcattactccgagaataagttcatctaaggtcctttaattttacacctaatcagattttcgcgtccttgaacaatctcaaaaccagatacaaccggtccctaaaatgtcaaatcgggggcaaataaggtccctcggcggtttaaaaggtggttttggctgacgtgacgtctatgtggctagtttgactggtttttttttcccacgtagcattgacgtggcggttacgtggcaattatatcttggaaaaataataaaaatcatggacccacatgccagcttaaaaaatggtgggacccatgtgttagcgacaaaaaaaaataaatatggtggggacaacgtgggccccacgagtcatttcctctcctctcggctcttcctctccttcccggattgggattcgatgacattcccccgccgaccccgacctcttcttcgtcatcctcagccagttcggcgtcatcacccgtgcccacatccctctccccctgcgccccgacctcagaaaagtaagagagagggagagccgccgaggtccatcgagatcacctcgccccgcccgtgcccctgccacggcggccgcgccgccaccagtccaccaccgtcgcgcagaaccctgtcgcgctgctgcagctctgggtcgaccgcaggtgcctcatcttcccgttcctccacgccgactacatcccgggctccctccgccgcttcctcgccggcgccgcggactgcttcgtcggtgtcagcgtggacaaggacgccgagcggctgagcgacgaccacagcctccccgcggggaacaccgccgaccttcgcaccctcgcggcgcagaggctgggctgcccggagctcatacaggccggcctacaggccgtggtgcacgtcatcatgggcgcccacctcgtcaagctgcagagggtgaccatgagccgctgggacgccttctgcctctccaacgagtagatctggtacactgcatcgacgcctacgtctccttcgaggtcggccggaggctgctccgcgcttgatactgaggccatccacaatgggtacccctgggtcgtctccccgctcacgccgttcgccgtccgtccgctgcgcgtgtccctggagagaggcgagacccccacgtggggaatgcgtgcctctagctcctcagctccctttttccggagacactccctcgagactacgcattgcagcgacccggtgccccgtcccctgtctcctcccccagtgtttcccctttttgccctcaccggcggcatggcaacgagagagtgagagaaaggagagatgcgacggcgacgaggatccgcgacggcgacgaccagatccggccaccgccgcggtagccgtcggccaccagccagcgacgggcgaagacggcttcctcgcgccgcggcagccgccggccaccagctggcgacgggctcggcttccgcgacggagacggtgacgatgacctggcgacgaccccacatgcacctcggcttcctccaccgccaccgccggccccgccacggtctcctggcggatctggccacggggggctagatccgcccacgatggcgccggatctgccccctccggccggcggcggcggcgagtaagagaggcggcggcgagggggagagagagagtggcgcggcggcgagagggagatgcgcacggcgcggcggcgagagggagacgcgcacggcgcggcggcgagagggagagagaggggcgcggtggcgagagggggcgagagggagaggcacgcggtggcgaagaaaaagagaagagggcatggtggcgaagaaaaagagaagaggggtaggaaagtaaaaatatgagtggggactttgtgggctaggacactcattgtgtacaggagtatctctaccaggttgctttagatcttgaggagtccatccaaggataccctacactgcgagctgagtttttctacgatgtcctcagttagtgaggatattctaggagtgtctcacattgtgatgccctgatagaccgtcgatcgaggcggtcaccgtggcacgaaccgcaattgcttgcatcctccgtgcctaattctacctagattagagattagattcagttgctgttgtctttcgctcatgctctcacgtaatgttaggcaaggatttatgagatttgaggtgttatgggtttatgcttagcactgaagaaattgaagaatcggatgaaaaaaaaggtgccgatcttctgatctagactatggttaatgaaactagctgggtggcctgcgcaattgcgcggctagcacccaaacaaaatcatatattttttagtatgattttacttaaaatttattaaatagctatctccgtatttctaattatataaagtcataccagctgctaccccttacttctgtcatatctttttttaagttaattgcactttggtccaccttttattaccaaagtttcactttgggctatcctctagctcatattttcactttggaccaggtaagattaccttgaccaccccaagtcattttctttagctgtatttactctataatattgtaaagaattacatgcgtaagttggaaaagattatcgggttacgggttgctgatgtgtttaaagttgaaaaagtcttttatgtattcataaaaagtttatgcgggtggtccaaagtaaaagaaaagtaaagtaacctagctcaaaatgaaaaaatgtattaaaagggtggtccaaagtgaaacattggtaataaaaggtggccctaaatgcaatttactccttttttttatttgcttgctcggtctaccattatttctattcattctccttgaaacctttaaaaattggatcttatagttttttgagtttattatcttgttgaatttcgtttttataatttctagaagtcccaccaaacgcggccattatactcctctacgatccgtccactgtctttttctctttattgtcattgagattttacaaatcgaaaataattatcgttcgagttcattttttactttctataagtcccgccaaaccgtcagcgacttttctattgtactccttggctcgcccgctgcctcccttctttatcgtcattgagattttaaaatcgaacataattatcattgtttttttttacttcttagaagttctgaacctttaaaatagtttttagagtttattgtctcaatggtttttttatataatctttagaagtctcgtcaaacgatactactgtactcctctacggctcatccgccgcctattctttattgtcattgggattctaaaaattgaacataaccatcattggaattcatttttttattttctaaaagtctcgccaaccgccagtggctctgcaactgtactcctatacaccctgcacgttgcttctttttattgtcatt

SEQ ID NO: 27788 - DNA, 69556 bp, Oryza sativa
  unsure (1)..(69556): unsure at all n locations
tcagaatttatattttttttcaaaatttaattaataccgtatattgttctttcaattttttttttgaatttcagttgtttcaaaatctacttgtgctctcttttaatttttctaaatttggatattattatattattttattctaaattttaattaatatcgtattgggttcttatatggattcttctttcaatattgcttatttttaattccgaattttagttgattttaaattgtattcctacttgaactcttattttatttttgctaattttggattttatttttatttttattccgaatattaactaatctcgtattgggttcttatatggacgcttctgtcaatattccttatttttaattctgaatttcaattatttttaaattatattcctacttggactctccttttattttctaatttcggattttattttatttttattcataattttgattaatctcgtattggattcttatatgaactcttctttcaatatttcttatttttaattctaaatttcagctatttttaaattgtatttctacttggactctccttttctttttctccgattaatgtgagaatttctagcccccacggtgaacgtggtgcctccttttaaagctgttttaataatataatagattccctaattataattgcggaaatgatgcctaccgggcgcctggcgggggtgaagcagatcgggcgctccccctgttggcggatgttaaatgaccgattctatactgccaacatatgcataaagtttagataataaaacatccaacatagtgataggtgcttaatctcacatattccacaagtgttggtgtatagttgtatgcagatgataaaccctgaagttgggaggcaaatcggactaaagtgaggaaaattatgtatccatacaaggaggggttgtgaacttcatcgaaacatccgtaattcaacccaaaactccgagaaatggatggaggaaggtctagggagtctaccgaccgaaggccaggccagatgggcctggttcggccgaaccaccacttccaccgttggatgtggggtttggcgtggacgtcccagatgcatccctgatgacggttggagggcacttcggacatttccccttcgccaaccatcatacctacctctatataaaggcttcacttcctcatttcatacacacacttccaagcttgagctgaattataagaggctttattgtactatattgtatactagaataggaagagagtagaatagaaggagtcggaagaattccggagttgtcggtaatcttctcctatttcttttattctgtttattactctgaattcaatataatattcttcttgagtaatttagatttatcttgtgagaattatctcttggttagttcctaaatagcatacagaattattgttcgctataatcaactaaaatatagtgattgctttggtgagttataaacactaaattaaatattaattgcttaaacgtggtgattaggtaattattatccagtaattgctacgtatcccacagtacgtttgaggtgggtgtagaggtggtgacagccctcgagatcacttaagtcctccctgtccggatatgtagtagagcaacatctgagaacagcgggttgccagtgcctgaagtattgtgttaggattaaagttaagctttccctagacactgtttcttacttgtaaatcctctctatcctggtctatcctttgcttggtgtccttggatgaatcggaggaagatctgatcacacacgttcccttggattcgatacccttgaaatactccgtaggggaagtgctacatcggtatatccgtacgcttgcggattttatttgtgaccgtattaaataccaaccccctccccccgcgcgcccggccaccacgagcgtgatgcaggtgcctggccccaccacgttctctgcccccacctaccatgtgtctccatcacatactccattgcaacaaataacccatattttttgaaaaccctctattaaggaaattcgtttcattttttgtttcactaaaaatatttcacctagtatactcataatgtttcactatatatagatctatatatagatctaatgtagtagtgaatgatccttttaaaacaaatccctagtagaaaaagccggacaggtcatcgaaccatctggacgtctgggtcacaggtcgagcggttggaccaccgggtcaaccagttcaagtgcaagtgaaaaaccattatttactccatgtattcctttcaaatactatatatgtgttgctctattggctagcaaagtgtgcgatctccccagagacccacgttcgaatcccgggccacaaattactggtttgaaacattgttttatataaggtgaaacaacactcgattggtgtttaaacgattgaacattgttttatataaggtgtttaaacgattgaacattgtttgattgaacattgttttatataaggtgtttaaacgattgaacattgttttatataaggtgaaacaacacccgatttaaacgattgaaacattacgattgaaacattttcgatctacttactgaaacaattccgatatacttggtggagcatcgtgcaacatttttaaaaaaatcaataataagctaaaagaaattttcgtaatgtttcgatctacttagtgaaacaattccgatataattggtggagcatcatgcaacattttaaaaaaaaatcaataataagctaaaagaaattttcgtcccgatttaaacgattgaaacattacgattaaaacattttcgatctacttaatgaaacaattccgatatacttggtggagtatagtgcaacatttttaaaaaaatcaataataagctaaaagaaattttcgtcggaatatatccatgtgtggtcctttttttaagatttaattgcaacgaatttaatggtataatcggatcataatttggataaataatttaagagaaaaattagtttaaagtagttttgcacatatacatggcgctaacatcatgtcccagaggcccagaacctggcgaatcttaaaacgaagaaatattaaagtgtgtgatagtgtagcagccgacggcgatggttcctcctgcgagaccaatctcggtattgatccttctcgaacatgttttctttaaaagacatttaaggacatgtttgtagcagcttgtgattgtaggagtagtagtatcttcatcatttagggaaagtgtttttcatcctatcgagcaaataccccctcgttttttacatgttatctaattcttcataattttcttataaaactaaacaagatagattaatattaaatatatcactacacaaatatgcaaattcaaatttaacttcaacaggttataacaaaaataacacatataattgtaaatatatgttaattattttcatttttatttgttttttttaacttgtagaggtgaaatttaggtttgcatgtttgtggagtaatatactttaaagtaaatttcacaatactacatatatcacaaaactacatatttacgaaagtgtatcacaaaactagagatttaaaattatattttccacaaaaactacatatttaaaatatgatatcagaaaactacatatttaacatcaatttcatcacaaaactacaacttttataacctcaatatggcaatgaatggcaatgaatataatatttgataacttcgttactaaatctgtagttttgtgatatatatttttaaatctatagttttgtgatagtttggtcagagtatatgtagttttgtgaaatttactctatattttatattaatctatgttgtcaatattttcctaaaaaaattatgactatttaggtggtatgcaagaatgagagaatgtctccttgagggatggaaagccatctccctgtcatatatgattctcaccatctatttcatatatgcaggtaattttcagggcaacgcactggctccggttttgggcacagttacaaaggtgtgaggatgatggggagtcctaaaggttgcatgccgcaagttggagtcgatggttatgcaactatttgccaattatagatggaggttcacaaatagacttcaataaatgtgttctccttattttggcttggtttcttctgtttttgtttggtgtatcctatttagctaaactacgctcttttctggattgctacaatgtaataattggctgtagctctttttgagcaaaggctgggatgataaattccattatctaaaaaaaatatatgattctcaggaatttaactttgtgtcactaaaaagaggtgattttctgaggagaatttaacttttttttcgaggggaaaggaaggagccctgccaattgcaattaaggaaaatttatctatcttttgattaattttgagcatcatctctgcagatgaacaagataggattttaatggtgttgtcgagggcttggtatctccggcatgatatagtgcagtgccgcggtggagagggatctggtggagaagggggcggcggcggaggggtggcggtggagcttgaagcgcctggcacagcagtggtctgcgtggggcggcggagggaacaacagcgctcggcggagacaggtggtggcggtggcacagagacggtcgaggagagatcgggggcgacgcggaggaggactagagggagttgcgaggaatggtggcgcatagttggtcatcgaggcggagatcgtgggcggctgtcggtcatcgaggcagagatcgtgggtggcgcggacggcatggaggagggcgaggggagcggcgaaagatgggaggggatcaacgaggcgggcgtcggtgtcctggggacgtggttcgatgggggagtcacctccctggcggtggcggcagctgagagggtagaggagaacggcggcggtggagaatcgggtgtggagcggaagggtcgggagcggtggaggatgaggtgaggactgaggagggaggagcagcgcggtggggaggggcgatccaatcttgtgtcaggttggagtcaccgtcattgattggagagggcggcggcgatcatgggtctggagaggaggccggcgggcgtggctggtgaggaggcaacgcggcggcggggtgaggaggcgacgcagggaggagagcgaaagacgcggtgtggaggaaggaggagtgggcgttgggaggagatctatccgtgacgtgatggttgagattacgcgtgtttgtcagatgcgtctgctgtgtcaggaatcaagatcaccactacggattttttaagcactagagatataaaacggtattaggagtctagtagtagctacgatcatgaaccagcaacgcgtccatcatttcgtatacttcctccgtttctaaatatttgacgcctcttgcttttttaaatatgttggaccgttcgtcttattaaaaaaagtaattattaattcttttttatcattgttaaatatacttatatgtatacatatagttttacatatttcacaaaaatgtttttaataagatgaacggtcaaacatgtgctaaaaagtcaacgatgttaataaatatttaaaaatggagggagtacaatttttcacgtgcctaccgacaaccatatatatagcgcgtgcgcacagactgcacgtactagacaatcaagcaaccatatatatgcaacaagtaattatacggtgcagcacctaagaggcattggccggagaggaggaagacgtacgacatcagcaaagatcaagaggaagatgcactactacaaagaagagccaaatcggttttcctatgcggttggccagcccgtatgggaggaaaggtctgcgaaaatcgctattttcccatgtggctagagcacccgccatgcgaaaatgtgatttttgcatgcggttccctgagccaaccgcatgcaaagatatttttggcaaaaaaaaaataaaaatccaaaaaaaggcgaaaccctagccggtcgccggccgccgcccacgctggatccgcgccaccgcggccggccgccggacgagccagatccacgccattgcagggcccgacaccagatccgccgccgccaccgctttgccgctcccgagccagccatcgccgctctcgccgtcgctcgcctcggctggatccacaagtcccggcctctcccgagcgagccgccaccgctctcgccgttgccgtcgccgtcgacgtcggcgtggtcaaccgcggtggcgagggaggaggcgtggacgcccgcggcagcgagggcagaggagagttcgcccgcagcgtcgtctgcggcggcgaggtcgttccggcagttagggaggatgtgtggacgcccgcgacagcgtccgctcccgctcccggaggccgtggcggtggcgggcgcccgctcccagcgcctcgtcatcagccgtgcctcccgctgcccggcgctgcctgcatgcgcgagagaaagagagagggagaggttgaggagagaatgagagagagatagagttgaaggaagagaggggaaaatattcgtggtgggagagaagagaggagaagattgaaaaattttaaggtggcgagtagggaaaaaaccactaaatgaatttcgaataaaattttatgatagtaaatgaactcatatgaaaaagttaccaaaaacaaagttgtagaactcgttgagatctaccaattttattttggtcatttctccatccgagtttgattgaactatataaaatttgagatttaaaaatataagcaattcaaataattttttgggtagtaaatgatttcaaatggaaaagttgtcaacaacaaagttgtataacttatcaagatctataacttttgttgtttttatttttctatatgactttgtttgaacaatctgaattataatttcaaattatgacaacttcaaacaatatttttaaatactaaatgatttcaactgaaaaagtcatcaataacaaagttgtataactcatcaatatatataacttctattttggtcatttcttcatcccacaaagtgatttgtaaaattgttcacaaaatgtacatatctntaatatagttttataaactgtaaattttgtgaaaatgttactatcactttgttggatgaagaaatgaccaaaatagaagttataaatcttgatgagttatactttttcagctgaaatcatttactgcttcataatattatttgaagttttaaaattcaaatttttaattgataaaacaaagtcacaacaagaaatggccaaaataataacagtaaaaacacaataatgtgatagagcatgattttagaaacatttatgaaaaaagaatcatccaatttagagttcatatgagtaagatacactagttttaaatttttccaaattttattttcgtatacagctccttaagacgcccgtatgtaaaaatcgatttttccatgcgggtgcttaagtgagccgcatgcaaaaatgaggtcatttttacatgcggacctcttaagagtcccgtatgagaaaatcgatttttccgtacgggcgcattaaggagccgtctgtgaaaataccgctcgatttttacagacgtcactagtcatggtccgtttataaaaattatagggtctcgtatagaaaaatcacttttgtagtagtgatggcagttcagctaagaagcacgatgatatacaatggagtttctagaattatagtggattcactttgtttgcatcgttcacatactatgctctattgactattatcatacacaaaggagaaatagagaatgtcaacccacgttacaaattgggtagtatattagtaatttactatgctttacatataaaacagcactagtagtagctacgatcgatcgagaaccagcaacgcgcccatcgttttgtatagtctgatgcacaaattttcacgtggccagcaacgaccatatatatagcgcgtgggcacagactgcatgtacgaggcactcaagcgaccatatgcgatcgaagatcgaggaaagaggcattgaccggagaggaggaagacgagagcaataaagatcaagaggaagacgatggcagtagcatccttgccaccttcctccaatggaagaatggtagagccggccgggacgatggtgcagtggtgggaagaatggcagctgcgcgtgctcgttctcaccagcctcttcctccagtgcttcctcttcttctcggccaccttccgcaagcaccggatcccggcgatcctcagggcatccatctggctggcctacctcggcagcgacgccgtggcgatctacggcctcgccgccatcttcagccgacacgggaagaacgccggcgacgacggcggccgcggggaatcttccatgctggaggtgctgtgggcgcccgtcttcctgatccacctcgccggggcgcaggacagcataaccgcgtacgacgccgccgaggacaacgcgctgtgggcgcggcgcgcggtggccatgtcgtcccaggccgcggtggccgtctacgtgttctgcaggtcatggtccggcgggaaggtgccggcgcgctgcccggtggcgctgttcgtcaccgggttcctcaagatgggtctcatgctctgggctctgcggcgagccagcgctacgaggatagcaaccgtcggccggaaggcggcggcggtagaggccaactggtcgttagagagatacctgcagtgggcgagtaaatccgccatcgaagccaccaggaacattcagacgaacgacgacggcgacggcggcggcggcgagaatcgttcggcggctcgccgccatcgtagcgccaccagtgagctgcagctggacctcatagatctcgagtatcagaacgacctcatggagctcttcattgatttcccaaatacctacactagccggcttagctacctctcgttgttcttgaagctcgaaccctacgatgcatactgccggctttgcgacctcgtggattatgcgttccagatcttctacaccagcagaaacgccgcctaccccttcgccatctggttcgtattcctgcggttcatctttttcatgctggcctccacggccatcggaggctttgacgggcttgacagcaacatagacgggctcgacgccaacgatgtcaaggtaacctacatccttctatactctgaattcgtagtggaattcagtaacatgatttcgctgcgctaccataagtggccggtgtgcaagctagaaccacaaataaagcacactatcgcgcagttcagcctcatcggctgcgcttcccacagccgatggccaagggaaatggattctaatctctcgagaagatatcctctcattcatacgtgtcaaacagtgttgagtagagtagccatgtttttgagatgcaacaaccagcactactggtatcatgttgagcatagttcgtcgactgaaaaagccgtagatctcatccgcgaggacctgagatctgggtgggtggaggatgatctgcgcagcgccgccgcctaccggagattcaatgaccggcgaggccagtggactctccggcgggagcagtgctacggagagatgggatggagcgtggccaagctaccgttcgacgaggctgtcctcatctggcacatcgccacggacatatgcctccattgcacggaagacatcgacatctcatcgtcaccggctgccagcgccgacgaggtcaccgccgtgatggagatatccaactacatgatgtacctgctggcgtaccagccagacatgctgatgctcggcaccagacaaagcctgttcatggcggcccaccatgagatcgtgcacgccttgagacaccaggggcggcatcagcaacagcccagcgagagagaccttgcgcgatgcctcgccggcggcgacgacgacgagtactccaccccggccacggaggagcaagccggagctggcagcaggcttctcgagaggagaggaggaggaggccgccatctagcgcacgcacggcggctcgccggcgcgatgatgaagctggatgccggcaagaggctgagggtgatcggcggggtgtgggtggagatgatatgctactccgcgagcagatgcagcgggtctctacacttgaagagcttgggtgtcagcggccaggagttcctcaccgtcgtttggctcctgcttcaccggatgggcatggaggtgttggccgacaagctccacagaccagagctcgccggagacgatccggatgctgttggtgtgtaacctaccgtacctgttcttggccatgttcttaatcatttgcaggaacagcttttctcagtacggatgatgcaacaattgctgacactatcaaaacaagaaacttagatttggagccaggccattggagtgtgaagcctacatggagccaaatttgcacaagagttccagaaagtcttttgcaggtcaattggatatttggattccgagaggagataaataaattagcagacagactagcagaagaagcaaaatctaatcgaccctcttccactgtttatgtctgtcaaagcatttctcacctggcttatcccaatacaggatgtcatgcaaataacattagagacaatttcaacctcacgaactttgtaattcagcatgttctatgcttttgagtggtaataaagtgtttaagttcaaaaaaaaaaaaaacgtacctgggccccgtgggtatacacccgggagatgggttctaatctcctgttgttacgtccacccgtttctctcgtatactaactaaactagctgggtggcccgcacaattgcgtggctagcaaccaaacaatatttttcagtatgattttacttaaaatttattaaatagttatctcattgtattaagactttgaaagaccaaacattatcatccccgtatttctaattatataatttttaaaagtcacaccagctgctaccccttacttcaatcatatccttttttacttgcttactcgatctaccactatttttattcattctctttgaaacctttaaaaattggatcttagtttttagaggttattgtctcactgggtttcgtttttataatttctaaagtcccgccaaacgctgtcattatacttctctacggcctgtccactgtcttttctctttattattattgggattttaaaaatcgaacataactatcatttgagttcattttttattttctaaaagtcccaccaaactttcagcggctttgccattgtactcctttatggctcgcctgttgtctcccttttttattgtcattgagattttaaaattgaacatgattatcattagttttttttttactttttagaagttctgaaccttaattggaccttgtagtttttagagtttattgtcttgttaggttttaacttttagaagtcccgtcaaacgatgccagtatactcctctatggcccatccgctacctactctttattgtcattgggattccacaaatcgaacataactatagttggaattcatttttttattttctagaggtcccgctaaccatcggctgctctgcaactatactcttatacatcccgcccgctgcttctcctttttattgttattgagattttaaaaaccgaataagattataatggggtttatttttttactttctagaagtcccggcaatcgccttgctcgtttacttcacggcctgcctgtcgtccctccttttaatcgtcattaggattctatttggtgttttattaacaatttttatatgtagtatcaaccgctaccactctatttctttataggcatgttacttaatttatctcgttatgtgttttagatggtcttttctttcaatagtctttattttttatcaccaattttagttatttataaatttattcctaattaaaatattttttctttttataatttcagaatttatttttaaaaaatcttttttcttttaatatttttatatttttatttttgaatttcaggtgtttcaaaattatattcctactttgaactctcttttagttttctaattttggatattattttattttttattctgaattttaattaatcttgtattgggttcttatatggattcttctttcaatatttcttatttttaattccgaatttcagttaattttaaactgtttcctacttgaactcttcttttcttttttgctgatttcagattttatttttatttttattccgaatattaattaatctcgtattgggtttttatacggattcttctctcaatattctttatttttaatttcgaatttcagttgttttaaattgtattcctagttggactctcctattcttttctaatttcagattttattttatttttattctagattttgattaatctcgtattaggttcttatacggactcttctttccatattgcttatttttaatttcgaatttcagctatttttaaactgtatttctatttggactctccttttctttttctccgattaatgtgggaatttctagcccccacagcgaacgtggtgcctcctttcaaagctgttttaataatataatagataattatgaaaaaaattaaaaaaataacaagatagattaatatgtaatatatcactctacaaatatacaaattcaaattcgacatctacaggttgtaacaaaataacatattaaactctagctatatatatatatatatatatatatatatatatatatatatatatatatatatatatatatatatatatataactactatatggcgctacaggcaccacgtattagatggcgcctgacacaatcaacccccctccccacgcccacacattcaatttaaatagaccacgtagttaatttttaactcaacgacccaccaccccgccacccccacacgaactcgatctggtgcaagctacacagttaactgttaactcaaccacccaccccacacgcaagttaaattttaactctgcgacccacaacccaacccgtcccccacgcgcactcgatctggtgcataccacacagttaaattttaactcagctacccaccccacgcgcactcgatctgatgcataccacactgttaaattttaactcgacatactgactctatctggtgtgtgtgtgtgtgtatatatatatatattacggattcccatcatagaaaccgtccacccactctttctcttcctctccacattttacggatcagcgatgacttgtgattccttgtgcagagaggaggaacggcgacggcgattaggggatgaggagtggcagcgaggtggttccggtgatggcttggtgacgaggaggagcagcggtggtggttgggggatgagaggagtgacgaggaggaggagcggcggatccagtggtgccggggtgcgaggacgggcgcgatgttggcatgtgcggcgtcgacgggtgactgtgggcgggaggcgatgcggcggcggatttggccaccactctgcgccccatgcgcgcggatccggctacggcggcacggatccggcgcggttgtgggctgcgcgtccacagatccagcgcccccttcctcccgtgtggacctgcaagggtgaagactatgggcaagaggcgagacggcagcgaccattgcggcggtgagcttgtcctccggcatccatggagcagtggcgggcatccatggagacggaggcaccgagcatgcctctctccgagttttccattttcatcttcttcaccggtggaagaagcggccaccgcccgttgtttccgttctcaatatggaaaccaccaagagccacctttttcattcgacggatccagaaggagaagaaagctgccaggatcaacaacaccatcaatcaattatttttcctgattttagttggacgttgtcctgttatttgatctctccgatgtgttattgcattatttgtgtgtaattagtttctaatacatgtgattcctatatgattagatgcatccggacatcttgcaaaaaataaaaatgcaatctccatatcagtatattgacaattaaaaaattactatatgtaatgtttggagtaaaatatttactatatgtaatttgtcggtaaaagtaactaaatgatgtacgagaattgaatctgaccatacctaaaagaaacagaaattccattccctgtggagagaaaactaaatttaggtgtacaagcattattttcggatctaggactctgttcattatccacaacaacaggatgtatcgcatgaaaaaaaatccgcttattccggggcctcctctaaaagcttatcaaattaacgccaaatcaatgcacgctaggatttcgtagtttctggaccggcggatccggcgacatggagttgatttctatccggtgaattaattatcagttaatttccatcgacgtaattttctggggagatgtgcatcaaaacaataaaattctaataataaagtttgtattacgtcacacatcgccaccaccgcctaatgtctcaaagtttttcatctactcataccagtttacgataaattaaaatttaactcgcattccttgtcatgagaaacaacacacatccataaaaaaaagaatctacaaaatagttatttttcatcagcgatcatcgtctaccagtaaatttttaatttttaactacataaccaccaacccgtaatttaagttaatggcgactcattcatatagctgaaacataggtaaaattttaactcgacaacgaaatcactgcagcgcatcactcaacatagtattagttaaaatttaacttcgcattcagctttgtttggtccggtgggcgagggttcgttgcttcacgttgcgcaacgtttttcacaagttatttttttaactccacagtctgttggtttggtttggtgggcagtcttttctcgttgtgagtggcgtcatatatttccatggcacgcagcgcttgtgtgtggcgctacgtagcaatatatatatatatatatatatatatatatatatatatatatatatatatataggtaaattaactggtgctacatggaggggctccaataaaatccaccgtatacgtgctttgagatccgtgctactcaaatcagagtattatagacatactaacgggttaaacccgattagacctcttcatgcatggcgtgattgcctttccataatactctggccgtgtttccatataagatctttgcatgcatgcactaatttcctttccatataagcaaacatgtatgcaataatttccttttgattgcatggtaatttatttctatatgactgagtactttccttttagcacctgctcacaccgtttctctatcatgttgaattgatttatttctatgtatatggttttcactttccatttttctatgtatataagaccagctgatggtttgttgccggcctcgtgcttcattgttacctacgccgttatgccgctggtcgtcgactcgtccgcgaggttcgtcgccgttcatccgtgaggctcgtcgtctccaagttgtgtcggttcgatcgacagcacctattgcaggtatatatatatccagcggccaatcacagtgacgagtagcctgcattgcatgcatgttttagagcactaggtagatctggattagtatatgagaaaatatgttattatagcaggcaataatagtacatgtattttcactttgcaggatgctggggctccataatataatgcgtgtgtgcatggagaattggagaattgcagatgaatgaccatgatcgataatcacgatgatgctcttccatctatcaattttatttttttgtgtgtatatactcaatatgtgtactgtgtatatactcaatgtgagtatatactcactctgtataaatcatgatgttttcttgtactcaatatgcatgtgtgtgtgagtatactcaacgtgagcatatactcactcaaagtgtctgtatacatcgaatgttttactcaatatgcatgtgtatatactcatgcatgtgtgtgtatttagcatgcttgtgtatatactcattacatctgtataattaatatgcgtgtttatatactcaatatgtgtgtatgtcatctaattacatctggtcagctacctagctagagtagaaaaaaattaatataaggcctagctagtttcaaattcagttcaagaaaaaaaagtaagcttcttgaaatcaattattttcacggcatttaggtaggtatgtacccaacgagaagtaggtatttttccaagatatgcattttaaatgggtatatatatacacatcgtaatagtatgtgtgtttaaaacggtatatacccaaatatcttgtatatacagactttttttttacaataaataatagatttgtcaagtgtccagcatatattcaatcaatcgattaggcattatgtacatctatacctaagtttatatcactaactgaatacataatatatgacatatttgttcatgtcgatcttagacttccttcctttcatactcacagaaatggtatattggttcatgggatttttttccctttcatacccaatttttgagtatatgtcaagctgtgtatcttaaacatggaaagtgatccgcagtgcatattttgttactcaaatagctaaattaatggcgtcatgaatggaatgatttcgtacagctacattaccatataaatgtgctgcgatatatagtatccatgtttccaaatatatttccaattaattagcttccatgtttccaaatacttagtttccatttttcaccactatattaccatttattcaaacctcaccgtgcaatcatgtaagtttccatatttacaagatattatttccaatttcgcaggcatttaatgtttccatttttgaaatatacacgcaattatggaaattctctcatccacactgcatgcatgcatataaatgcattaattcctttttcaatctattcaaatatatgaaatccattcgctattaaatcctacactctaaacgggtctatacccattaagttcatacactcaaatgatcaaaccgatcagcaaaatatatatatatatatatatatatatatatatatatatatatatatatatatatatatatatatatatatatatatataatataaatattcgtatttttccggtcaacacatataatgtgcgtgagatttacacacatacaaaatgcgagtgggctagcaatagcgataaaaaaagtgcaaaaaaaaaaaaaagtggggggccgccgacgccaccagggagggagcctccgctaccggatccgtcaggggtggcggcgaccgcaggcggatccgacagcggcggctctacccgcggacgccgtcgatgccgccgctccccgccatcgccaccgcacctcgccgtcgcccgcgccgtgccggtgagacgggagggagagggggagagggagcagtccgccgtcaccgccgcacccgtcgtcgccgtcgacgctgccgtaaggacggccgtcgccgagggagcgtggacgccgatgatgccaccgcaccccgccgtcacccgcgtcgtgccagtgagacgggagggagagggggagagggagcagtccgccgtcgccgccgtcacccgtgccgtgccggtgagacggaagggagagggggagagggagcggcgccgccggaggggagaggagtggaagcggcgccggtggggagagggggaggggaagaggcgacgtagggagcgggggaggcggccgccggaggggagcgggaaaggcggcgtcgggggcgggggaggcggccggctcggctgtgggggaggggaagcggcggctgtggggtgaggggcagggggagaggcggctttaggggcgggggaggcggccggctcggctgggtggaggaggagggggagggggagggttagggttttcatcactttggaactaatctgagccgtccatcaaaacgaacggctcagatcgatcgagcgttgggccgccccacttgggccgaaagcggctcggcagtccaggaagattgaggaagagtatagggatccaaattagactttggtcgcggacgatggctgaagaagaaagtgggctgaaataggcctatagagataaaattatttttatttaaataaattctaaaatgatgtttgtattatcagaattagcaattaagctacgtaaattccaagaaaatttcaatgaatgtaattaataatatagaaaatttaataaaaaattaaatctaaccataacattttatttctcacacttactttacttataaattaatttaattatatatctaactacttaaaaaatacccaaatatttccaaccataacattttatttctcacacttactttacttataaattaatttaattatatacctacctacttaaaaaatacccaaatatttcaaaaaatttgtatttcatttaattagaatttaatatgttttaattcaattttatcttttttttctttccgttgcaacgctcgaccacttttgctataatttcaaagagtgtaattaatattgcagaaaatttatatttcattaaattagaatttaatatgttttaattcaattttcttgttttttctttcgtgatgcgagctaagcaggaatatttttatccatcttgattatcattagcgcaatgaataatttacctatcttagaacattattttatacatgttaatggtgtactttattgaatttaaccgttcctttacccgtagcgaagcacgggcattttgcgtgtgtgtgtatatatatgtatgtgtgtgtgtatatatatatatatatatatatatatatacacgcaaattaactggtgctatatggagtatgggctccaagattcaaattgagtatatactcaatttgaatgagtatgaaaattttttaaatgtttagatatgaacattaacttctttactaacaagttcaaacttgtttgaactgagtttaaactttttttttgttagattttggttctaggtatataatatccaaacatataatttattaggtatgtaataatgaattgtgaaataaagttgagtttaagttgttttgttgttaggtatttgtatgaatcaaattcatatacctaggtatatactcacaatttgaaaatttttaaaaatttgagagaatttgtgtgttttataccttagagcccgggcaccatgtgtgtgtatatatatatacatacatacatacatatacatatgtatgtattacacacacaatcaaaattgttatttttgttataaattttagaagttgaatttaaacttatatgtttgtggagtgatttattatatattaatctatcttatcaattttttgaattttttttataacaatttagttcacatgcaaaaaaacaggtggacgtccacccgactacttaaaagagtttcccaagaaacaaaaaggagaggcagcggatgggtcatacaggagtacaatggcaagccgccgatggttggtgggacttctagaaagtaaaaaatgaattccaacgatatttatgtttggtttttagaatcccaatgataataagggtaggcggcgggcgggtcgtagaatagtataatggtagcgtttgacgggatttctaaaaattataaaaaatgaaatcaaacgagatagtaaattataaaaactataaggtccaattttaagaggttagggcttctaaaaagtaaaaaaaaacaatgataaacatgtttgattttaaaatcttaatgacaataaaaaagggaagcagcgggcaaaccgtattggagtagagtgacttttgtcgctgacgttttggctgaacttctagaaagtaaaaaaaataaacttaaacgataattatgttcgatttttaaaatatcaatgacaataaagagaagagtcagtggatggaccgtagaggagtacaatggcagcatttgacgggacttctagaaaattataaaaacaaaacgtcaaaacccaatgggacaataaactctaaaaactataagacccaattttaaaaggtttcaaagaaaatgaataaaaagagtgatagatcgagcaagctaataaagaaggatatcacagaagtaacgggtagcaactggtgtaacttttaaaaattataaaattagaaacacgggaatgataaggtttggtctttcaaagtcttaatacaacgagataattatttattaaattttaagtaaaatcatacaaaaatatataattttgtataggtgctagccgcgcaattgcgcaggccatacaactagttatatattaatctatcttatcaattttttgattttttttctataacaaattagttcacatgaaaaaaacaggtggacgtccacctgactgcttaaaagagtttcctaggaaacgggtgttgtgtcaatatcctttctgatttaaatccaatgatgctgccactgcagttgaaccggatcatgcttgcgccaccaacagaatagatttgggaaactctattcatcccttaaaatggatgtcccctcattttttatgtcgcttaaaaaagtcactaaaaattttcataagatagatcaatatgtgatatattactttacaagcatgcatatttaaattcaacttatataagtaaaaacaaaaataaaaaatttggctatgaatagaacgtgtaatatatcatatattaatttatcttgattttttttaaaaaaatataactatttttaaaaatatcatgcattaaacgagaggatgtctgccgaacagtataacaatcggtcccaacccacattacctgtctgccaaacagcgaaataattgggatctaactactgggaaactattggagactagtaaccgtgcacgtgcaaggcacgtctttatttcccacattcactactcagaagtctaaacactgttatttgggaatatcaatttttaatgcaattttatataaaaaaaacttgttacacctaagaacttgaactgaatttaagcaaaataaagaggtttaatatggtaatttatgggaaaaaaataatgttcagtacttgaaacttttgtttaatttttcggaaacatttaaatgcaagcatcatcatacctcagttgcaaatgcattgccataatgcagatggtagctcaccaaaggatcaaggaaagtcgatatggtgagacaaatcaatcacaatatagggctcagaggcaccactatggaacacatgaaacaaaaataacaacgaccgtagtgattatatatgagcttgcacacataaaatgcatcatacctacaagaaacagagcttcataagatattttgcatggaactgcaagattcagaaatgcaagggtcatctatagaaaaatatcaaaaaagaattccttacaaactcaaatatgtacattcccttgcaatatcacattttcatgcgatcttcaaaaaattctcaattgactggaatagtactacctggatcaacagaagccgttgctgccgttcggtaaaggagaatcaaattgatttttcaggagagattagagggtgaggacccaactacaatctgagtcattagatcaaataatggaagcaacgttcaatattcagtgcaaccagactgaatatatcaaaaatgttactccggaatgaatatgatctgtgagaataaaagaaattatgaggtactttgaaggtttgatgattctcatcaaccttttagaggatccatcaatttataatgaaggtttaccgcccaaaacatggaatatttcatagtctagaatctaattcaacaaaatatgaactatgtataaatttaattaccgagcagtggcatcataacaggtaattgcaacaactaaacataataattccattaaaatgatgaatatggcacgtaagtgcaacaactaaacataactactattctacaaagggtctataacaatgcatgctaacctctactgattaaacaaaagaatttaaccacaagcacccccattatttgcaacagagaatactggaataagtaggtgtgcatttgtacctcagattaagagcattgctgatctgctgatcttcactaaaatgaatttgtcacaaatcatattctttaaatacctctcaattgctgtcaacaacttaacatcagaattcagaagtaggttgtcttgaatacatatctgcacatattcatgatggaacagactggagttgcaaaataaaaaaatagagttttcattagaattggctatctaatagaaacgtaagataaaaacaatcatgcaatgcttgactttatattgttcagatatatctaggatgctttatatataccacattgcattcaagaaaaatggaagaagagatggtccatgaaaatgttacacttacacatatgatgtattgttcagtaactctctgtacggagcaaatgaaatgatccctgtttgtggaattattaaaaagttgaaatcgactactacctgaagaaacaatgcactggagtaaataaactgagttactttgatcttctaataagtacacggtgggtcacattgcagaatcagggttatgaaacacttacataaacttggaaacaaccttagtacgataaacatgaagaagatatcagtataatgaaaaacatatagaaatttggcatcataattcataaagatatgttgatggacataagcagctataacaaaattatatatgcttgctctccaaatccttgctggctgaaatatatttaggttgcatataattagccatcacgatgaatgtctggcctatcaagaatatattttgtgttgcatataatgggtgttcctaccaaaatatgcacaaggattaaaataacagatggaacaaattgtttgaaggcattttcacaaacacatggtaagcatgtcctggaactgatgctcacaagtacatgttctttgacgaagctgctgatgtggagcacgatctgcattgttatccatcacataaggaaaatcaggttgcagtggaggagcatgaaaacaggcggtagagacagagtgatgggtaatgggtacggcgaggcatgactgcacgctgggcagccacgcagcagcagtgctctaatcggccctccacgctcggagcgatgcccaaatcgaaccacccgatgagacatggcaagggaggcaaccaaggccctgcaagagaagcagaactatccatcattgtccgacaacggtggctctagtggcggcggaatcgcagatcagaagagttacctcacgatcggatacagtaggtgacgcgaccagggcaccgccgcagagagggtgaatcgattcggccgctactcgtgtccattgaagtcagtcgaggcagcggggaggaggaggaggagcgagcgaggaagacggccgcggcggtggggaagaagcaggacccggtggcggccccggcgaggacatggaggagcggcggcagcggggaggagctcctgcgaggatgcggggaggaggagcgagcaagcgaggagaagcgcagtcttcgcggccacgggtggaggagtagcgaaatcttcgcgcgtggaatcctcggctgtgaaatcgtgcggtggagaaaacttgcgcgcggatggactgttcagattaatccggatgatttggcctgtagcattggagggggcaactcctcctttttatattaagtatagattaaaaggatattggcgcctgatttttggaatgaggagattgatgggataatttatagtgtagagatgcttatattcctaaacaaaatttaaatgcttcaaatacttatattgttggacggagtagataggaatcttccatgatgattatgatttagtttacaatccacttcatcttctcatccatgtttacaacagagtggtaataaccatgttaggatgtaaatgctatgggacaattttgttttttccctcactttcatgttcaatattgattttacccctatcttttaggcttttcgtttttccccactttttttagccgaaaaatcttgttgcccatgttttggatggaggagttaacggtgttaactacctgtcaaaagaacatttatactttctctcatctctatttattaattgtgtttttgcccctaatttatgcatgactttggaaatttctttttgattttaaatttgatggaattttgatgaaatttcagcaacattttgacaggaattgaacaaaattttgataaaatttcaacaaaattttacacaagggaaaattggttccatgccatcgaaagttcttaagttttgtttaataccatcgaaagtttgtactgtactttaataccatccaaaatttactacgttacttagcccatgtttgtttcagtttaagattattataatctagattattaaatcagattactctaagctgaattataataagctaacataaaataagctacgagttgtttctttctctagattattagaggcatttaagggtagtgggtctttagccactcaataatctggaaaaagctcttctagaggaaattattgaattatagtaatctggcttatagattataataaataatttagcataataatctacttgtttgtttcagcttactcctaataatccagactataataattctaagctgaatcaaaccgggccttattttaccatcaccgtgaacttgagtggatctgtcgttaaacacgacattacttgcccttgtctcgggtccccgacgcattgccgcccagctccatcacatcctcctgccaccgcacctgtcggagccgccacagccatccactgcgcgaggaagggggttggcgcgggagagcacgacgttgaccgacgctgcgattcctggagggggccgggccggctgccggtcacctgccactaaagttgggcaaaacgccgacgacgacctgacggcgctcttggaggggggctgctacagggaagagcttgagctcgatatgatgtttcatttgacaaggaggagctctaacttgagagacaaattgggccaccggcggcgagattacgcggattgatgggatgaatggtgcttgagatcgagttgaaaatggtgggaactagctcaccgtccctgtcggccgtgctgctcccccgcgcgcgctcgtaacccactcgcggtgctctggtgctcgtgcagtcctctcctcacaatgtttctccggcctgtgttgccgctgctcttgttgctcccaatccccattgatgaagcgatatgcctatgtcggccaaagaagaaaaaattgggcgagatttagatgagtaaaggaagggcaatacagtcataatctgtttgttttccagccaaatattgaaaagaaaaaacaaactaacggaaataaacagttgtggtatagaaaggtaatggagaaaactttggatggtattaaagtgcaccacaaactttcgatggtatatatatataaactttcgatgcgtggaaccaattttcccaaaaaaaagaaaatagtgaggggcctagcaaatatatagagcccttttaaatcgtaggaatgaaaaaaacggaggaataagaaaaacatagggttctgataggaatgaagtgtaaaacagaggattgaaaaacacatgaaaaatatagaaataatcgtttgattggaccacaggaaaaaacacaggaatcggataggagagatagactcaaaggacttttaccaagaggttagacctcttgctaagtttcctccaaaacctatatgcaatatgccattccataggaattttgtaggatttggaaaacttcaatcctttgaatcaaagagatacataggaaaatttcctataggatttcaattctatgaaattcatttataattcctttgattcaaagggggccctaaggctatttttgtaggctttttttttcataagacccaaatataaaagttactagttatcgtgtacgtgcaaggcacgttttgatattatatacacaaaagtagaataataaatgcgagccttttttatgtagcactccatacaaattcttcacgtaaaaattgagttccatagaccatagtgggatgataatttgaatgatctctgaaaaacttgcaccgtctattcctagagtgacaatataacatgcaatgcaccatccacctttattaatagaaattccaaaaaagctccatatgagtgcccccgaggaacaaaaggatatctacacagattttatttcattggtaaaaaaaaagaaacaactctgaagtagaatcactatgctcactgtttctgtgagattgctagcatctccagctggtaaaaaaatgccaataggtagcatctcatttctcatttgtagaattgcatattagagagtaatattatagtccatggttagcaatcccatggcggtagatctcaaacagatcaaaaataatcggggaactttaatgactcacatgaggtagtcggtggtttatctatgaagagcatttttgggaatatatcacagataatgtatataatatctattgtaatacacataatgacaccaattattagtccatttgagtcagtaattaaaaaaaaggcataccttatcaattgtagccaacaattcacttcctgctctctcaacgcccctcctcttactattgagccacagagctgttgccaccagatcctcgacaagataaaataaaaggataatcccccaattcaaattcaataaattatccatgcaaggattagataaaaaatatataccatatactgctctgtatttggtatcagttggcatgaattttacaaattacacagtggcttgagacatctgtgcattaatagatagcaaacaaagcagaatactgaaagcattaaccctatacctcttatataccagggcaccacaccatagaaaagctcacattttagatctagctaaccaaccttctattatttaagataaaaatgaacgtatacgttcacatatatattctgggtacaggcgtacagggagcatcagtatcatgctaatcctaataaggatatggactcatactaagtaactgatgagtagctcaggccaccctaagttccccaagaagtaaggcttccattcttgttaaagccactgctgcatttcataaacaacttgtggctaattcaattgcataaggagatgaactccactatctatacaatggttttcctacagccacaaggacttcatatgtgttcttctcacattgcaatcgaaataacatttatatgatcacaggaggaaaaatacctgggaatgaaacttcagagagttctcgtcgacgaacaaaagaccatgcagatcgattactttactttagatctttgaataatcacgcacctttttgcgccactggacattttatatacataaacaaccttatttatgataaaccagttcaattatgaactaaattaatttttcaactccagtagacagtgagttacctcaaaaacatatgcttgtcttgagggctattatagcagaataagtaccataagtatgaactaaattaaaattttcaactttagtagacaatgagttacctcagaatatatgcttgtcttgagggctattatagttgaataagtaccatgaactgcaaaaaatactaaaactttgttcaaaaccaacaagtgcagccattgcaccatggagcccattctccaacgaaaggagagacaacagtgaataactaacctacagtggccataaaagatcatcaagtacaacctttgccaagatgtagaaatggtatactaatttattttatggaaaaaagaaacccaacatgtcttcaacatgtcttcctaggcactctgacattttgtctaaactgtgcatgtttctccatagctagctgtgggaggtccatatcttctctcataattcatgaaagtgcatatctgaagacatttgtttctttaatgctcaagcacatgtattcataggaacaactcacaacaattgagatatcagcttcattaacaattttttttatacaacacttgcctaaattgagacacaaagaagtacctgcaatacacaacattagctcaggaggcccttgtcctgattggctccctcttaattcctgaagcccatttgtggatgtcatgctatattcaaatttccagcacccatggaacttgctagatatttcactcaagaatccgcatggccacatcaagccccaaatgcattttcagatacaaaatatatgtcagtccatagggacagaactatagaggaaaaaataatttgtaaatttgcaaagtagaacctgatgccatgaagattccatcaacaatgtaattaacctacttataggaaatcaacctccaacatggatacaggaacatgtatccagcagcatcgcctttagtccagaggcattgcgagggatggtatgatgttgccattgcaccttgctatgagatcgccttctcctgcctaaaacctgagaccactgactagtggagcaagagaggatggatctaaaaaactaaatattgtttccattagcagactaacgaacggaagcttatcttcggcgaaaggggggaaccacctcggcggcggcggcttgcggcagcggtggagtgcggcggcggctggggatgacctcggctcaagcggggcagtggcggctggtgacgaccttgactccgacgggggaagcagcggctggtgatggcctcgactccggcgggggcagcggtgtagtgcggctgcggcggggacacgcgtggaggcgtggagcgaggaggagcgagtaagtggtccacggaatcatctcgcgggacggagtaaacacgcggtggagggagtgcaggcagaaatcgcggtggagggaggggaatcggtgggcggtagcaggtagtgacggttgtgatgcgtgcgacgtggatggacggtagggattgatagatgtgatttggcctgtaggattgaagggatacaactcttcctttttatattagtatagatatagataactaatttgatgtttataagtatagtagggttgaagcataaataatcaagggctgaaatataaaagccacttgagtgttgcctgcattttggcaggaagaggctcctctgatgtacttccctctgacatcgatcgcagatatatgagcccatgagctatggggcccacctgtcatcaaattcagatgccagtaagctagaggctctatttctattgtggaggtagtattgtcatatgggtgcatttgggagtactctttctaactcctactatattgttttctgcgaatacgctttccaaactgttaaatagtactccctccgtcccccaatataaggggttttaacatttttcttgcattgtttgaccgttcgtctcactaaaatttttttcgaattattatttattttattgtgacttactttattatcaaaagtactttaagcacatcttttcgttttttatatttgcataaatttttttgaataagataagtggtcaaacagtaccagcaaaatatcaaatcccttgtattagggaacggagtgagtatattttttgcaaaaaaaaagttctatagaaaagtttctttaaaatcatgttgatctatttttatttttttaatacttaattaattttgtgctaatgaggtacctgttgatgtgaaaacacgagacctgggagatctgcctaactccagtgcaggtccaaaactcgccttcgggtatgctagcgtgccagttgatttgatcctgcaatcaacaagaacaaagacaaagaaaccgcggttaaatccataaacgatagccgatcggctaggtgctgataacatatcatttatctttgagccgatgtcatatatgcatcgatcggcaggcattaataaataaaacagaactaaatctactcgatcggctatagatattaatgatatataatccttatatcgatatatacttaatcaagtgattgcgatagatcgtcgccatgccgagacagtataaatcacttcaatcgaaatatatattaacaatgagattatttatattcgtagcatagccgatcagatagatctagcatgtatcggctaatactccgatacagctctatactaagatatcaaagcaaatagaatatatcaaacaaaagcctaatatacttaaatgcaacaagatcttaacataaagaacagattcaacatatcaacgaagcataaaggacaaaaagtagttaaatcaggtaagatcggctgaaaccccgatactaccctaatcggcaaccaagaagcaggctagagattgagattctaatcacgactcataagatcaaactcaactgatgcaactataagtatgaaaagaagagcaatatctagacaatcaagccgttggaagtttcatagagtggtggatatcgtatataatctaagccaacgttgctatctaacctaatcgactgccttctactgacagatgttagccgattataggttaaatgtcaatattgttagagattatataagatatatgataactcgacgaattatataaacaagattagagtatcataatgatggaagcactaatcccgagaacgcaagccgccataataagttttacctcttgttgaagatcgaaaccgatgcagctcaacccgaaagcaagaactcgtcgaaacaaaacgaaagcaaaaagtgtggcgatgcaccgagattgtattgaacgtgtgttagtttgattacatggggctcggggtctatttatacccaagaattacaaaacatgtccatatcggacacggacacgattcttatctctaacaaactctaagataccataagtctttgcggcagacttttgcccaaatatatctataagaaaattacataaaatattctaattaatagatacaattgtcttctcatgactctatccatgcatggcaatcatcttaaagcatatcaactcaacccgatgacgtataccgagttgtattgtcggaatcggctatatcaactcacccagtccgactcggactcagccgatcttggtcgtagccaatttggactccagccgattcttactctgtttccgaaacgatcttcgtctttgattctgctccgatctaatcttcatcttcgatactgatattaccaaatttagtcgttaacagtactttatgtacttagagattagttttcaacacaagatgccaaacacagcatatggttcatccaatgtggtatttactttttttttcttgtggacacattctctaattaggactcttttgacgtgcctcatcacagcagaaaaagaagatgacaattagatcgaacgtaacttctctaaagcaaggtcagagaaacatgtgttccttataagtgagatccactgttatgtatttaagcgtcagtgacccacgtccctctcatgtctcacccaagacatgagccaacagctatacaggtaaaatagtggattatgggagacaacagtactaactagctatgtctgctttaagtatatactttctccgtttcacaatgtaaaactttttagcattgctaatattcatttagatgttaataaatttagacatatatatgtatagattcattaatatctatatgaacgtgggtaacgctagaaaatcttacattgtgaaacggaggaagtaattttttcgatgtagttagtgcaactcgagaatatttatgtaagaatagaattatgagttgtatgctaacaccttgtttagtaccaaacttttttaaaaaacttccacttttccatcacatcaaaactttcctacatacataaactttcaacttttccatcacatcgttctaatttcaaccaaactttcaattttggtgtgaactagacacagcctaaatctaatttacttctactctttgaaacggaaaagaaaaaaaaagagctataggagtaataataaagagagaaattaaaaaaaaacagagagaaaaagagagaaaggaagataagagaagaaaaaaaaaagagaaggggcaagtcttccccaagtcacaccatccccgtcccggatccggcgaccaccgattcctcgccgccgccgacgacgatgccggcgttcaaggcgccggcgccgggcttctccgtgcgcttcagcccgttccacgagcagcgcctcctcgcggccgcctcccagcacttcggattagtcggcaacggccacctcctcgtcctcgacctctccgccgccgccgccccggggggcgcgccggcgcccccgccggtgttcgccttcccgacctccgacgcgctgttcgactgcgcgtggtcggagtcccacgagtccctctgcgccgccgcctccggggacgggtccgtgcgcctgttcgacgtcgcgctgccgcccgcgcagaaccccgtccgcctcctccgggagcacgcgcgggaggtgcacggcctcgactggaaccccgtccgccgcgacgccttcctctccgcgtcctgggacgacacgctcaagctctggtccccggaccgcccggcctccgtgcgcaccttccgcggccacgagtactgcgtctacgccgccgcgtggtcggcgcgccacccggacgtcttcgcctccgcgtccggcgaccgcaccgcccgcgtctgggacgtgcgcgagccggcgcccacgctggtcatcccggcgcacgaccacgaggtgctctcgctcgactgggacaagtacgatccgtccatcctcgccaccggctccgtcgacaagtcgatccgcgtctgggacgtccgcgcgccgcgggcgccgctggcgcagctcgccgggcacgggtacgccgtcaagcgcgtcaagttctcgccgcaccggcagggcatgctcatgtcctgctcctacgacatgacggtgtgcatgtgggattaccgcaaggaggacgcgctgctcgcgaggtatggccaccacactgaattcgttgccgggatcgacatgagcgtgctcgtggaagggttgctcgcgagcaccgggtgggacgagatgatctatgtgtggccatttggctctgatcctagagcaatgtaaacaaaatgcctttggagaacacatatttcgtacgtcgagggatatggattatttctgttgcgttttgcattggtcatagtaatacatgtggattaactcctttgagttgaagaaattgcaataaagatcctattgctatctaaatcacctagttgttaagttcttcacttagactcaaagtgcataatgtattgctagtatataatgttggttgtagggcaaattagtgggggttctacaaccccgatagtgcataggactatgtagtgtaatctagggcatagggagatatgtgaagcacattaaaatctataatgtatacaattctgtttgcagctggtataaatcctcttagacttcttattgccctgcattaatagccttgtatgccttcttgagatagtggcaaaatctagtcgtatgtcaatcttccatcttgctattacagtttaaatagtgcgtgccattgtcaacatataaatggagttcatttactccttctgtaccacagtgtttgtccattttgttgggatgtacgtttgtaacgtttaacaatgttttgtctgctaataataaaaccaacactctagctatcacaacatatccactctggaacctaatttaatgcagtacaagagattagtaattgtgctgtgtggtttaatagaatgtatggtcaacaaatatataaccctattaaataactgtagtaaaagagattgaataattgtatgggtatacagtataaaagggttgaataattctcaaaagtttgacttgagacatgtccaacacaagatgtttttgttactagagggtgtaacatgagttgaataattgaacattgtgtatgtagaactatgcctggtatttgaacaatcaatgagatggttcagttagagtagatttgtcatgattgggatgtaaccatgtaaaatgttcgggtgctttgtatatactttaagcatgcatgtggtgacatgggtgtgtgagttgttgaacataatagtacaagatttgccagcttatctcaacataaatattgttggaataaaggaaagtacatttagcatagcacacaatgtctgtagcataagttgcttgatttagcattcttggccgagccagtttgttcctgctacatgactgttaagtaatacaaacattattgcgctgaatcctcttctgcaaatttctgacctcaatagatgatctcaactgtactgagtaatggtttgaattcgaaaggttaaattttacattatgtgtgttcatttttctacattatatgattgttcagctacttgtacgtggtaaattttataaatgttggtcaaaacattgaatttccaagaggtatcatctatgtggaaaattcttaccatctactccctccatctcatattataagtcgtttggcttttttcttagacaaagttctttaggtttgacgaagtttatagaaaaaatcagcaacatctataacaccaaattagtttcattaaatctaacattgaatatattttgatacaataattgttttgcattggaaatgtcactatatttttcaaacttgatcaaacttaaaaaagtctgattaagaaaaaagtcaaacgatttataatatgaaacaaaggagtatctagtatatgttcaataatcaatactcccttcgtcccataatagaagggactatgtcatttttggtataaattaaggaagtaataaaaaatacatttcatagtacaaaagtatcgatgggaggataaaatagtaaaaaaggtgatagatgggaggataaatagtagaagagttgataggtggggaataaagcagtgctgcctccgtcccaaaatatagggactttgggtagatgtgatacatcatagtacaatgaatctggacaggaagcctatccaggttcattgtattgtgatgtgtcacatccacttatattttggaacggagggagtacaagaatagataggtgggagaataaactagtacaagagttgataaatgggaaataaagtgttgtcttaggatcacaaaaatcccttatattgtgtgacaaactatagggcctaaatctcttgtattattggacggaggaagcactaggcatgtgatgtctcaactctattgtttgttctatttctcttctgatgatctcacaagtaatgagtgacaccactattttccttgacacaatagtaaaaaactctcagttattatcggccaaacaaattactactatttacttcataagatcaaaacagtgtagcatcaattctacaattgacaaacctgttgaagtcagaatatattatcttgtttcagttgctacgttttgagcatgatgcattcaaacctttttgctgtcattatacatattgaagtatttgctatgcgatgaaaaaaaagtgagtttaatataattttaagataccaattggtacttcgtacaaactaatgtcaaccagttaaaatgtttgctatagtttgcttggtatatgcattgttcagaggaatatgctgaatttggtttggtcaaactgaaggcatgggttgcagggatatcttggtaaaacaacatgcgttgttagcaaaaacatactacagtagggtaggttcacccagatttcgtttccttttattattgatatcaagataagctatctactggctgtgtatttgcaggactgatatcaatataaggataaagtaattgacctgttctaccagattttccttctgagcctactatgcctagatcgctcacgcagcaacttacccctttttttttccagtggaaattggactggcatgatagatacacataagaccagaacaacatcactaagaaatgacagaagaaattccaaattggcactgcatctatctgtttgtgttgcaattgtgcactcctatctatcgtgttgcaattgtatactcctatactcctatctatctcctggtctgcttgcgtccattctgatgttcgatatgtagatatgtatggagtagtggattgcaccacaggatgttattgttcaggattgctgcccagttattattgtttgttgatcagttattgcacaggtatgtatgcctgattgataagaactttatcagttattgcacaggaatgtatgcctgattgatggtaaaaactctagcttacatatatgccccttcaaatgaaattcctgtacttgataaaagaatctgctgagttctggcatctggagtagtggagcgtgctgacaagagatacctctctcgttgcaaacttgcaatcacggcaagaaggttaagatcatacatgaaacacgcaatttcagaattacatgaaacacgatggtggtgataaggtttcatgggaacgttctcaggctatacagacatgtgctagcaagaattatcagcacacacaagtcttacggctatgaagataccatcgaacgttgcatgtctgctaatgtaaaatgacaagtatgatcttcgcagtgccattattttacaggtgaagaccagaacatatacatcatcattacgcattacacattacacttgttttatccatcccactattcactcatacatgctgattcatcagcacaagagaccatcagacagatccataaatcaaccacctccttggtgctctcaccagttaccacatcgtcaaaacagaccagcaaatacttccatgaatcccaataacagaaacagaaggacaagatacagctcacgacaggctgggctgcagttgtaacaagaggagaaaactgcacttgttaaagaaaacaagatgcaacctggatcagtttagaaaacaagaagcaacagccacaatattcaagaggcaaaatatatttagatgatgacattcaatataacagatatagaatgctattagcgcttgagccttcctatgtaatataaagataattatcgatttccacattgtgttgtaaagataatatacatggcaacgttccatgtatacaccaaaattccgtcgcacagtgtttcctagcaacataccatgtcagtattttagaaccattgcctcctactgccttaacccgcagagcacctaaagaactaactaaagataaggtgaccggctacatcattggatcacagaatcctcctgtcacttttggggctgaaaacagcatctaaaaaaacacacacatgtcaaataacggatgtgtcggaaaaaattcaaaaattaacaagaaaactcactcctggcctcctgggctcctggccagagactactaggcaaaaatttgacctacagttgcatcagaccatcagtgatgttcaaaagagagaaatcatggtcaagtatgatgccttcatgccttactgtgctattcaaacatttgaacaaaaaaataccagaaatatacagaaaaacagctggtgagactatcaaaacttctctaaaagataatggtacaccatataaactggtctgttgtacacaaaaagaaattacaacctccccttcataatagtctaatgcacagaacatgtttcaatttgaatggagaaaaagtacagattcgccaacaatactttcaagtcctgtaagttcaatgctaatgttcgaaacaatatgtatttgtgggattagagtatgcaagctatgtggccctgtcgaatttatgaaagcatgaacaaagcagcgcaagcatcactcaaaactcttatttttctgaataataataatatatataatacatatagctctccatacaagaaaacaaaagcatatagaataacttgggttttcatgtcatgttctgcatccgcaacactcagaaccgcaaatgaaaaagaaaagctaaatagaaatagcatggaatggtacagtaccacttaacaaaaaacttaaatatgtgcaggtgaggaaacaaaaagcatagggtaacaccataactggaatgtcaacaccttgagaaaatacaaagtaactgacaaaatttggttagcatacaacattctgttctgcaagtcctcgtctaaaacttaaggcattagaccaatgaaggtagagaaaatacataattaagccttcaactaaaagcttttcctatttcataaaatattccagcagcagcgatctaatggataaccatgctattctgtcaaaggaagaattttaacatcaggagcatcatcaacaagtcaatatacttcctctgtttcataagtaagactttctagcattgcccacatttatatagatactaatgaatctagacatatatgtgtgcctagattcattagcatatatatgaatgtgggcaatgctagaaagtctcacttcatgaaaccggaggagtaactaacaatgtcagaggtatatatacaataaaacaatcatcatcttgaccagacctttataataagctcttgaagaccttcacccatgcagtacagaaaaatctacaataacatgcaagcattcaaatagtgaacatcttgtaagatgacaagtaggcagtgaactttcaagacaagcacatttcacaacagcgaaacagcagaagctaaaacatatattttaagtaacagatggccataaagagatatgtatgtctgacattcaaatagtgcaaataacagtgtttcaccacgtttaaacataacatgagaatacagaaattaataggcagcaaccaacaaaaatattctcctttatagctgcaagttcagttgcaagcaataacctgccagtgcactgagatacaagaaagctcatttctttctcccaccacgctccctcagtgttaaattgatcaccactccagggccaatgttgtagtaagcaagagtgagattgtctttgaggaaactagtccgcacgctcaacttctgcttattagcagnnnnnnnnnnnnnnnnnnnnnnnnnctcctttagactgccaactgtgtctgagagtgattggacaccgatctccaacacttggcctcgcaggtttccttcatcaaggttgggtacagacactgagatgtgagcagggccctgcagggaagagaagaaattagcacatggaaattcttaaaattcaatatacgcatacaaaaagaacaagactaacaagaatgtttagtagaaaacaggaaagtggagaagaaatatatcaagaagtattaccgggtgctgagcaaggaactgttctgctggtataagagaagcgtcatctgttctcagccttttaggttctggttcatcaggttgaggtggctgctcctcagcaggtggttgtggaggcaaaggtggtggaggctgaggaatcccaatggggttgaccatggttgccatggttggcatgtgtggcggtggaggcatggagtatggacgcggcgggccaggcatgtagggattttggcctggtggaggcggaggtatattggttggcataggacccattgaacctggcatcctaatcacctgcggctgacctggtattggcggtggtggaggcggatgcatggtaggcatcatatgtggaactccttgcatgagatgaggttgttggtgtgggggatatggcattgcactaggttgaaagcgtggaacattaaccagtggaagtggctgaggaggtctaagcaatggcatgggagggcggggaagtggagctggaccaggaacattcgaagcatcaacctgttcctcgccgcccatagacagagcctgtgtggcagtacgacctatgctaccagaatggccatcccaaataacctgctttggctgttcatcctttttcttctcaatttctgccttgacagcattagagacctcttcctctgttgttccaaagatgtctggcctggtacgggcaagacccacaatgttcctggagatttcatcatcaggagcaagtgttgtctccttaatttttgccaacatccgctctttctgctccttatattttggatcaataagcgagatgcgcatgtgctcctccatctcactaattggaatgagctccccagttattggtgagacaacgaatttcgttgggtccctctccgcagggattctctcctcaggcctcttgtagttcttgacaatcctcataggcggctcctcatcaccagcaagcttaacttgaactcctccttcattttcctcgagccttgctgcacgcattccttcctcaacaagttgaatctcctcctcgtccatctccatctcaacatccttcgctggctcggccaattccatggctgcctcctcctctcccaggtcctcaatcctcttccgacgcttcaactcctccagcgtaagtggcacagggagtccctcgcactcatcatctgcaaactcgatcgtctcgacaacaacaaaatcatgccaatcgatcatctgcatctgcatcctctcctgttcgatttcatcctcagcctgctgcctcgcttgctcctgcgaccggtcccactccaggcggttcaggcaccgctccaacacggtggtcaggtccttcgccccgtcttgtaggtccttcagtagggcaggcatgccttcgaccgggttcagcaccctcgaataggtgtcggtgagcttcgtgaagaaggtgaacatgctgtgcgtggggcggatgaagtggaactgcgggttggtgctctcgcgctgcgccaggctcgtcaggaagctcttcccgttgcgcgccacgaactgcgcggtcagcttgatgatgtccagctcctccccggtgatcccctcgggcagatgcaccgtgtagagctccgccttgggtggcaccagcaccttggtgggcggcggcacgcggaatggggcggagtggtccgccttcgccgcctcgccatcgacggtgggcgcggcagcggagtcggccggcggcggcgcggcgccggattcgtcgggctcgggggccgcgtcggcggcggaggcggcggcggaggggggagcggcagcgagctcggagacgcggtgctggtagtaggcgtggtaggggtcggagggctggaggaagttgaacttggcgttgccggcgttgtgggagatgatgcggcgctcgaactccgggccgttcttggagacgaaggtggccgtcttctcgatgatgacgcggatgtcggggggcgggtggatgatcccgagggggcgggtgtgggtggccaccgtcggcggcggctcgggcttcgcgcctccgccgggaggagggggaggcggctgttgcggatgggagtcgccgtcgccgtccggcgccgggagcggcaggatggcggcccccatggcggcggaggcgagggggattagggtttcgtcggcgtggggtggggtgggtttaggtttagatcggggaggatttgcgcgacggaatcgtgagctgctgtgacgcacgcgtctcgtctcgtctcagcgagaggcggtgagagactgaagagagaggaggagacaggtcggttctaagggccaaacgggccgcccggcctgttaaggcacggtaggcctttgccggcacgggcccgattgggggtcgtgggcctggtggcggcccgtcggcacgacgtggcccgccaaattttgagaaggaaaaatggaaggaatgaaagggaaattagagaaaaatgttgtggagtgcggcatgactagggctggatgaaaagctcgtgcctcgttagattgctcgactcgcgccaagctcggctcggctcgttttattttcctaacgagccgagctggccttttagctagggctttcaacgagccgagctcatctgcctaggctcgagctcgatacaagctcgatacaagctcgagccgagcctataaaatgttcgagctttttgacaggctcggctcgagctcgaccaagctcgagctcgactaccgagctagatttttaagtaaaataatatatatttcaaaaataatcttttaaaaataattaaaaaataattaatttctagttcatcatattaaaagaagaggaaaaaagaataaaataaatatatgatgtcaatataaggcatacaaataacatatttgatctcctaatttattaaataacaataaaaatcatatattattatgctcgttggaagctcgagctcggctcgacaaagctcgcgagcttagggagaggctcgggctcggctcgtttggagctcgagccgagctcgaatcgagtctaggacgagccaagctcgagcagctcgcgagcctcgagcttttttgacagccctacttttagctcgttagagataacgaactagctcaagctggctcgcgagccttaacgagctgaggtagctagcccatgccgttgtggacttgtgggccatatgtgcttgaaggcccatatatgcatcaaaactctagctctattccccatccccaatcccacacgagccgccgcaagccctcaacgcccggtcgctcgcgcggctctcccccaggtcccaacgcctaacgccaccgcatacgccgccgcccacaccgctgcgtcgcgccgctcttccccatcgccggcgcggccgtggacgccgccgcccgcgccgctattcccggtcgccgacgcggccgctcttccccaacgtcgccgtaaccatggacatcaccgcccgcgccgctcttccctggcgccgaagtgaccgtggacgccgccgtccgcgccgctcttcctcggcgcctctcctctccttgttcgctgcccaaagctcacgagctaaacgagctggctcgagcttgcaaacgagccgagccgagcttggtttctagctcgttaggataatgagccgagccgagctagctcgttatcctaataagcgagaccaagccgagccgagccagcttgacatccacccttaagcatgactgcgtgagcatggaactttattgaccatggctacctaggtttgctaattcacggatatccacgcgtccccccccccccgcggcgtagccacgtggcgcgtgcgaaggaggggtggtggcaggagcacgagggagggtcatatgcgtgagttttctctatttttttttctttcagttttattttttttgggttttttttggttttttcttgatttcttccccgtttttgatatgtatatataaaaagtttgtatatgtgaatatacatatagaaagtttgtatacatacttttgtatatgtacgtatataaactttgtatacgtggtgtttcttttttgttttttcccttggttttttgggtttttaaatatgtatgtacgataaagttttatacgtgtatacaatttttttatacatcaaagtgtatgcgtataaaattatatatgtatatatatctatacgtataactttgtatcgtgtaatacaaaattatatgtatgcatatagaggatatacatatacttatactgcagaggagagaggactggagggcacggaactgaccacgcaggtgcggccctgcgcggctgattgcggatcagccagcccctcatcctcatgactacctagcttaaaccatactccctccgtcctaaaaaaaaaaataaaccatgggtttccgtgtccaactttgactgtccgtcttatatgaaatttttttataattcgtattttcattgttgttagatgataaaacataattaatattttatgcgtgacttgtctttttaatttttttcatattttttttcaaataagacggacggtcaaatgttggacacgaaaaccaggatttgtcttttttaggacggagggagtaataacgagaaagtagcagagagccagagactacatacgaaatactccttccgtttcatcatattatgagtcgttttgacttttttatgagtttgtagagaaattagcaacatctacaatacctaataaatttcattcaaactaatatttcatattttttttataatccgttgatgtgaaaaacacacactggcctgagagatttgctttaatctagtgcaggtccaaaaaaacttgccttcgggttctgagcgtgccaattagtttaatcctgcaaccaacaagaaacaaaaaagaacaaagttaaatctataaacgatagccgatcggctagattgccgttgacgtatcaatatcagaccgatatggtaaagatcatatcggcaatggaagtatgtagcacaagaatacataggcccgcctgatcggctgtagatattaataaacatataatcggcccctcagaatacatttaaactaagtgatttggatagatcggacagtacgccaagacagtataaatcacttatgtctaaaagtactctgaaatacattcataccatagccgatgaagcaaacctagggcgtatcagctagtactccgataccactctatatcaagatatcgcagtagatgaaacatattgaacgagaaccgatctaacattaggatggcctaacagattgatagcaagataaatatatttcaaacaaacgatatcttagtatagagggtagacttagcatatcaagcaaacgcgagagcgacaagataactaagccagataagattggctgaaacctcgatgctatctctattagcagctatagacgggctagatattgcaattctaaacattactcaacagatcaaactcaactaatccagtattaagtcatgaagagaagtacaagatctaaacaagtcgacagaagcttttctgagatggtagatacgctatataacctaattcaacgtcggtaactaaccttgccggctgttttcgatgatagaggatagccaatggggttggataacgatattgatctaggttatatagcatatgtgataacttggcgattgacataggcaggattaaagtgtcatgatgatgtaagcactaatcccgagaacacaaaccgccataaccagccttacctcttcgtcggagatcgaaaccgatgcagcccaactcgaaagcaagaactcgtcaaaaacaatgaaagtggaaaaagggtggcgatgcaccgaaagtattattgaactagtgttgttttttctacaaggcctcgggctatatttataccgaaatacataatatgtccttgttggacacgactctatctctattacaatttaaaacacgaacaagtcccttgggtggactcttaccaaaaatatctctaaggaaattaataaaacatcctaattaatagatacaatcgccttttctagaccctaatccttgtgtggcaatgcccatgtagtgccttgattgatcccgacaataattgtagaaccatctgttcgagattggctgcatcggcttgtctttgtctgattcagtatcagccgatacatacagcagccgatgtcgtccgtagccgatgcgcactcttctttccaaaaccaaaattcctccaaatccgcttatgctctagctttgaatccaatctatgatttcaccaaatttggttgttaacaataatatgttcgttttgtgttaccagcggcatgtgaactcaactatatgtatcaccctttttttgatggcgtgcttctttatctaagatatatatttactttcctttttggtataactaacatatggaattcccctttttaactggactagctatcaaacaaaacaaccaatcatgtacatgatgattttaaagcatcaagagagatcttgagtttaaggaaatagcttattgaggcgagatatttactttattgattgttatattagatattcaatttctcattgttattgtacttttaggttttctttcctaattcccgtgagaatttacctgtatcatatgaaatccatacattttaaactctacttggagaagttaagcacaattatgattggattcttccaactgtagtacccacttgtcgatgcttagctattggttgtgcattttgctattaaacttttgtaacatttgttcaagaactaatcttgcaatacatatataggggtatggtagataaacattctatttatatatgaatgtagtgtcatagtgttgattttgtagttgttgacattcattgtaaaatgcattggcaatggatgaatgggagtgtaatgtttaagaccatgtcaagttaaatccccacaacgttcatatacaatagtggtatcacatttcattttggctgctacttttgatattccactgaagaaatagtatgaaaaaatatatgtcggccattcggcctcatagaaagttcaaatctgcaaaagaaaaaaaagtgcaaagaaaatagtgatggacgcggtacaacatgggggttacacaacatattgaaaccgctagctccctagtacagttcctactttgcgtgctcttttgttattttattttttgagcatacgtaaaaggtttgcacatcagtctttgatagataaccttttttctcaatatctaaaatggaaatcgtctttttcccttttagcttgtgctttgcttccaagttgcatcttgattgctgctctgtactgtagtccctcgtgtccagatttgtactacaagtgtgtcacatttgtccctcatctgtttcaaaatagatcaatctagaaatagatataatattatctattcatattcattatattaaaatatatcatattcaatcgtatatttgtttttttttaattttgacagagggaacactctggtgtcaggtgctgaatctgatcccatgtgatgcctgattttctgtcagagtagtgggcttgtcatcagcactacttgtctagggtgtgtttaggcagcggtcgttttggaggacattgaggcagaaagcacctcgtttttcacaagcacgttttctaaactactaaacggtgtgttttttgcaaaaattttctataagaaaattgctttaaaaaatcatattaatctatttttaaaatttaaaataattaatactcaattaatcatgagctaatggctcacctcgtattttctcaatctcctcaatccccttcttcttaaacacacccttagtctacgccaaaattgaaagtttgattgaaattggaactatgtgatggaaaagttggaattttatgtgtgtagaaaagttttgatgtaataaaaaagttagaagtttgaagaaaaagtttagaactaaactcggccctactttagttgaacaacttataaattttggagctggcacacaaagatgttcgatctgttccttttcagcgtaacttttcatgtggttagttctatgatacctttctgaaggcctttttgcacttttacaattcttactagtttcatgctagtgctaactaatgaaggcttaggcatgatctaagagtctaattagcatgctatggcaagagaataagtagtacatggtgtggtgttagatcaaaatataatcatcttatgaacaccctttgctgtcctgccttaatggccatacactgaaactgtaaaggagccaatgagagctaaggggcacaaagatggtgggagaggaatattcttcgacaattgagcaatgagcagctttcttaggacaaattggaggggcagaagaaaatgaaatgcagaagcttacaagtagagtttcagtttgccttttattcctaactgccagttcgtttatcatgagatgcagaagaagacatgaatatgtccctttctcctaggcaaggcctggtagtgtttaccctagaaaataaggtccctttcttctcttgcattttgcacatccaaacaagatagttgaaaatgacatttgcatatcccttttcattctccagtattttacggaactaaatccaaaaactcttcttcttcccccaaaccagtcggaatatttttgcatgcagtggcagtacaccgtttaaaatagcccccatttaattcaaaggaaattcataggaattttagaggattttattcctataggattttttcctacaaagccctttgaatcaaaggaatgaaccctatggaatcctataaaattcctatggaatgcctcttctcatacaagttttggaggaattttaacaagagttagaacctcatggaagaaatcctttgaggccccctatgaatcaaagtatttatgtaggaattttataggattcaaatcctgtaggaaatttttcctatttggccctttgattcaaaggattgaagctttccaaatcctatgaaattcctatgaaatggcacattgcatgtggattttggaggaaatttagcaagagctccaacctcttggaaaatttccttgagtctatctctctcatccgattcctgcgtttttcctgcgctctaatcaaacgaccattcctgtgtttttcctatgttttgcaatcctctgttttacacttcaattcctgtcagaatcctgtatttttcctattcctccattttttctaccctgcgattcaaaggggccctgagtctttatctctcctcaaattcctatgtttttcctgtggtccaatcaaacggctattcctatgtttttcctgtgttttgcaatcctctgttttacacttacattcctgtcagaatcctatgttttttctattcctccgttttttcattcccgtgattcaaaggggccctaaaattggccaattggaaatcttccaagccgatgggactaagatttcaaaatccggtaattttgtaaaagtttgggacacgggtgtgcagcctgttattggctaacaaccagttaaattccagccaatgaaatattaaaccagggtttaatatttctattacatttattactaactactccatccattccatccatttcatattataagtcgctttaacttttttttcttagtcaaaacttatttaagtttgatcaaatttatagaaaaatttagcaacatcaacaacaccaaactagttttattaaaactaaaatttaatatattttcataatttgtttgttttgtgttgaaaatattgttattctttttttataaaatcggttaaacttaaaaaaattaaactaaaataaaaaataatcaaaatgacttataatatgaaacggagggagtatatattactgctttgaccactaaccatcagaacattatgaaattttggtaaaaacaattaaattaaaagaaaaaaataattaaaatgacttataatatgaaacggagagagtatatattactgcttttaccactaaccatcagaacattatgaaattttggtgtaaccaatgcatttttagacgattctactgatgtggagtatttttttgcgtaaccaatcaaaatattttataggccttctattccttttgcaggagggagtagcacaagataaataaaatccatctcccaatacatttttgcttggtgattgatgacaccgatgtaagtttggtcaatgttgtcatcaatgcccagtggaagaaagcaacatcgcgataatatacaaaaatggacgatgtggcactgccatgagatgtacgaataggaaataaatccgcaggaaaactagtgggggactaaaacaaaactaaattacccaaagttgcagtcctacatgtgattaccaattttcttttgaaggatcgcatgtgattttcaattaaaatcacacgcactgaggactttctttttgaggggaggtgataccttttctttgagacagtgatatgggttgtgaactcttaatttttggggtgggatacttttgtatcataattctccatccggtcacatatattttacatttaagataatatttaattaaacttttaatattgaaccatcaagtttgtattagaataagtttagacaatataatgagcttgtgttgttatgatagtaatttaagataaatatacacctaacatttattttaactaagtcgtgagaaattattaaccattaaagtttatcaaattttatccatcaaatatttatgataagaggacattcttaagtactactccgaagaaatctactgatacttattaagcaagttcaacgattaaggctgtgttctgttggaggggttgggaaccctcctcctccgcacgtaaaacgagcgataaattaatgtatgatcaattaattatctataacaaacttaaaaaatggattaatatgacttttcaaaacatttaaaaaacgtgcgctcgaataacgagggagatgagttgggaactcgttagaaaggacttctacagatatgttgtacggtaaattattgtaaggacatactagtacaaaattagggtggatcttccatatctcgcggtcgtctaaaacattttagaccgtcgaattctcatcctatacggctcaattatcgccttatatttttttagataatggaattatcaccctatataaaaatttataaacaacggacaccgcgtatagttctttttatgtgttctaatggttttcactatttgatatggctttggtgagaatatttataccttacatccaaacaatcctatcaaataatacttaattaggcgtttaggattacagtaaagccttgtcattataacaccatggtccattgggtacaccagagaggaccctgccattgatgccactctctgttttgtactactagtactactcaatttgaccagcagtttgtcacgctttgacatgtggagcgccgaggcatttcgttgagagatccaatcaagattccccctcaaatcctgtgctgcttcttcttcctccttcctccaggcaagcccattggaacgtctcgctggaagatcaacaccagccattatgcagagaggccctcgtagaccatacaaagtgtggattctttcttttattattattgtaagctttaatagtactcctaagttcatctttaattagcagaggcaaagacagaagaggtgtatggtgtgcccacaatatagctaggagcccttactaattatgtatctcagcccttaccaccaccttcacactagtgatggatctaagaatttttagaaaagaacaaaatccaccgcgctagagtcgtctgcattgcctggtaccaacaaatgaggtatttctctacatcttgagtcttgacatgcaccggcattatcagataccaataacaatgtatttctacctcttgccatatgccggtaagtttgggcaactactcgggggtagtcatggtactgtcgcgctagatctgccaatggatctcatgttgttcacgacgctagagcaagatgacatgcaattttactggcaaaagatagacaaatgtttttttttgttatatcaggtggaatttcactttcaatcatagaaatttttaacgtacagataaagtagtttatcggtgataatggcttttgagtacagaatgccaaatgaacaagtcttccctcacaaaaaaagcttgaacattttattaaagtagcttagctagtggtggttgagttggagtatgactctgaaatttgtctcaagtgcaatttagaaagtctctgtgatatcaccttcatcgtcaattggctcggcttgacaatgcatggatgtcatcttgactgtatatggtccactagaggcggagattagaggccgtgcaagagaaaattaaggggaaaagaattgatcaagccaaaccatgtaatgtgttgatgccggctccaattgaaaacataatactttcatgttttctgcaataacaatatatgccggctaaaagaaataattctgcttaattacgtcaatggggttcaagtgaaaattactcgttatatgcagcggagtagcaaactcataagaaaatttgaccaaactcatgctaactttaagaatttctcaatcacgggaatacttcatctgtcccaaaataaaataaaaagaattaaatgtgatatgacctactaaaatgaatctggatataaacaaatgtagagctagatgagacataacctaatataaatctggacatgtttctgtctagattcgttgtactatgttatatctcatctaattctgcatatttgtttgttttgggacgggggtatatatttaaagaggttttatgtaaatttaagaaaaaaactttatcatatcacatatgcaagatatgtagaaagtgaactcaaagtttgagatctgcttttgacattttcatggacgaatgaaagcaataaaaatttggattcagatgttgcttcaaaaagaaaaaaaaagtttcagatatagtacaatatactgaacagtgatagttttgtttgataactccttttcttcttcttcttcttcttcttcttcttcttcttcttcttcttcttcttcttcttcttcttcttctaaacatcatgttcgatcttcttgttagcaggatcatacctaaaaatttggggccaaggaataagaattgcaccctaaaagaaaaatccattccaaattagtggaaccagagaaaaggagagcttttttttaaaaaaaaatagagttggatatctcaaaatatgttactcccccggtttcagattataagactttatagcattgctcatattcatatagatgttaatgaatctagacacacatttattaacatatatataaatgtgggcaatgctagaaagtcttataatataaaacagagaaggtagaacacattgcctttatttgaaatatggaagtcctctaatttttgggagccttgtgccaaatatgcacgccactcccaatcgacgggcatgcttgtcatcctcattattcaggcaatttggttgagctatatttgaaatgcatgttgagatttttggatatctctacgactctacctgatgataattatttagattatctgcacgaacctaaaaagttataacctaaacaaggtaaattaccatgtttaggtttgtgatgatgttctccaagagcatttcaattctcctagttgccccaaaagacgccaaattgacgatattaatagaaacagagaagacatcgaacaaaacaatagggcaagtggactgctcagcacaaacagcacatgcaacctaatgatgtaattaggtgcgcactcaacactaattatcatgtccgtagctacacaacagagttaaagtaacactattgctccactcttgcaccagagaccgtgacaatgtccaaaacttagtataaaaggtaacttggagatgactataagagcaagtttaatagtatactggttccaaattatatatagctaatctaatagcctattcatacaatagttaactatagaaatatactacactattaatacccggtcccacttttcatacacacataacgtcttgaagtccgtgttgcagccggctacaaatctgtagtctgctttcttctctctcttatctttttttctcgatatgtgattatagctgatttatagcttgctattgtacctgctctaagaaatgaactctttcgatgatgtagatttttgggccaaattctggtggtgtacatgaaaaatgcataattagatatagtgcacaaattgaaaatactctacgcgttcacaaataacagttggttttgactttgagttatcctatttgaccgaccattattttctaataatgtaactatttaatactaccagagttgtatcattaaatctgtaatcgttatctaatgtattacattcaagtctattcgctttaacgtctcggtaaacgattgattttgccaacatatacgtagagtacatcagtaatccaccttggttgtagctctttaactaaagcctaggattatattccattatataaaataacatcggtagtgcaccttaggccatgctcttttcagctttttctctagattctcgtcacggattagttgctccacgcttctaacattacgatttctaaaaataaaattactttcaccgtattatttagatcactttgttacagattttgggaagtttatttcttattaaatattgtgctaaccaagtaaacaatccaacgaaaaagaatatgttccaaacaacccgtccaaataaagtgtttcataggtacctagccgcgaaaaaggccgctcttcacgagattcccaaacatcgtcaatttcttcaaaccgatccacccccgatgatatcgcctttcaccgtcgcatacaaatagagacgcacccccccccccccaccacctcacccacacacccacactctctacccccaaacttgccctccaatctatctccgccgccgccgccgcctccgccgcgagagggcgtcgccgagctgcgcgggaggctcgcctcccgcagcatctggccggattcgtcgtagtcgaggcagctgtaagcgagagagagggagatggccgcggccgccgggaaggcggcgatggagcggcaccagtcgatcgacgcgcagctgcggctgctcgcgccggggaaggtatccgaggacgacaagctcgtcgagtacgacgccctcctcgtcgaccgcttcctcgacatcctccaggacctgcacggccctcacctccgcgaattcgtaacttacttgcttcccagatcctgttgctcgtgcccgccacctgttcgatcgattgcccacacggttggttggctttggttttggttctcttcttgcaggtgcaggagtgctacgagctgtcggcggagtacgagaacgacagggacgaggcgcggctcgacgagctggggaggaagctcaccagcctgccgccgggggactccatcgtcgtctccagctccttctcgcacatgctcaacctcgccaacctcgccgaggaggtgcagatcgcgcaccgccgccggatcaagctcaagcgcggggacttcgccgacgaggcctccgcgcccaccgagtccgacatcgaggagacgctcaagcgcctcgtcacccagctcggcaagtcgagggaggaggtgttcgatgcgctcaagaaccagaccgttgacctcgtgttcaccgcgcatccaacgcagtccgtcaggaggtccctgctccagaagcacgggaggtgcgtcgatgagctgtccccttctccgatgctctcggtgcgtcgggaaatgctaaatctaatgctcttgatgttgactcgctgtgcaggatccggaattgcctgaggcagttatatgcgaaagacatcactgctgatgacaagcaggagcttgatgaggccctgcagagggaggtaagttgatttttttttttgtcaatttgtggttacaatattataaagtcaatcatagcaaaagtgtccaccgcaccattttgattattttactgcttatcagctcaatggcttctttttcttgatgacttaaattatgggtctctgggcttaatgagatttgtatactctcaggcagtagcttaatttagaattaggtccatcctaaaagcttaatttagtcgaagtggcaaatcatgtttgtgcctcttttatctatgtggtgcctgtcctgctccatgatcttgccaaataatttagaaatcttatctctattgtctgtacaccattcttttatattagtttatttggacaaggatttttttttttacattagtttagttggagacaaggaaaaacattgaacactaggtgattatttccagatcctcaaaaggtgtttacctatcacgttcataaattaattgctctgtacttttggactctgtcttgacagttctgaagtccatctccaatagttttcttttgatacacttgaaatgagagctctttttgctagttctgatttctgagtgaaattcatcttcaatcagagaagtgctatgtgcatattgcaaagtttatgcagaaatgtcgtgttggtttctactactctgttctcatcatgcctttctgattgtgtggtttaacacgcttcacagattcaagcagctttcagaactgatgaaatccgcaggactcctcccactcctcaggatgaaatgcgcgccgggatgagttattttcatgaaactatatggaagggtgtaccaaagttcttgcgccgcattgatactgctctgaaaaatattgggattaatgagcgtcttccttacaatgctcctctcatccagttctcatcctggatgggtggtgaccgtgatggtatcttctcctatcctaacttatacatccatttttgtttagaaaggaaaacagaacttggttgagatctgtcacatgctcacatgtgctattgacagaaaattggcttgtttgtcctcttagtgacatcatggtattagttctagcaattggttatttattccccttccacacttttaagtcaacaaagattccatttttttcaaataattgtattattcacttgtctaaatatattttttgagataactgcagccttttctgctccctgtaatcctgtctgttagaagaagttgaactctaaaactgacttgttttctaggaaacccaagagttacaccagaggttacaagagatgtatgcttgttggcaagaatgatggctgctaacctgtacttctctcagatagaagatctgatgtttgaggtacagcagaattgcttattttcattgttcttaaaaaagtactgcaatactgatttctaagttttaacaatgcaatatgttttcctagctctctatgtggcgctgcagtgatgaacttcgaattcgtgcagatgatttgcattgctcctccagaaaagctgcaaagcactatataggtaacaataccataactgtggtgataatgaattttgggtcggcctgcgcatttgttgatttgtgtatcattttatagtctgaaggaaaagctgtacttttggtctgcttgcccttctctttttagcatatgaagtaaccattttcaagttttcagatagagttctaatatgatgttcatgcatttttttaatgaccaatatatcattttcttagcctctttttctatcatagccacctcatatgcttgtctataagatctgccatctttcctttaatttttatcagagttcacctgtactgtaaaatcttcaggtgattttacacttgaaaattgtgcttgccaattgccaattgtaatgtgtatattgtggataccagtgttgaattattagtcaggttaatttgaaaaatgcatctgctagttcagaatccactagaactttaatataaagaaattatttgtttagccaaatataattaggctgacattgttcttccagaggctgtgaaatccctactcaaaacatttatcaagttgactacagtgatggactaaaatggactggacgtttttatgtctaatatggatgcatcaactcccggcataactacattgattaactacatttcatttttcctcggtttgttactcatttagctgatcaacctgggtgaaagtcatgcatgattttataattgactgatttgtactattttttagcaaatgcctactaaatttgcctcttactgagaaaatgttaatggtgcagaattctggaagcaaattcctccaaatgagccttatcgtgtcatacttggtggtgtcagggataaattgtactatacgcgtgaacgtactcgccatctattgacaactggagtttctgaaattccagaggaggcaacgtttactaatgttgaagaggtaatcctatttatcttatatgtatcattgtgaatgtcattgttgtacttatagtactcaattatcaccctcctatcttgcagtttctggagccgcttgagctgtgctacagatcattatgtgcttgtggtgacaaacctatagctgatggaagccttcttgatttcttgcgtcaagtatcaacttttgggctggctcttgtaaaacttgacataaggcaggagtctgatcgacacactgatgtccttgatgccataactacatatcttgggattggatcttacgctgaatggtctgaggagaaacgccaggattggcttttgtccgaactaaggggcaaacgtcctttgtttggtcctgatcttcctcagactgaagaaattgctgatgttttaggaacatttcacgtccttgctgagctcccggcagattgttttggtgcttacatcatctcaatggcaactgcaccatctgatgtgcttgctgtggagcttctacagcgggagtgccatataaaacagcctctgcgagttgttcccctatttgagaaacttgcagatcttgaagcagctccagcagcggtggcacgactattttcaatagactggtacatgaataggattaatggcaagcaggaggtcatgattggatactcagactctggcaaggatgctggtcgtctttctgcagcatggcaaatgtacaaagcacaagaggagcttgtcaaggtggcaaagcattatggtgtaaagttgacaatgttccatggaagaggtggaacagttggcagaggaggtggtcccagtcatcttgccatattatctcaaccaccagacacgatacatggatcacttcgtgtaacagtacagggcgaggttattgaacactcgtttggagaggaacacttgtgctttagaactctgcagcgctttactgcagctactcttgagcatggaatgcatcctccaatttcccccaaaccagaatggcgtgctctaatggatgagatggctgttgtggcaacaaaggaatatcgatcaatcgtcttcaaggagccacggtttgttgaatacttccgatcggtaagttcacctctattctgaattctttcccataaaatctgctgcagttccgataggcgtaaatttatgcttaatttcaaggcttcttgacaagaccattctctaagctaattagatatactcatgagttctttgcagtttgcatagagcgtgtggtctgatgcgaagttgcatgacaaatgtgtgtaggccatgataatttttctaagcttcatgtccacagttttttgcaattttacttaactatgacaagggatcaaatactaatgtagagatatgctccttctccatcaataggtgcaccttcatgctccttctccatcaataggtgcaccttcacattctcttgcctgtgttaatcgactaagaactaccatatagaagggattgcatacatattttggttctctgttgtcagtcacttcgtgctttatgttatctcttatctgagctagatgttggtggtgaacatgaaattctgacatgtgtgtgtccatctgctgttccaggcaacacctgagacagaatatggcaggatgaacattggtagccgaccatcaaagagaaagcctagtggtggcattgaatcgctccgtgcaattccttggatttttgcttggacacaaactaggtttcatcttcctgtatggcttggatttggtggagcgttcaaacatataatgcagaaggatatcaggaacatccatacactgaaagaaatgtacaatgagtggccattcttcagggtcaccttggacttgcttgagatggttttcgccaagggagatccaggaattgctgctttatatgacaaattgcttgtggcaggtgatctgcaatcctttggagagcagctgagaaacaactttgaagagacaaaacagctactccttcaggtaaactactctagaataagaatgggctatacttagatattaagtttgcttgcatttaagctgcacctttctttttatcaccagatattggctttaacccacaccagtggttcttttagagtttttccttgagatatatatgatcctgtttgatgtggatgatatgatcctgaagaaatcatcaaaagatttatgtttgaaaattatactgaagacaaatctggaactacacctaggcattctgaatcataaaaacaaactccatgttttaaataagagtgcacatcatatcatcactgaatcttttcgcagtctaagttgcgacaactgagatctgagaagttagtgcccttgacacattgaaatcatctgcaggttgccggtcacaaggatattctggaaggggatccttacctgaagcagcgtctgcggctgcgtgagtcgtacatcactaccttgaacgtttgccaagcctacaccctgaagcggataagggaccctagcttcgaggtgatgtcgcagccggccttgtcgaaggagttcgtcgacagcaaccagcctgccgagctggtccaactgaacgctgcgagcgagtacgcacctggcctggaggacaccctcatcctgacgatgaagggcattgctgccggcatgcagaacacaggctagattgtccacaagaatgcttccagcaggtgcaatcaatcaatcatcaataactccttccatgatgagatggtgaatatgtttaactagtacgttcgccgatgctagtgaattctggagacttttttttgctcgcacgttttcttttggttgtgtacttgatgtaaatgtcaaggggggacttatttggcttttgcagcccgatccaaaataaaatatggaccaatcattctacgaagcttgattctgaacgcttcgaatttgcatcagtggtgacagcggctgtgtttgcatctttaaacgacagactaaaagcattgtgcaccgcaagatgcagacttgacatgtgcttatagcagaagtattacatggagcacatctcaggtgagggaaaccggaacacacctcttctttcaatgtgcttatagcagatttattacatggagcacatctctgtctttctatcaaatgatagtccttgcgtattaagaaagggctttctagagattctactggtcctgttggcacatatgaaagcagcgaaatgccttacctttcagcaaagattgcccactgttaaaatgaaggttctcttgcatactttaggatgagcagaaacaaatggttttagggtgtattcatttctcccctttcttaaattttcctctttcgttttctacgcatacgtttactaaactgctaaatagtatgtttttttttgaaaaaaattaaagtttttttaactaataattaattagtcacacattaatgacttgctccattttacgtgcgctaaggagaagatcccaaccattccaaataaacacaatatagactatagagtttctccatatgtaaatatcttttgatcttttcatttataaaaaaaatattaactactgggtttgactagtagtgttgctccttaaaaaattgttaagtccttttttaagtcactgaatgcacttccagtaattcagattacgaaactgaagagtatccatgacacttctaatatcattctagatggtcaaaagaaatgcttctcgtaacatttgtttctttttttaaaatctcatttgagtgcataactttatacttccgctgttacattaaaaaaccaatctaaaatcggagattgatttttttacgggacagatggagtatgtgctatttgtagatattttacttcgtcatctatgaactgaactacccatttcttgatgtgtcttctgctcggcctgccatccatactttagatccattcttcgggcttgatggacatttgggcccatttccatccgtcctggacaggacagaaatactttgagcccattaacttcctcgctgggaagcccataattctagccattcagaaatgctgtacactttctttggtttatagaaaaaaaaacatatgaattttataggatactaactttcctttaaaattcctatgaaatgataaaccatttggattcttccatttacatcttacaaccctatgttattctactagtaatatatgcctctgcattggaatagtcccatataccactataattagactggttatgtatctaacctaaagattgcaacgggcctataacactgtgaataggttgactgtactccctccgtaaacaggaggagccctaggttagattttttttggacggagaaaatatttcttaactaactactttttatttggagttttcttttttatgcgagagtacgtgatgcatgcctaagcagtgagggaacctgtttgggggagcttaagaccctatttagatgggactaaaacttttaagtccctatcacatcggatatttagacactaattataaatattaaacgaagactattaataaaacccatccataattttggactaattcgcgagacgaatctattgagcctaattaatccatgattagcctatgtgatgctacaataaacattctctaattatagattaattaggtttaaaaaattatctcacaaattagctttcatttatgcaattagtattgtaagtagtctatatttaatactctaaattagtgtctaaatacagagactaaagttaagttcctggatccaaacaccaccgaagattctgagaagcagctgctgagaagctagctgatgagaatctgaagaagctagaaaacccagcttctggcttctagtttattttccagattctacaactgcagattctcagaatctggataaaaagctggactgtttgggggagcttctagcaactggagattttacgagaagttgcagctgttaaaagctcctctaaacaggcccgagttttactttctgtgtgagtgcagtggggagggaaaaccaggagttctttttttttttttttgagcgcgttgtgcgcaagcagggaagaggaggatggctccccttttaagatagtagagatgtcgtacccggacattgaaacatattgttttgttattttcccttagttttgagttttaggtgttccaaatggtgtggcctagtttgaaacatactatcatttactggattattgtcgtagattttatctacttaaaagtataggggtaagttaaataattgaagaaataaaattaagaagtaagagatctacattatgcagtagaagtatattttttaggaaaaaaaaatattttttagtggcgtagagtgaataatccgtggtaatattctggtaaagtagctgaaagcctgaaaagaacatgctattaatatatggtgggctgattttgtttgtctctaagcccattattcgcccattcgtcaatataataataggcacattatctttacggaactagctatgtctttgtcgacaaatccttgggtcaaaatcacccagattttttcctaccgttagattaagatccagaggacacaaaaaatgctacatatttttttctctgactaatcagatcacaaaactacatgggctcgaattctagcccatagaacaatacaaaaaattatacaggccataactgcaaatacatcatggcccataatgatcaacttcacatccaataaaggttagaaaaaaacaaaataacacagggagaccacaccagttcgcacaaatcccctagatcgagcaaaacaaatcgagcacgccatagacagtgaggagaacgagaaaaagaagaagaagcaaattcttaccaagaacattgaggtcaagaagttgaaatcaacaagacataatcttccaggtaacaaattacctagcacaaaatccacctttacctttccccattgacttcaccatattctgccagtcatcttttaaatcaaacaaaaaacaactcagttctgtaaaaatattggagaaaagcacttggaatagtgaatttcttttggagaaaagtgcttggaataggaaatttctttagatcaagtagttaaaagtatgtaactttttcagaaaaactcgtaacaaaaactatcaatccatagtcagttacagttacaaataacaaaagttacatatataactacagtacatctaaactgtaactgggctgtaaatggaatcattcttaaatttcttaaaaaattcagtacttatactgcgacattaaaacatttccccaattataacaagctctaaattatgttacaaatatataaagaactatctatctatagtcagttacagtgagaaataacaaaagttacagatgtaactacagtacatttgacgaggttaaacttggagttataactggaatcatcctttgatttttttttaaaaaaattcagtactcatgcactaactttttttttgcctatgacaaaatgttctaaattatattacaaataacctaatcatgtagggtcaggtatattgcaatctcaaaaatcaggagatacacaatcagatggatatgaaatgagaagcaaaattgtgtctgaagaaatgagaagcaagaagacagttaaaggtgagaatcattctcacctagcattatggaccattttttatcttgtcagaaaatgtcatctagcaaaaatttatatacaacaaattagagatagtagcatgataaatttttaaagaactatatatctatatccagttacagtgagaaataacagaaattacatatgtaactacagtacatattgactgtaactgggctttaactgcaatcatgcttgaatttcttcaaaaaattcagtactcatgcaacagcattaacatttttttactattatgacttgttctaaattgtactacaaatgattgaaacatgcaacgcctgatagattagaagctcaagcaacagtgaatacagagtcaaatagatgtcaaagtgacaaaattttctcagaaaaattaataagcaagaagacacttgaaggtcagaacaatggacagatagcattatgcaccaaatttgatcttgtcagtcataaaatctagcacaattttgtatacatgaaagcatgatttttttttttgaaaaactatctatctccagttacagtgagaagtaacagaagttacatatgtaactacagtacatattgactgtaactgggatgtaactacaatcatgcttgaatttcttcaaaaaaattttgtctaatatacattatctaaattatattacaaataacctatctatgcaggttctgttacaattcgatctcaagtaacagtggatacataatcagagagatctgaaagagataacattaatttcgtctgatgaaaaaagaagcaagaagacaactaaaggtcataatcatgataacctagcattatggtccatatttgaccttgacagacaatttaatctagcacatatattagagatggcggctttgaaaaatctaaagacctatctatctatagtcagttacagtgagaaataagaaaagttacatatgtaactacattacatctgaactgtaactaggctataacagctttcatgcttgaatttcttcaaaaaaaattcagtactcatgcagcagcattaaatattttcccctattataacaagttctaaattatgttacaaataatataaacatgcagggtctgatgggttacagtctgaaaaatcaggggatatgcaatcggagagatatgaaagtgacaaaattttgtccagagaaataagaagcaagaaaacattgaaaggtcagttatcatgctcacctagcattatgcaccataaaatgatcttggcagacaatataatctagcataaaattatatacaacaaattagagattgtagcgttgataaattttcaaggactatatatctatagttagttacagtgagaaataacaaaagttacatatgtaactacaatacatatagactgtaactgggctaaaactgcaagcatgcttgaatttcttcaaaaaataaagaatttcttcagaaaaggagtcactttgtcacaatggactgaagattttcctcaagtgaaaatcatcttcagacagtggtgtttaacaaagcacaacaattagattagagcctaggataaaaaaaacagagcattgtggtccaaacggtcatatctccagttgtgtacaaatttgcccatatattaaattttgtacataatttgcacatatctcaaacttctgtgcacatatattaaaatcactcgacaacaagatgtgacaagttagctgatgcagaagggaatggaccagaagggaatggaccagccagggtgttgttgttgagcctcccgattaaatttcacagcaaatgagttaactgactaacaagctccacacataattaacatgggaacaatattgggatgggacgatgggtcattcagaataaagaagaaaaaaaatcatacagatatttcaggcatgtgaatacctccaggcacccaagtgaccttggttttgctaccattgaaatgcattagatcaacattagactgaaaccctccaaattatttttcagtttgctgaagtatgagattttaaaaagctcatgtcgactgaaagctcatgcctgctccaagattcaaaaaatactgacaattcaaatagatttacgagcgtgctatcccctgttcccaattcagaaatagtgccaattatgttcccaagttcagaaatagcgccaattcaaacagatttacgatttacgagcgattgacaatgaacaaaagttcagaagagaagaaagagcagatgcaaccaatagcccataatttctcaaagcaacagggaccaagttcaggtattggcttgctgctaactcatttagatcagcactgaaaagttcagaacatgtacaggaattttataaaccaaatagtactgtagaatacaatctgaagaaagcagaacgcatgtaggggtttgggtttaatttaaccaagcaactcagcatactgggaaatcaaaccgtacatctctgaaacgaaatgattcatatgctgcagaaggtaacacaaaacatacttggggttcagttagcatgcatatgtaaaacaaaattcttcagatgcataagaattcagatatatgcagggagttgacagataaatcatctctgaaacgaaatgcttcacatgcagaaaaattcagactcatgcaaggagtttaacagatcagtcaactaatcactgaaagtgaaatgcaacattcagataaagttgcaatgatgcttccctactatattcaaatcacacataaatcaaagcaaaaataatcaactcatgaatctgaccccctccctgaagaaaattcatgcagggatccaaaaaatgatcaactatctgggtgattagaaaaaacccctaaatccacctcgaattaaacctttaactccatcaaatacccctgaatccaacccccaacatgaacacccctaaagaaaaatcaaaccaaaaatacaaaaaccctcgtggattagaaaaaaaaacatagaacaccatcgaatctggtcgtttgcaaacaatggactagtaacaaaacaccctagactgaactgaatcaaactataactaaaaacttagggaatccaaaacctaaacggattccaaaactaaaacaagtgattctgaatcagatccatatgttgggagcaaaaaaaatcgtcatgtattgacccgaatcttctaaacctagccctattgacattgaaaaaaccaaaacacaagctaatgatgccagcaaatcagggaagaaactcaaaaaacactctctctcgagttgtctcccctagcgagcgcgcgcgctctctctctcccgctggggagctgctcgtgctctctctcgccggcgagctctctctctcgacggagaaaacgagaagagaaaagaaagaggagaaagagatgtagagaaagagcgagaataaagaaagagagcgaggaaacaaccaacggttacggacataatagcgcggaatccaaaatttaacatgggttggcccacattgactcccaggccatctgctcacaggccacacggtctcatccacacagggaaatgcacgaatcatggcgcaaatcctacggatagaaaaacgacaaatattgggggtgaaaatctgttgagaaagatctagcaaaatcgtatctttactgttcaaaacactgtttacctattgagtcatttcgttttcagatttgaaaaagaaaacttttagcccctgtttaaatctcaccttaaaattttttacactgtcacattaaactaatcgcatgaagtattaaatataagttaaaaaataactaatcgcattgcgactaatttgcgagacgaatattttaagcctaattactccatgttttgacaatgcgatgctacagtaaacatttgctgatgataaattaattaggcttaataaattcatcttacagtttacaaacggattatgtaatttattttgttattagactatatttaatacttcgaatatacgtccatatccccttaaaagatctgtcgcatgtcgacgtcgatctgtgcacgcgcgtcaggaacaaaaaccagaaacatttttgtcatctggagaacttggcacgtggacccgactagtagcggtcaccatgtcccgttttcgacgatgacgaccgatcaagcgtacaaatcacgcacgatactcgcacgcgtagcaatgacagcatcatatttccgattttttttctttttggtgaacttacaagttttatacaggtaggtggctcgtaaaagcaaaattgtgctccacatatcatatccattttgacataagcagctaggtcagcaagaacacgtcaagcacaaaacgagaacttgaagacaaaaataacgatcaagggcacgtttggaacgcaagatttgaacaatacgaaaaacacaggattagaatatcaaacatgcgcaaacccagctagagttcaaaacacaagaattttggggcattgcgtttgggtagtttataggaatataaccatagaaatttgatggaattaagagagagaaagagattaaaagacgcattggattcctcaaacgaaaaataaaatggagcttgaggtcacggtaaaattctcgatgcataggatagggaatttgacttgctaaaattctttgttccaaacatcgcatttaagaaaaaaaatcaagggttatcatccttaaaattcccttgaatttctttcgatccaaaggaaagggcccataaattttttgaggaattttcacattaatcatttcaatttcactagtaatgaaaaataaaaccctaagttcaccgtcagatatggaatttcaactatcacatattcacatgaacagtgtgaatgagacagaaaatacgtagatattattgtcggaattgcctgcaaaggctgttataggatactgaacatagcatactgaacaaaagaaacgaaaatgtagcctctcccaacctacagatgggtctctgaacagacgaacatcagcaggtcggccttctacttggacctaagagatgatgagatgatactctcagaaacggcagttaccgattccgcg

SEQ ID NO: 27789 - DNA, 2468 bp, Oryza sativa
acattccaaaatgcatataatcctttcattttaaatagttgtgacttgagtgttagtgctattttaattttgatccttaatcactttcaaagtataatattttgatgaatgaaatttatacgcggcatatataatttgattacatggtacaatttttttttataaattacatggtataatcttaactagatgtagttaaatctagtataaaaaactagttgcaaatctgtcgttaaaatagtagtcaaattaagtgtggatatgaataacatgtagtgacaattattttatactaatgtagtgactataagttatattttggactgggaatgaattgttaccaaaaaaattatgctactgaatatatcatgataattaattaagccctcttattgcaatagcataattaatgttttagacaaattatatggttttagagatgctgaacatttttatcataaaatttgatacctcactagcgagtaccacaaaaccgctctttaaaatactacatctgttccaaaatataataaattttaacaataaaactgcaaagttctttgtacctcaaacttatagccaaatgatatatttttgaatggaggtagtatgtattttctctgtacaatcatagatgcgtgcatacatatactacttatgtacatgacatgcctgaatttcttgctgctggtgccgtaggaattccgcacgaagcaccagaagaaggacatggccatcgagcgtcccctcatctcgtcggactccatgttcctcaaagccatccttccgacgctcaaaattttaccatgcaaccccctgaccctccatggcgggattggttcaagcagggttcccgcggaggcctttggtggcggccagcttttcagctgcccacttcaaattccagttttccagcagcaatcccccggcaatggcaacacggtgattagcttcagcaacaatgcttcaccgatggccatgcgtgcgccaaccgacaatactatgatatcgttcaacaatgtctctgctgcgccggtcgccaatgcggtgatctccttcagcaacatttctaggtctgctgccatgcaggcaccaagcggcaaggggggccaacatctgtccggtgatgtccagcagctggattttccccagcagaagctgtactttgggcccttctcctaccaagggcctccgccaccttccatgcacaaccacatcaacctactcccgccgacgtcctcccctgtgacctgctccatggacaaaggcaaggttcctattatcgagctcccatatgggatgcctgtggatgacttcctcgtcagtcaaaccacatatggcggtgccggaccatccatcggagccactgacgctgctgccgctgcgtacccttacacagatgcaccgagcaataacgttgcaactggctgtctcatggtgccaccaatggggccagcattcagtatcactgagccaactgtggtggcccaaggtgagggcaccggcaccggtgtcgacgccggcacatcagagaagaacgcgatagtagaagcaccaaacaaccccgcgccattaatggtactggatcaggttgctgctgatgctgcaatggatgttcaagaagacatcatgttctctttggaatctcttctggggccggactatgacctgctacctatggaagacgttagtgctccggacaccgctgcagccggtgatgcagctggtggctcactggacggagaggaaggcggcatggacattggttgggatctcgacctggatgacatcctggtggagaacgttaatgacttcgcgttcctggacaaccttgccgggagcgagtagtcagtagtcatctcatcgcaaatatattatctcaagttaattaagctagagattagagagaggggatgtgtgctcagtatgataaaacaacttttagtctttgttgcaagtactctaaacattgatgatttttcctccgttatcatgccaggaatgtgaacttttaaaactccaaattcctatattgcagatatgatattatgatgcaagatactggagtattattttgagacatagtaagtattttgttgcattcctgcgctccggcgtcgtcgcggactaggtgcctcgcgtggctgcatgccatgcacgccgctggccgatcgaagtggttgtttcggtcgcatcttcctctcgtaccccgcgcctcctcacctcacactctgcctattttccaacaaatgaaggctcacactagtgctctgagtgcaaggatttctggtcacaaataagtattttgcgatcttgaataagttcacaggggtaacagagtgagaaataagatatactcttcatctatgaatacaagggttcctagtcttttctattcatccacaaataaaatggattttagagtacttttccgctccaactaactactttattatttattgctcact

SEQ ID NO: 27790 - DNA, 9629 bp, Oryza sativa
tttcctttcttctactcgggaaaaggaaaaaaaaggagaagaaagaaaaaaaagaggaggagggaaagataagaaaagaagaaaaagataaatgggtttcatttgttagtcaaaatgatgccacgtcttgtccgtgtggcatgccacatcagtgccacgtaggatcctataggggctggggcgatttgggacctaaatgacacactatgacaagttcttggacttggatatgtattttgagagtttagagacctagatgacatacccctgcaagtttaaggaccgcccgtgcactttactcttaaattaactagagaatgacaacaggatgcagaaaagctaaagaaaacaaactagattacaaaaaatcaagaggcatagacaaactagattacaaaaaatcaagaggcatattaaatttctgctaagttttcaacacatgaagaaacacaaactgatcgaaatggtataaatcaacaaaaaattacatcgtctagatataataaacatgtcatttcacttgccctcttttagagctattaagccacatgacctctatcaagcatgagctgctataatccacatttagacccatggtaatagtaaacgatattaaaatggaaggctacagcatccattcataactcagaaaaactgattgaagcatcaactgtaaaatgtgcagatagcaagggactccttacaggattggaaggaggaaggtacttactctgttcaccatttctatgaacacctccaatccctccagttacgaaaattggtatgccaacctgaatttgagagcaactttagtttgatatagagatgaatgattggcaccaactacatgtaacaaagatgaacaagaaaaaggctatcaaatcaaggaaagataaattaacagtaacaagagcagtaagatgtttttggctctgaccttatgagcgaaaaacatagtggcagaaactgttgttgcaccattaccaccagaggccacctttcaatcagtaaaactcgttacaggaagcaataagacgagaaacatatatcaactgtaaagttttagtgcagatataactgaacacattggaaaacattctgaacgaccaatttctagtgtgcaaggtactcacaacatgtgcaatatcccttctagccgtcttctgaaactgtcttccacttacagccaagctcttcaattgctcgccgctaaggcctatcacattacgaaaattatccggtgttaattggagaataattcatagtagctagcaactacggatcacgcctccagcacttgaacagttgaacatgtatctgatctccgagtcacaggaaaaatcacaggactcaccaacatgtggcacgccgttcagaatggctatggtggcaggaaccgccccgttctccctcacgacggcctccacctccatggcggtctggagattcttcgggtagggcatacctgggatgggaagaaagccaaacgcgtcccccagccgcgggcgcacatcgccggagtgagccatgtaatccgggagggagacggggtggggaggaggcggcgaggcgcgagcttaccgtggcagatgatggtggactcgagggcgacgaccgcgccgccgcgcgccagcgccgcttccacctccggcgacaccgccacccccatcggccccgtgctcgacgacgacgacgacggcgacatcccacggcggcgacggctctcctccctttctgacttctctgatgagtacgcttccacttccagtctctttttgggctatactaggctgcggccgacaaggagtattcggcccatgaatagtggtcgcaaagcgctcggcccacccgagatgagggcccatgggcttggttggccccgcacgtcagtgacacgttctggggttctaacttctcgtgcaatcctgcccttttcagggtcaaaacagcggcgaaaaatgttcgagaaaaaaaaaacatgtttgtacggggacggagttttttggataatggatatgaaacccggtgtttgcttcaagtgaagctacaaatttttaactcagaacctaaccataacagaaataaacaatggcacaactttaagtttatcaattttgctatatatttatcgacaaattttcttctaaaaatttaacaaatataactacagtataatcgtagtgtaattatactgtaacttgtatgtaattacattataacttgtatgtaacttgcatataactttcacataattttgaaccgttatatttgtttcaacattcgtacaagtgaagaaggaaaaaaagtcgctgcatgcatatatatgagaggattcgttcccagacctccatttcaccgaaatagtatgttatggagagatttttaaaagttacatgtaagttatagtataattacatcatgattatactataattatatttgttaaatttttaaaaaaaaatttgtgaagaaatgtacaggtgatcccaacaaaatacagcgaaaggcagtggcggcaagtgccatactgccatgtcgtctcatcaccggataagccacgccgatctctcctatcctctcgccgacacaaaaaaccacacaagaaaacgcgcgccaaccaccgcatcttcccctccccccggcctctccgacgtcgaccatggccatgctcctcgcctccctcctctccccttcccctcttcccaccaccaccacctcttccacgtcgccgagggctgtcaggctcgcgccggcgaagccgctcgccgccactctcgcagcggtggccgcggcggggctcctggcgctgtccccggccacggcggcggcggcggcggccggggaggcggagttcaaggtgtactacggcacggcggcgagcgcggcgaactacggcgggtacggcgggaacgcgagcaagaaggacgcggcggagtacgtgtacgaggtgccggaggggtggaaggagaggctggtgtccaaggtggagaagggcaccaacggcacggacagcgagttcttcaacccgcggaagcggtcggagcgggagtacctcacgttcctcgccgggttccgggcgctggcgccggtgggcgccgtgctcgacaacctcgcgctctccgacgtcgggctccaggaccagatcgcgtcggcggacggcgtgctgtcgacggagcggagggacggcggcgggcagctctactacgagtacgagatcgccggcgccggcgcgcacagcctcatctccgtgacgtgcgcgcggaacaagctgtacgcgcacttcgtgacggcgcccaacccggagtggagccgcgacgaggccgtcctccgccggctgcaccagtcgttcaagaccgtcgaccccgccagaccgccgccggctagctcctagtcctagctagccattgttcgccgccgccggccggccggagtccacgacttgtctcgatcgagtggagagctagcagctgggcgaaacaatttctagtagctttgctgcccgagatgtaattaaagcagttttgtataaattatggatctactatacgcgtaatcaaacattgtcctgtaaattattttcatccatatagtatatactccctctattttcagtttataagatattttgacttttgttaaagtcaaactgttttaattttaataagtgatcaagtcaaactccctcactcctagagagtgtggtgcgtggaggggagggagaccggagccctggccgcggctagctccttcctcaccgccaccctagaggaaggcaccgtattcgtagaggtgagggaactcctggcccaacgccgcctaggcgttgaggtccagcgtgtcaacactggcgcggggaacggattcgtgggaagggctagacgccgacagccgcgagggccaaatgttgccggctacggactaaataggatcttgagagaagaaatcgaagccgttggggtccatcttccggcagatccggtgcgcggtgatgtgtggacggcggatccggtggctggcaatgcgggtggggtgaggcgccggcatggatggccagcggcggatttaaaggaaggaacggtgcgggttaaagggagggggcagcgttggttgggcccggcggccgccccagccaaggtcggcgacgatagatcgaggtggctttagggtttttgaaaaccaaccgagggcaaaagcaagggaccaccagtgtgggtggctgcaatgggatccagagcaagtgagagataatgggaatcggtaggccccataccaaatagccccaattagcaccccttgagggtgataatttttggggtgagctatttacaaatagccctcctgtttgactccccttgagctattttgtggctaaaaggggttaggggtgggctaaaaaatttcccatggatccaaacatagcctagatgtctttgtttttgccgcgagaaatcaacatgtcagttgacgcgtgtattatgttattaatatttactaatattgttatgttacttccctcccaagaaaatattttagggtttcttaacggtctgtgtagccaatatattgtatagtattattagccttttagcatgaaaatattttagatgaatgaatttgaataaaggttcctatcaacataatcaaataaaaatgtattactactactaaattacgtgtttcaaggaagactatgcgcagttgctcgattttgtgtcattttcgtttcttgccaactactccctccgttacctcgggacggttttcgagaactactttgaccaacaatatctataagactaatatattttaaataaagatagtttgcatattataatagttcatttttacatgattaatcttttaaattttttttgctattaatagtcaaaatttaaaagtttgacttcgcactattctaaaaatgcttatattttcgaacgaagggagtattattctacgttgctatatttgttttctttgattattcattgcattggttataagtctcaacggaattagcgtaccatttataggtgtcacctcaattagcacagtggtttcaaccttccaagtgccacctagaattaacatagattccaggtgttatctgaataagcagacaagttctaaccttttagatatcacccaaaataagcgtaccaatacaggtgtcattcgaacaagcgcatcagttcaggtgtcactcgaactagcgtacgaggctaggtgtcacccgaactagcatacaaattctagacttccagtctttacaggtgtcacattaatcagcgcatcagttccagtcgtcgcctaaattagcgtatcagttccagttgtcacctcgaatcaccgcatcggttacaagtgtggttcccaattccggatcaaaaaccgggggtaacggaagttgttgtttcctttttaggggtatccccggggtaaaataggggtccaataactcggctctaatcttaaaaatttctttaattaattaattaattaacatatatatccctttttactgggcttttgcagccaacccggctctcccaaatcacggtaaaaaggtcgtttagaattccaaacacggtgtaaaaaagcgcagttgaatcatcaattctgtgatggcaaaaccacctacctggcgcctataaacgcaaaaaacccaataaatctcgccctcgttgcctcccctccctgcctacccccatctccacctccgcctccacgcgtcgccgccgccgccgccgccgccgccgccgccgtccgggcagtcgaccgctgcggcgccgtcggagctccccgggccccgtggatgagagcggcgcggataaggtcgccgcgggcccgcttcgtctgcacccgtctcggccccgggaccccactgggctggatctaggtttggcgaggggggttctggaagcctccgccgcgatggaggcggaggatgccgccggcggcggcggcgacggaggccggtacttcaaggccgacctcaccggcgccggcgtcgtccagctcagcgagcgcgtgcgggagaagctgcgggagttcgtggacgactacaccaacaacaccctcgtggtacgacgccgccgccaccgttctcttcccttcccttcccttccctcctctcgcgcatcgttggcgctccgctcggtgtgcgggcagtgtagtgacgccgttcgtttgtggtttggattatatgcttgcaacttcgggattttagtctagttttgagcgccttttgtagtggtatgccgcggtttgtgtgagatatatgcctgtgcggaggagctaaaattttgctaaactttcatgtaacctagcccgaattatgccgctgcgcgctgtgtttaatgtttggtcctctgctgttagtgtaatcactcataattgccgtaagatcccgtcttctttaaatatgttgggtgtgttcgcttcctggaggtttggttgggttggaacgaaatgttgtttatttgctctaatgtagttgggttggaacggaatgttttttatttgctctaatgtagtgcccctgtatactgctgtgctttgtttaattgaatccagtcggtctaatggtgccagaagcactagaatattgtgtagttacctgaaacatgtcccaaaaaaaaaattctaaaatgggagcataatgtactgccgctccattgcttttcttaggagattcttttcgcgaggtgatcactgattagatgctaggagcctagaaattcttaaagttccttttttatttttgccatgtatggatggatattttggtctaatctagttaagtttatttatttaatactaggttaggagatcgatatctcctttcaagaacatgatcatgcagtgtagcaacaaagattacattatctcatacttgacttgtgattagtcaagttcccatgggtgctttccattttagttcttattaacacgccatttattttctatttccctttccccatccatcaccaaattttcttaaccagatttgctattttgacctcatcttcttgggcacaacactttactatccaaaggtgaccaaactgtgataagattgctgcatctcctcattgtggttatagcatttatgcaggaatctgctgctaggttttcctctacctttaattaatgacaccatttttaatcatcgtgggtagaattgacatattctgtctgaggaagcatcctgcaatggcatggaatacattgctttcagcacattgtattgccttgaattcattttattcattttcttacacactagaatgctaaataccatcctttaccttttctatgttacactgaaatgctcctagagaaagcaataagtgtacctctgttgttgttttaagtgcaggagtacgtcattttgttgctcgaaggtggaaagcgcaaagatgaggccatcaaggagcttgatgtatttctgggaaaggatagtcgcgcctttatttcctgggttagttcacatgtcatatagattgaatttttaattttttggcatcaactatgttgttaaaccaacctttaatatatttttgcatttgtgcacagcgttctctatatttttgaactaatgcattggggggcccccccttaaaggggccccccaaaaaaattttttaacctttcccccccctttttaaaagggggaaccttttaaaattgggggcccccaaaaatttttacctccctttgggtacttaaggtcaaattgatgttttgcatacatttaaccatcaaaagcatttataacatctggttagaggggcgtatgaaaatatgccacatcccatggagtataattttcctgctaaaagtaaccctgcagcatggctaggcgcatccatccacataagcaaagacatccatgccgatatggttgggctgctgcatgacccaactaaatcacattatgggtttaggccacgctcttttttagaggatgaatttagctgagtagctgcacgcaaaatgagaaatgtgattagtatatgattaattgtgtattgattataaaaaaattgaaaaataaatttatttcatttttgaaagcacgttctatatagaatttttgaaagcacactatttagcagtttgaaaagcgtgctaatgggaacgaggcgtagataagctcaaatagcactttagaaaaggcccttagataaacttgtttggaagtacatggatcaagatcaaccatctgcaagttcaagaacttgccatgtaactctttaatcaaatcgcaaatcatttgtgactgagcattggaaaagaattaaaaaaaatgtttttgatctttgcattggttttttaaataaattttgctactttaccattcgtgtgaagtggagaggttgactgtagtaaaaacgaaaaacactttttacctggattatttctgtatataatttgcaaggactacaatatattataattacttgttaaacctgaaactggtttgtatctactgattaatttagcctttgtcatttgcccatacaagcagttcaggttacagagactgtttcttgcctgaatccatcatttcttgtgcatacttctcataccacttcaacaaaatatccagtccagaacaataaacaatccttgcttatttacatgcatattactttatcaagtgtaactgaataccatgtctttcatgtaggttgtgggatcatttatctgtaaatttgcacctttatgtgcaaacacaagaacaactgcaggtggataataaggatgacgaagccccaaatgaactacctggagaacagaaatcgtcagagttgcagttgagaagcaaagatcaaactcatcctgagtgtgtaagtgaacccagtacaaccagaagtcggactaaaagggattggaaaggaattggtcgggagggtaatgaaaactttccacttagaagtgtactgaaggatattttgcatggtgaggagaaaaggtcgcaaaaggttaatgaaatacgacatcccccatcgtctaatcaacggaatggcagaaagcgtgacagggatgacgaaccgcaacaaataaaggtgtgtgatgtgataataggagatgcataatgcttgtgttaaccaaatggattgactgaaacactctgctgtcttgcatacttttttaatgattcactttttcattaacttgctttgtgttgcagctaaacatttaattgtttatacttctctaaattgtgcaatggaagattccttttaacacactaaatatgaacttttatagcatcagcacaggattataagaggatagtatcatgttagttgttaaaatgaaggtgcactgcgattttccacattccctatttgaactatacactacattgcaacaaacgttctttgcaactgatgaattaacaatttttcatctcatgaatatgcatatgtgggctctagctgtttgtgttttctgcaatacttcgcaattagaatgaacaactagctgatctagttattttttcatgtttctaagtgttggggaaatcaccaaatagccaatacagtctatgtatgtactatctacctgaaatattgttggttttctgctctaaaattttcataagggaatgttagact

SEQ ID NO: 27791 - DNA, 825 bp, Oryza sativa
agcaaaactgtggttgtcccagttaatgccaacaatctggaaccttccaattatgagacaccaaaagatgttcatgttgtagagaaaacggacattacacccatgaatgctactgttacctctctgactagtaatatcaaagtaagtagcttcatattttaaaccaatcaaattttattagtaactgcttagtaactgcactatgtttaccatttctgcatacccactctgattattttgcttaaagttttacttctatttttaaaaaagtatcatctaagtaagtatattggatatttgcatgtgataactatcgctgatttcccatttgactggaatagatgagaagcaaggctgacagatcgtcgagtgaaaacacattattaaatgatttgtcactactttcctctattggattgaactgggttggttagtggtttgcaggattagtttattgtgcttttatctcttcatggccagctgaaaaggccgatgcagattggttcacatcaataatgcttggaatgagaaacctatagctacttcacttgcatgttccattgattcagactacttactgtattagcttgcttctatattttgttaatacacaggaaatattttacattctttagctgttacttatgcctaattactgagtaattgtttgttccatttggtcacattccttgtatttagctccaatgctttaaaattatttaggaatcttcaggtagattttatctgactgttgagaaaaccactcaggaactagctcatggagaagtccaaaaggattcacagcgatctgcaattgcatcatct

SEQ ID NO: 27792 - DNA, 2099 bp, Oryza sativa
cacgggacctcaccaccttgaagtgcacttgcggctcctcaatgatgatgacatcgttgtcattgccgtctttgccaacaacaccggcatgggcagctatgtcgtccatggagtcacgaggaatcctttcttctaggcagcacctacgccatgcaaccactctccacaattgggccattgtggcctggtcgagtggcttcctgacgatataggtcgccttcagcaagaggtggttcaggaactccgtgtcctcaccggcaaccatctgctctggttccgtcgtcgacaatactgtatgacacgtatatgtggatgatgtggattgattgatagacgcgacgacgacgaggagtaacatctgagcacaagcttagctagctagcttacggtagatgacggggatgtggtgttcggtctcgacgacacggcgaaagtcgaagccggaggagaccacctttttgacatcgcagaggacagtttggacgtctgtcatgttgtcgctggagagggtgcacaggccagcgcttgcggtggtgtgcgttgccaccactagaaaagacaaggagtaaatgcagttaagagttttgttttgttttgtcttatgtgggagaagtcagttttacagttttaaattactatgttactacttattatatatgatataaatgactttaagtaaaatcatatattattatatataaccatatattatacacactgttaaatatttttagaaaattttatgactataagtttgtaacacaaaagttagggagacatgcatcccaaaagaggaattttttttaagaaggggagagggagagatctcaatagacaataggagtgtctatatataactgagtaaaatgagaaatgagtgaagtataagtgcaattgcactacagtataaaaaatccttcatagaaataacatgttttcttaaaagaatatttaatttggcacaaagcaagagcgcgcaaccgactaatttgaatttcagttgaaacaaggaagaacatgcatccatggagaaaggctataagatcagtgtttcaagtagttattttgaacaaaaccatatgcagaatcaacacagcaagaacatcaaacaggttggtcaattttatggaagtgaccaatgatgagtttactcactgcctttttaaacccacccaggatcaaaacatttgctagaagcaagatatatcaaagagatgccgagtgaacaaaaaagttcattttgtaaacaaatcctatagaaaacacatataacaaacaccaatattttctcaagaatccccacaagaatccacggattacacaacacaagaatccgataagaaaaaagaatcacacaagcgaaatatcggatctgtagtgcacagagaccaacagaaatcatccaaacaagctagaaaatcaaatgtacatgagtagtgcaaggtagaaagcgttttggttgcagttctcgtgttcttcgtgtcaccatccacgggcatgacacggaggccaccagggaagaaggagagctgatcctccatggacaaagagatcgatgtacaacaactacgtgcactcacttagcttgttcacagatgaattgaagtgaaactgaagggaagaacgtctgcatttgtaggccggcaaagatggggccttgggggggggggggggcgggttggagagataggcacaaggaatgacgtgtagtgtcatcatttgttttttccttcattatttttggggaagaaactgacgttgccctttgacgattaaaagttgggtgaaattaacctgttgtttcggtgtgtgagtaagggaatatgtcattagagctgtgcattttagcccttaatttcctgctcaaagttggaaaaaagaaacctttctgatcagttctgcgtgcacttatagttaattatgcatgcttgctccttttctgaagtgttaatataaggttaaaatcattccctgtgccaatggtaaattgtactacgctgtaccttaacaaaatggtactgcacactcattgtactatacttccatagagacgtttgccctcgatctcttgaacttttcttgtgttgcctctgagagac

SEQ ID NO: 27793 - DNA, 4434 bp, Oryza sativa
ccatcgcctcttcagcgcccatccgccgccgtcaccgaagatctggcccttgctcttgccctcggccgcccgccctaccaccctcccgccgctggcccccgtcccacactgccgaacgtcgccgccgccgctcattctcgctgtccctgcgcgccaccggccgaaggggaagaagggagagaaagagagagaagggagagagggaggaggaagaaggactgacatatgggctccatatgttagtgggcccacaattttttttgtgtgaatgactaatgggtctcacgtatattttttaattctactgccacgtaggtgccacgtcaacgtcacgtggaacgaagattcggtcaatattgccacgtaggcaccacgtggcgccacgtcagcaaaaccgcctctcaaaaccatccagggagtcaaatcgcatcggttttaggagtttaggggtcgggatatgtgatggattagatttcggtcacacttgagggtcctaaagtgaacttattccttacgctgctgcagagacgatcactactacttcccgtcacacgcacggggagcagaaaatgagcgaaatacactaatcctgtaagatgcattttaattctagtttaatgtataacagcgtgttcaggcctccatttatcacgtatgatcgccgccacgctgctctctgtcgtcgccggatggggcaccgggaactgcctcaagaaatgcaagcagcatatagccgcacgccccaccactaagtcgtgacggtcggtggcagcagtaccagcaggatgaaaacattacgaaaatttctcgaccataccgataccttccacaaaactaatataataataatatttttatcgatggttactgtttttaaatttagttttaagttctgtcatcgtggcattgaagttgatactaaatagataaattcataaatatggaaatttcccgatcatttcggttcgttttcgagaaaataataaaataatgatattgtttctgaccatttccgtccgttttcatccccggcatgcacagtgagtggcctctagagttcaacatcggtgaggttgttctgaaaaaatatatagtggaaactatatatatggtgtcgctaaggagtctaaatgcaaaatgtgtgctagcgtatagcgttacgccggtggtcatacacgagcaaataagattttagacatgctgagatacattaaattaacaatatgaatctaaatatgtattttgccagattaggtacttaagtaaaccaccgtataaatttaagggctggtcgtgtatttcacaggaaaaaaaacaaccattccttttttcgttgttggcctggttgcccaaacttttttcctaagtagtacaaaatttttaccaattttttggccagccaatccgagcacccctacccagtcaaaagctccaccattgcatgatgccattatctcccctggagtacaaaatcaaatgcaccgaaggcactttaaaatccacaatcactaatggctaacctcaaaacaggacagaaaagtaaaagtagtagtagcttgattaggacggatggccaaaagaaggaaaaggagggatgtttagcaaaagcagagagttcagtgaacctgttgtctttctgagacgcttcatggcgtccccacaagtcccaatcattgtagtagtactgaacggcccctgttctggcaaatggatcttcccagcgtcggttatcctcgatgaaagcaggcgccacacacagcaaagagataaggaggaaaaaccggtaaagtatatagctctagttcgtgtttagtgcagtacaattttccatcctgcggtcagcagggtttacaaaaccatattgctactacgcgcacggtaatcacgtacgataacctacgacatacctcgcggtaatcaccaaaccgtaggcgatggtaaccttacccccaaacaatttggtaaacacttacggtcattctattactataggaacaatttgatctcatggtctctctaggatgatcgcgatcgccaatcaccggcgatcaatttttcagtccaaaatactttatggaattatagtagcagaaacttacataatagccagaatgttgttgccattcggaacgaggctactagatccaattgttacagcaaaattagtctacgtcacgtgatcgatctttttctcaaatctcattgacatgtagtactcggtacaagctgcgcaatgactagctgcgttcgaagctaaaggttaggaccatctcttcgctttgtaaaatagaacgagccattagggaataattaattaagcagatacctttagcttatttaaaaagttaatatattttttaagacaactattctatagaagttttttttcccataatacgtcatttagcaatttgagaaagatgcgaaaaaacaaaaaaagttgtagttgaaaaaaatatggttaagaacgcaaaataatttgtcaatcaactcccacgaacaaggaacgagtccaaagcaactcacgcgcttggatcactcgcgaaacgacctatcaacatctcaaaactctcaaaccaatcgagagaacgaacgcaaaatttgcccataaataaatttatttgctccagctaagaccggcggctgatcgatcgagctcatcaccacgggaaaagccgatcgcggaagagaagagagcccttccagcctgggccacgtggcgtccacgcaccatcaccagcacaaggaaggaaggagaaagaaaaaaaaaaagaagaagaaaatctcctcgtgctgctgccgacctgtgccggcgatgagagcagtgggccccagtgaagcacggcggcggtggggatcggcgaaagatcctccgcctccgcctttgagaggggaggaaaggtcgccggggattttctgtgaaggcgtatcctgacgaccaccttaagctgtcgacctgcttatgtttaatccaaaaatttttgggggatgtttcatccaaatcgactttaaatccctgattgaattattttttcacaggattattatatggattatctactaaattatgtattatatattttaaaataaatttaacaaatagtttagaaaaaaattgtctaagctgtatggtagaagaaaatattctgagagggcatattttaaaacgaatttcttgaagcttgatttttttgtattaattttaatggatagtagcatttgttttcgtgttaatcatgaaatgggagtcatgcaactaaagcacaactagttccaaaatcaaattctaaatttcaaaatcagcctacagtgaaaaaaaaactgaattgatttccatttcttgtttttattcaatagatggtgaattgcacgcatgtatataatcatttttctgtttgtaatgtgttttggaaaaggaaaagatgatgaattgtgagctgaaatttggtctgaaagaggaaaccaagtgtgtgaacaaatgtcgacacgtggtggtcaatttgcagccgtattaggtggtatcaatacgatttttaatcaattcgaatacaggacggttacctatcttaaaaaaatttaaaaaaagaacagggaaataattagtgtacgcaacttggacctaccaataatgccaggcgaactaatccaatccggttcaactactaatggatggctccaagtagcgtcaatgattgagctgtcagggcaattcacaaccaatggaggaaaaaaaaaagaggagataataaaaagaaagatgccactagctcaagctgataataatgctctccacagataataataaattttatacaaaagggaattaaaattaaatagagatttgtgggaggacaacacaacaaccccatcttcttccttcctccctctttccatccaacttccaacctcaaccaccactacaacaacaacatcatcatcatcatattgttcttcctttgcttgatgcatcttgagtcacccatctcatctccttttctttttctttcttttttttcccctttcacctttaagaagctctcaggaaaagaaaaaataataccctcaactttaatttttaaaaggaaagaagaagaaaaaagaaagaaaaaaggaggaaaattcaggttggtttccccttgtattatccttttagaacctaacgatcttggcggcgcggacgacggggttctccctggcgatggcgtccctcgccgccgacttgtagtcgaagctgcagtcgtggcggtcggagtaccggtgcgcgccgcagtagagctcgccgcagcggcaccggaacccggtcaggcccacccgcctccggcagctgtggcatcggttgaccgacgacgacctcgacgccttcgacgacgactccaccggccccgccgtcggccgctcaaccaccagcgccaccgccgccgccgccgacgactg

SEQ ID NO: 27794 - DNA, 1869 bp, Oryza sativa
  unsure (1)..(1869): unsure at all n locations
agccacagcacagataacggaggaaaaccgagttcacgacctggtacacggcaccaccaaactttgcacgcgccccccgggcaccagccaccacaccaggggcacaactgccaatccaccacaccaccaccagtcgaagacgccgccatgtcacgcacgcatgcaacccccctcgcgattggcgcccccaacctaagnccgcgccgatcgggccgcccaaagctgaccgacgccacgcccgtgaaaccaacccaagtgaaaaaatacccgcaggaaacgcagcggaaacccatcgcgcgattcgccgaggagccgcgtgcgtgagcgctgcagttttagcgtcgtccgtccctgcctgacctccccggttgtcgctgtccggcagctgagctgtgccgcgcctgtgcggattaggattagcacggccgcgtgcagctgctgcttctgctccctttccccggcaacccgtcgctgtcgccacggtaaaaatatggcgaccacgaattcacgtggtgaattaacatccgctgcaggatactagtatgatgctgcgtcaaggtcaatggatatcaccctttttttttctttttctcacacatagttttcttttatcataaaataaatcaaccacgactcgtaatgtattttggaacgaagagaatacatagttatacatactataggggtatcatcatacatggaggagaattatcgtgttcctggtaggtaccaatcgaaatcctctgcagtatgctcactgacatatagggcccatatatcaatgagcagtggaccctcacactcgttaggtactactactaatgctggggcgagctgcggtatgtgaaaagcgagggaaatgtgcgcgtatgtgcagggctacctaactggcttgggtaccagccagggtggtgcacggatggatgaatacggcagccgacctatcgtgcccaaacatccgtgttacacccgatcgatcgcgacgacggctctcatcaagccgcgtcgacggggagagctctcctagttggaaaaaacgataaagttgctgaaaaataatttaaaatgagactgatgtcaaatctatagataattgtataaaagttttagtgctatcacgttatttttctcgataaatggaacaatggatgataccatactcatgtttctgaagcttgtaagatagtagtattacctttctcttaaaatatattaattcttacctatgtatatggatatacttttatgtaaatgcataggtaactaaatgtggttatattttgggatgcgatttttttaaaaaggaaggtagtattatatattactccctctgtccctgaatatttgacgctattaacttttttaaacatatttgaccgttcgtcttattcaaaaacttttgtgaaatatgtaaaactatatgtatacataaaagtatatttaacaatgaatcaaatgataattacttaattttttttaataagaaaaatgctcaaatatgtttaaaaacgtcaatggcgtcaaatatttagggcccctttgatttgtaggaaaaatgtaggaattttggaggattttaatcctatagaaaaaaaatcctatgaaggcctttgaaacaaaggattgaatcctatccaatcctttaaaattcctatgaaatgggtaatcctatgcacattttgaagaaaagttagcaagaggtctaacctcttggaacatttcctctgagtctatctctctcatctgatttctgtgtttttcctgtggtccaatcaaacggccattcctgtgttttgcaatcctctgttttacaattgtattcatgtcagaatcctgtatttttcctattcctatgttttttttcattca

SEQ ID NO: 27795 - DNA, 4257 bp, Oryza sativa
tgttctatgggctagaactcgagcccatatagttttgtgatctgactagtcagagaaccgaatatgtagcattttttgtgtcctctggatcttaatctaacggtaggaaaaaatctgggtgattttgacccaaggatttgtcgacaaagacatagctagtttttgaggcatcggccgtgtttaccagagaggacttgtcagttaaggccgagtttagttccaaacttttcttcaaatttttaactttttcattacatcaaaattttcctacacacaaactttcaattttttcgtcacatcgtttcagttctaaccaaacttttaattttcatgtgaactacacacagcctaaacaatcagcttatgggcagataggatagtatcttacactaataatcctcacgtgctgtgcgatccgatccaacccaagcgctttgcgtgtgtcgaaacctccggtgtcaataatgaattcgccgatgcaagcaagatcgatcccaggagcagcaaacggttagcgatctatgggtgatatgatatcgggagtagtagtacgactgtacgagtacttcacatgtgatctgggaaagaacactgatagatttcgtcaagcgtacggttgtttccagaagactaaacgatactgtatgacgataggttaaggagtacctctccattccgccgaggaaaaaaaatacgaattagtccccttaagtccaccgaattacatccctaaactataaaattaaatattcttcacccctaaatatgcaaaccgtataaataatccctctggttcaatccgcggtggttttattcctactggcagtctagtcagcatttgtttaaaaaaacagtggggcccactttctacctctctccctatcctctttctctacctcttgccgccaccggccattgcattagcagaaggggcaatgcacgtgcccccctactgccgcaccgccgccaactctgcctgtcacgtcagcgagcgctagtgacgaagccaggataaaattatagcggggctacgccaaaataaacaagagcaacaaagagagatatagggttgggttaggatttttttgggccttcttagccttttggcccttctaacaacctcaaacaaaatctataataacccctcatctataaatatatggattaaaattttagagggggtattataggggctctaatggtatattaggggctaggagggtctaaagaccccccctgccccacgctttctccgtccctagcgagcgcatctttgtcgctgcggagggcatcgtggcaggagaggtgcactgcgaagttggtgctcaatctgcttcgccttccacctcacgcgcggttctagaaccaaacggcgacctggcgagggtggagacccatacccaccgaccggtggcgaggatccagatcaacaacgtcgctccaatagagacccgtcctcacaggcaggctccaccacctcctccggcagtcagccgcgcctctcccagtcctcctattccctggccttctcctcaaggtgtcgtccccgtcagatagatagccggcaacatcagattggggagaggccgcagctgttgagtaccggggcgctgttgagctcattgttgcctctctagctccctcccggagttcgccactcccacctttgcgtcccgcgccacgcccgccgcctgcctctgtgtgctatcgtgcgcgtcgaccgcccgcgccgctgcttgaccaatgcccaatgacgcccgagagagaggatgaggggaaaaaaatttatgacgggactaccacgtagtatcaaaaccaccgcggattaaactggggttaagggcaaagaatgtctggttttgtagtttaaggtataattgaatctcgttacagtttagagagataatttatacttttttcatctgtaaaatactcaatacaaacacgtcatattcaatactaacacatgcgtatctagctttatgattggtttttttgaacgactagtagagagtactactcctatcctcaattagtttactgtagacgtactgtactactagtagtagtgtactgtacacaggtgatgcgtggctcaaagtgtaggcgtcctgctcaccgatgtggctctagctgccaccgcgacgtggcacccggggcggccgcttccggaaggcacgagatcgacggagacgcgcgccacggagactccctctttttgggtcgatcgctagctagctaacggcacgcgcgttgcgaaaccggcgcgagctccggcggcgcggccagcaagccaaccacgtaacgttggcgaaagggcgacgcaatataatttagctggtgtacggtgcgcccggttgacgggtcgaggcagcgtgtcgagctgaccgagggggcctgctttcagagcaggtagcaggctatcaattatgatagcaaagagcaacgggctacagatttataaccagctacagtataaactacaagacgcagtgtgtgtatgacaggtgagaccagttattaatagtttagtatgtaactattatatgaatgagctattagattggctatagataaattgaagctagtaattggctatactattaaacctcctctccgctctctccacctgatcgcatcccgaattttttaaatagcactattttaataaaaaattaattataaaatagtgattacataattgaaatcgcaattttaggtgcgatatgtgcgatacaattttgtgccctgttaaattatggttgttcgttagggtaaaataaaatatatgcaggcaagtgtaaaccggatgcatatatctgagatgaggttcatccatctttggtaggttgataggtgcgagggcatcagcgaggcccattgatgtcgacgagctcgactctacggcgcagatccgtggcagtgagctcatctcaaggacggcaacgaggtgctgatccaccggtagcactagcagtagcgataagattggggatgggaacaatgcgagtagatccatgatgacgagcttgaggaaggcaatgagttgcgggtctaccaatggtgctagcagtagcggtgagtttggcgatgcgaacaacacgagcaagctcggggaaggcaatgaggcgtgggttcgccgatggtactagcagagaccaggtcgaggatggtaatggcacgaacagatccattgcggcgagctccgggacggcaactaggcgcaacgcaggttcgccggtggcactaaatagccacgaataagggagatatagatacctgatgggcctacacgcccctgaactggagcttaaacttgaaggccccaacaagtgaggggcggacacccatagagatagccacgacactcttggctggcacacgaggcactgttgaaaattgcgcagatgggatatgatatgagagggtgaaaggaagaagaagattctaacatgattgggcccatgtgccgatgagtaaatgggtggaaaacgtcaccatagtggcgccgctaccactatgtaaaaattcattgtcatggctgctactagacgaattgtaatgatatttatttgaaatgatatatttgcaataccatggagcgaattacccttaaatataaatttattgtagtctaatcatttgagagttatgagtggtaaaatttgatacaatagtgaaaacggagggagcatgatgcaagacaagtaaaaaaaggaccatgtaaaatttttaaatcaaagttaaaatacaaaatactttccaaatttaccataatttacagctgacgaaagcacagcttggtcggtccacgctggatacgaataaacaagagaggttattcccgccggtaataagaagcagacactatcgcaatgcctgaaacggatatgagctaaaaaaaaaaacacccgctaaattcccgcgaagattctttcccggaacggggcagttccgacatttcacctcctctttcccagctgcggcctattgttagcgaggagtcacccagattcttctccaacctctcgcccccgaaatccacacctcacaacgccccttacgccccacgcgagcgaacccacaagaaacacgcgcaaaatctcccctcccgccgcgaattcgctcggtttgatcgcccgaaagatcgaagtgttttgcgcgggattcgtgctttgcagcttaagtttagtgcggccttctagctgctcggatttgaatgaatgattgattggcgggtggtcagtcgatttaagt

SEQ ID NO: 27796 - DNA, 916 bp, Oryza sativa
cctacccgcagccgtcgtcgccgttcaagtggcgggacatgctccaccacagccccgtgccgctgttccacagcccggcctcctcgccggcgtcacggagcccctcggcgtcctggctcgccggccgcgagcgcgagcggctcttctccagcttcgtgcgcaacgcgctcggctcctgcgtcgattacgcgccggtcgccgcgctgccgctcggcgtctcggctgctgtcggtgtcggtgccggcgagctcgcgttcgagctcgacgagcacctctccgaggcggagccgtcgtgcgagccgtacgctcgcgacctcctcgccggcgcccaggctcgccaccgcatcttccacgacgagctcgtcgtcaaggccttcttcgaggctgagagggcgcaccgaggccaggtggaatcccaattcccaagaacttggacgaaactccaatgttaacttcttgctttttcttttttgcaaggtgtaattatctatgtccttaaatctagtgccctttgtgcttgccctgtgtgatcagacgcgggcgagtggtgatccgtacttgcagcattgtgtggagaccgccgtgcttctagccaagataggcgcaaacgcgaccgtcgtctctgccggactcctgcatgacaccattgatgatagctttcatggattatgatcagattttccggatgtttggtgccggcgtggctgatctagttgaaggggtatgagttttgtttacttgatttttagatggatcataaattcataatagtttaggagctctcccagtttagtagatgaagggctggttccacggctatgattgaattatctatgttatcattgttgattattcaaagtcaacaggccatgtgctcatcttgcttaagctttcaaccatatggataacttcacta

SEQ ID NO: 27797 - DNA, 1665 bp, Oryza sativa
cacattcggtggctttggcatgacaaaaaagttgtcaacaaatttcaggaagcgagagagagagagagagagagagagagagagagagagagagagagagtttataggttctcgggtgtgcaagccaccaaacaagtgaacaaccatcctcgaacatcgtggggcgtgccgccacgtgaggcacttagcaggccatggcggcggagcggatgaatgacataaaatagtttatagtattccagtaacatttggtaaaggaatcatgtctgcaacatagaaatttaattggcaaaggaaatactgtattaaggtaaacatttcttccacgagaatgaagggagaatcatccatgtaaagagtacttgcaacaagattaaaagctggtttgtcatggggagttcacatcccctctctctaattagcttaactagagctaatttatttgccatatgatgaccacggactactcgatccaggccatgtcatccaggaaggcaaattcattggtgttgttcataaggatgtagtccaggtccaggtcccagccgatctccatgccaccttcctttatgttcagtgagtcgtcagttgcctcaccgccagcgtcttccataggtatcatgtcctcgtccaaccccaagagcgattccagagagaacatgatgccttcttcaacatcaaccggagcatcaacaacaacctgttcaggcatcatgaatagttctgcattgttaggtgctgttgcttcaattgctggcaccgcattattctgatcctctgacacaacgacaacagggacagatccctcacccttggtcccaacgattggatcgatgatggtgaatgttgactcaattggtggcaccatgagagaaccaacagctgcattgttgttcagtgcgcttgtgtaggcgtacatggcggcgtcatcgtcgttgtcgtcaggggctcctatggatggtccggcactgccatatgcggtttgtccaacgaggaagtcatccacgggtagcccaaatggaagctcgatcataggagccttgtctttattcattgtcatcccgtcctgaggcgtgaaggccgccgggactatgttgatgtggttacgcatagtagctaggtggtggtggagggccttggtaggagaagggccccatgtacaacctctgctggggagcatccggctggacaccaccggacagccactgtcccatcactggagcctgcatggctgccgacgcagcaacgttgtcgaaggatataaccgcgttgccggtggccgccggcgaagcagcgttgctgaaggagataaccgcattgccggtgggtgcctgcacggtcgtgttgctgaaggagatcaccgcagtgccagcaggttgttgctgttgctgctggaaaaccgaaactggaaatggtgctgcagtactgccgccagcgatggtggtcgtggggatgcagctagcttggcccggcgccaccggtgaggatcagagggtgcacagcgagacattgagcgtcgaaaggatggctttgaggaacaaggagtccaatgagaggagacggcgctcatcaaggtccttctgttgcttcgtgcagtattcctgcggctgtggcagcaggaaattaaggcacgttaatttggctcaaatatatacatattcacgt

SEQ ID NO: 27798 - DNA, 4155 bp, Oryza sativa
agcaacccagctatattcccaaactgacttgtgttttattgtactgagatactactggatggctgcgaagatgtatgcaaaatgttctgatgactaaaaacatcgagaaccatgatttagtcttgagacaatatcacgtcacgcagaatgggttcaagtgcgacaatcagcaagtgtcttgcattgtctcacattctgtgtaggggagttgatcaggcctgatttatttctattagcatcggaggttagttgatctaatggtcaaagacacgttgatctaatggctgagatgattctgatgacgtggctagctgagagatcttctttatagcatcattgcacttagtgggttccaattatataggaagaatggatttgtaatcaagttgttgtaatcaagttgtaattttatagttagcagttatttgtcctctaaattttatgataattggtttaatcttatttagagtaaaggtgggaacggattctattattaccttaaaaatattgttacttactataaaaaatgcatgtgcgttagaacggaaaaaaactaatgttatggtaatgatctatctatctattaacctattaacttaataaagtaatagaaaaaattagcctccacgttagctctccaagaactagaaattctcatattaattagagtataataaaaaaataaggagaactcatttaagacaaggactctttttttcctttttttaaaaaaatcatgttatatatgtgtagtgtccgatcgaatacctgcatagaacaaatcttttgcaaggaaaaaattacctgagctggatagactaatctctctatgtaagtaatacaacataatacaaagtattcctattttttatttttttggtggaatacaatttaagaaaagaaattaaattcggaatttaaaaataagaaatattgatagatgagattagagttcatatagaaatacaattaggaataataaaatttcagaattaaaaaaataggaatactggaagaagaatctagagtccatacagaattaaaaaataattaatattattaatttttagtttaaatttaaattatatatcatgacaaataaataattacatttttttactccatttagctataaatagtttaatttggagaagaaaaaactatttcaaattttagcaatttttaatgcagaaacagtttaaatcgattgagaataaataaaacgtaattaggcccatatttagaaggacggctcaaatatctctttttcacatcatggcatgttaagtgaacagggcccaagtggccttggcccaagtcggcgtagaagcgctgagagccaccggattcgatcgaacggttaggatcacttgtgatttagataaagcattgcactgttgaatcctaaaccctaattcattcttcttcctctcagtggcacattcctccaccgtgagcggccgtgccggcgcccttccctaccaggtgttgccgcagtgccctcctccctgtgagtaggggcattgccttcccccccgcgaccgggtggggcagcgcctttccctaccgcgagcggcggtggtggcggtgccctcccgcggcttcccacgagtggatccggcggcgacggcggcttcccgcgggagaatcaggcgatgacgaagatttaagataaaatttgtgcgtttttttattattcttcatattccttttctcttttgatgaattgtccgattggattttgtatttatttttgaatttgtgctttatccacccttacacgatgtgttactcgcgtgtgtggaacggaggtcatcgttggatcggacttacggaccaaaaaatgagtgatgaacgaaaagttgtgttaacgtcaacttttggtaaaattatttagtggattcggttaaggaaagagcacaatcaactgatggaaagcttatccagaagagtatgagttcaagaaagaatcatgaagactatgccgtggcagtttaattctatctattaattacgtaggatttagtaaatttcctttatctttagaaagttttatctagtatccgattagtacttgtatattttcttttgtatttaggaaacatgcgtcgtgtccaatatggactagtatctacccatgagtataaatatgtatatacagggtcattgtgatctatcctcgatcaatataactactcccggcgtatcgccaccctcttttccaatgtatttatttattatcactgacggaacttagcacctgacgcgggctgcattgacttcgatctccggcgaaggggtaagccctatgttccgttggccctggtgaatatatcggctacattggtgttgttcaaggtacatcgcttcgatctcttagatcgttctagttcggtcgatatatttgcctacctgatgtttcgattctattttaaaatttaagggggcccccaaatttttttggggtttggggttttttaagagaccacatcggtttagttgggactgtctcgattaggtctgattttatgtcttagcctatatatctctacaatcacaatgttgttttaaatagatttgttagatccatcatattagacaaatttatcggctcattgagtattagattattatatgcaatctcgtgttgcatcgattaggttctacctactaaattgttgttaataatcaaagtcttgtcaagctgatatgttcatgctaatgtttcattggagggttagccgcttatataatatgttaaatttattgttgatggttttattgtcttagttaaatttaagacatgaccactctgaaaaacaatgaaaggcttggttgtttagatcttatactttcttttatacttagtactgcattagtcgtacttggaattgtaagaactaacttgctctttggttgacgataaaggtagcatcagggttttcagccgatgagttgtctcaatattgcactggcttataaggattatatacaagttgattttagccgattggatcattacttcattatatcatcatcgactcttggattatttgttcaagttctttcattgcttatctaagcatcggaatatacattgaacaaaaagcgaattatttaaagccttatcgacatcggctaagtaccattacatcggcttgtcaaccaatcggttttttgatcataaccttttttttattggtggttccttaatcaaattgactagcacatttgcatgtaatcaaagtttaggatatgcactagagttaagcatttctttcattcattcgttttttttcacatcaataagttgtaaatttgttaagtagttaagattttcattgctcgagagtgaacggtctttacttgggcctcgccggtgcgatgccacagagacggaaacttagccgcgtcatgacgacccgacacgaaccaccgaatccaacggatcgacacccgttccacgcgtctactcagccaggaaaactccccgatccccatcccaagcggaaccaaaccgttcatggcgatgcttataaatgagcgcctccacagctcctctgccacttcacaaagcaactcatcaacagccaacaattcgagcagagcagatattagggaaggagaagaggtgagacttgaaacccatatcgtctagcccacttcattgtggagctagcccgaaaacctctagttgtttctcccctgtccgccgatccaccatggcgttcatctggccggggccgccgggagcgcagccggtgggcgacctacgggtggcgcagctggcgctgctcgtcgccggcaacgggctgatcgtctcgccgtcctacctcagcagctgcccctgcgacgacggcggccggtgcttcttccaggacggcgtggcggagcagaggtgcttcgacctggccaacctcgtcaccgccgtgctcgggctggccctcctcgtcggagacatggcattctcgacggcagtgcccggccggtcgacgcagtcgcaggccctggccaccgttgctaggtggctcgtcgggctcgccaaggtcgccacggttgggaccttccagcattggatcaatgccttttacctttgcctcaaaacgtggtccatcacgtcttatattatccacccgtctttgcatgataaccctg

SEQ ID NO: 27799 - DNA, 1509 bp, Oryza sativa
agaaaaagaagaagaagaagaacacgtcagtagagggtccttgacggaaaatgatcttatcaagtcaaccatcgattctgggccgccgaatagtgatcggacgggtacgaagatgttatccaagactcccaattatgggagggttgaaacgatgaatcatcctcatgaaggggtctctaacgtaaaatcattgcctggctggcataacatacttttcctagtcgatcaggattgcagaagcattatcggacggtgctggagaacccatgttttgatcgaacctgtgagttaggcccattaagaattaggcccatgcaaatcaccctcggttgaagcccaaagcagtggctgtggcggccgcaggtacaaagatctaattaagttaagagattatgctgtccaaggcaaggcacacctttttattcctttttattaccatgccagtaagaccaaacaaggttttcaaggcaaaatagcaggcaaccattggccaattctatcttcgctcttgattaaccacgatgaaaaatccacaatcaggattctcatcacattattggcacattacggccaataacagaacactatcaataaaatgaataaatcccacacaaaaaaccaatgtggtgttgtgtgtcttgtatcacaacacctctaagatctagcttagttatgtacagatccttttgtttcccctaattaatattactcctatatcttcccctcttaggtctgaccatgaaattctaggcacccctctcctgagatagctcggtgtccttctgtgccgcctgagcgaggtggtgtacgatccgatggagccgtcgcgttgcagcacgatgtcagcatggattgcagagtttgggttcttcagccggtatcgatcatggtgactctggtgcttctcttccactgtcccttcgatcctcatgtcaaccttgttctcacaatctacttgttgggttttggtcacatcgtccttcttgttatcttccacaacgacggtgaacacaaatgtaccaatttggaggtagtcattcatgtccaatatgggctctagggccttgaccacctccctcatgctgggcctggactttggtgatgggctcaagcacttgtaggctaccaaagcagcctcttgggcccctttgtaggagtattggccctccatggctgggtccatgacgacccggtgcaactggtcgggcttcttgaggtactttcttgtccaatccaccagactttgctccctatggcgacgagagcggtccaccgagtgccgacccgataatagctccagtagtaccacaccaaaactatacacatcgctcttgtcggtcaggtgccctgtcatgatgtactcgggcgctgcatacccgtttgtccccatgacacgcgtcgtgacatgggtcgcgtcgccctgcggcccatccttggcaagcccaaagtcggaaagcttggtgttgaagtcctgaaatcaaatgaatcagagatcgggttaggcaggga

SEQ ID NO: 27800 - DNA, 3063 bp, Oryza sativa
caatcatgtctaacgaacccacacacccagccaacgattttggaacgtgtggcacgcagactttgacagtcaaatctagacttgataacttgacaagtggtatcccatcaaaattttcagaaataagaagcgaaaaatggtctgaaagttagtaaaatttttcacggcagtttgaattttcgctctcaggacatggtagttttttttttcctttaacgactgaaatttctactgcactcgagtgaaatgactgcgaaaagtacacagtggaatcaagaacgggatggtgctcaccgagtcgaggaggatgttggatgccttgaagtcacggtagatgaccggcgtgtcggcgtcgtggaggaaggcgagccccttcgccgcgccgacggcggtctgcatcctcctcatccatggcatggcgccatcgagacctgcacggacaggaggacggttcagcgtcagctaaagtcttccccggaattttttcagagctgaaacttcagcgatggcgtaagcgcgctctaagcgcaaatgattcggttaaccactcgcgtataaacaccagtaatctcccggattctattgacgattgcgacgggggtaaaaaaaaagaagaaaagattcaacagttggtaattattctcgtgtgcttacttttgaagagatgcttctccaagctcccgttgctcatgtactcgtacaccagcatccggtgttcgtcctcgtagcagtagccgatcagcttgacgagattcttgtgcctcaactgaccaaggaagaacacctcagcctgcaagaaagaaaggttcgtagattaattagcacggtgagctaaagctcgagctagcccaacaatggcggaaggaacgcatgaggtggagagtgacgtaccagccactccctgtggccctgcgtgccgcagtcgaggtcgaggtacttgacggcgacggcctgcgcggcgaggccggggcggaggccgtcgtcggcgcggcccttgtacacggggccgaacccgccggagccgaggtagttggcgcgggagaagccgccggtgacggccctcatctcggcgtaggtgaaggcgtacaggttcgagcccgacagcgtcagcgacaggtcctccggcgtgagggtccccgtcgagctcaggctcgacagcgacaccctcgacgccgacgacgccgacgacgacgacgacagcagccgctggtggtgaccaccccctctgaccctcctcctctccggcggcacgtcgtgctcaacgccggccaccccgccgccgccgacgcagcagagcatcgacttccacgacgtccgcaactcagccatcgaatcgatcaaatccaagatgaacaagaagccaagataaaccaatcgcccacgaacacgaagcagcagagagccagagcccgaaatgcagagacggagacagcgagtaccagagcttgtaaagaagaagaagaagagaggacagagttgaggaagcgtctgcaccggcaatggcgagatatgtaggcgctgtggctgtggcttgtgccttgaccgtgtcgcgcggcacgaaaccacgcacggacggcgacgccgagggctgcggaaaacggcgtcaaaaccggccacgaaacgactcaaaaaaagcggagtgggtgagtcccccgcagcaacttggtaagttggcagagagtactattactgtttccgctgctgcattgatggttgaatttttttttctttgaactttttaatttttagttttaaaaataaacatttttcaaaacgtattttcaagatattaaccttttgggctacgctagccgaactggtgtaaaaaaacaacattgtcactccgcgttatttggtcacgccgatttgacgggcgtggccacgccatccttgctggcatgacagaataaaactatcatgtccactgcgtgtagcgtgtcagtattgttttgccatatcacgtcgattggttcggattatagaaagaagttttgaaaaggtctatttttaaaattgaaaaaaataaaagttcaaaagattaaaaaaaatcctcgctggttccatgtagaaacgatgaaaaatcattctctcttttttttctttttgaattttgaaaattcattctttcagacctgtagaacggtgaaaaatcattcttttattagaccgatctcgtacagtctcggctgcttttcaccgcatgtactggcactgtgggtttggtcatttcttccttgccacggaaggtagcaatttttctgttctatttttggggttggaatggaattctctgcgtgcgtcactgtttcttactctctgcttaaacgtgacgctgacatacttgtaaaacaagtgagttcttgggagggttgcttatagcggaattaatccagcgtgctccatgctgatactaaactgattataacagattaagcaattccaagtgcttggatcatgtgaaaaatttcgtgcaaagtatttcattctttatatgttgcttctagttgggtgtttctgcttttctttttttccttttaggctaactgggagtggtcagactggggatgctaaaaccagagttgttttgggaggcaaagcagcggatgcaaaggaggtgaagccatgagctgcatctggttgctacctgaagcaggtagatctgcagcaaaaggaatctgattccagccgcagttcctcccacaatgttctggctcaccattctcgttttaatttaatctccatgatccttccacgcacgagtgaaatgcaattatgcaattgcagtcgatcgagatgagatgatactgtgataggcagttctgaactgaaactgaaccgcacgctccgaacaaccgtacaggatgcagacaaaatctctgctggaatttacaggagatgggaaccatcgtgtcttgcgctgcagatcaaggcgcataaattatgatagttttgtaatttaaaccctgcttaggaaaatacgcaagctggaaggaagcatcaatctgagctgtttgctaacccggtgttcagcctagccgtcgtgtttaaattcagttgagcttc

SEQ ID NO: 27801 - DNA, 1556 bp, Oryza sativa
gtggccgcgctcggcccaatggccggccaagccttgtgaatccctcgggccgcgcctaagtcgcccgaggaagtctaaatccgatccctccttccttttcttttccaagggaattaataattccttttccttgtccagaaaatccatttagacctccaaaattcatatccctcgatccgtagctccgattgactccgttcagcttccagtaattccgtaaaattgagatctatttaatggcactactaataggtctaaataggatctttcttttggtcttttgtttaggttttcgattatttgcatatagttgcggttatcggattttcgtcgatcgcgggttttctcgaagattcatgaagctttgtgaaaaccttgaaccaaggcaagtcaccctttgatcaattgcccctattaattaaaaagtcattattattttgtttgcaacttgcattactagaatcacacacttaacttgtttggcctcggtttgcgtgccaaaccgacggacctacccagtagtcgcactaatttccgtaggtcgtactaccctgattccttgtcgctccacccttgtggtacctcggtattcgtgctctctgagcgcgtataccaaatatcccacatacaccgttgcttgtcgaaaacttgggaaatgggtttgtgaagccttcaaaacccgacatgtggtgtcggtgtgtttgaaaataaaatgaattgtgaaaactcgcgatgcgggggttgtgcctatgtggcactgtcccgtattcgcatataaggaccgattcctgtgggaaactcatcgaacataatcaaagtgcaaccacaaggtggaatgggacaccctggctaagtaactagtcgattcagggaaacctcgcatgccaatagttgggaacgccggggcggggtcggacaaaccgggttcctggtaaggcaaggacgagaagcttgctcacataccgatcaaggtggttggagttgatttgtgaatgcctaaaatggcctatacttacgtgaggatttgatccttctatgtggcatgaggtaaccttgggtcggcttgggaaatgctttgttgcgaacctctgacaccgatgggtgtttggagtaagttcgtgtcttgtgggtaaagtgtacccctctgcagaggttaactaactgttcgaacagccgtgcccacggtcatgggcggatgtgaggtggttcccgttgcgtagagttgtttgcctgtgctttgtgaaaagttgttgtggtgtgggaatcgtaaccagaatcagcctatgtggcagatggatgacctgagtggtcaagaaacgaatctgtgtgattcgggatgtctgcgggcatcatagactaggcttcccgagtggaagcggattgttgtgctgctaggcagctggactctgggagtccgagaaaatgaaaaaggctctgggagccgattaatccagtggaatggctttgggagccgagaagtaatgttttgaccccgagcgtcggtacattactaaatgagctgttgaaaaatatctcttaaagtcgaatcgagacgc

SEQ ID NO: 27802 - DNA, 1637 bp, Oryza sativa
catatgccaatgcatctcacctggaccatcaatactgaagcttctatggcgtttactttggttaattcaatatttcaatcagagttcctccaccaatcttgtgtttttgcctgcttactttggttaagtggtagatgtgtatatatccatgtgctgctgcctaattgtttcaaaaatcaggatgtaatttccaaaatatataatcggcaaaaactgccatagagttcaggaagtcctgatcggaaaagcggtgagcggtgggcagcggtgagcggcgtccggcgtgcagtggccggcggtcggcgtcgtaagcgcttttcccgtttttcttcgtgtaacagtgccatgcaggttggacctgggcacctggctagcttgcacggtggtcagcggacagttgccggcgtcgaccggcggcttgggggccagcgacgtgcatcggctctcaggctcggcggcctgcagctagcgacgaacggcggagggtggccggcgacgagcggcggcgcggcaatcggagtgcggcgagcggcggtcagcggcggaagcgtccttcttgattttttgttcggtggcggtggccgcgtggggcgtagcctgccgccaccgccgcgcatccgctttcgctccgctccgctccgctcgcacgccgcctccgccggccgcatcctcccgtccgcgctctccgccgtggagagatcgagtgccgccgcatcctcccgtccgcccctctgccaactccctcctcgccgcatcctcttcgatggagagccagacgaggccaacgggcgcgaggcgggagaggagatccggccgacgacgcggtgacggccgcgccccgctgctcccccgccggccgccgctcgtgcagctgctgcccctccacctgcgcccacccgcacgccgctccgccgtccgccgcccatggagaagagagagggagaggtgaagaggagaggagaagaagaggctgacacgtggggcccacggggtcccacgctgactcagccaccaacgaccgtggtcaaagcgcaacgtaggataaaaccgggacgaaaaccgctgagggatctcgggtgactggttttatatagttaagggacctcgtatatctggttttatggttcgaggacgttttcgtatctcgctgacaagttgagggacctttagtgtactttttccacctaattcatgtcctcgaattcgtctcaagaataaatatggcccatcaaggaattcagcccaccatataacttgacacagtttactcattaatacttcatccgttttaggttataaaatgtttcgactttattcaaagtcaaattgttttaagttttattaagtttgtagaaaaaagtagtaacattttcaacccaagacaaatttattataaaaatgtattcgattattgatttgatgaaactaatttattattataaatattactatatttatcaataaacttagtcaaacttgaatcagattgactttgtctaaagccaaaatgtcttataacctaaaatggagggagtaatttggaccgccagcaaacttggcccacttattcccatcaacaatttcagcccacctatgaattaggcccgcttgctgcttccgtccctacagcgctcgtc

SEQ ID NO: 27803 - DNA, 2513 bp, Oryza sativa
cctatgatgatggacctatatattcgatggatttatatttcatttctgttgcatcctccacacgtggaaacctccgcttttccctcctcgagctccacacccaatgctccgatcccttttctgcttaattaatcaagaaattaacaatctgcataaataatactgtaacagtttttttttataacttcatccaagttacagcttacaggattagtggatcaacgacgttgtctgttctattttaatcatcaccagaaaaaggaaacaatcatctctcttttacacattcacgccaagggggatgcatgcattgtttagtttgttactcccttcggttggtgcggagtactgatgacatgccattgtgttcttagatatgaactttagaaatgatactgatacatgagtagcaaacaaacagtgaaggctccatcggttggcttttttttctaataagccaaaacggcttattaggaaataaaaataaatttgtaggtaaagcttttatatatatgtgttcttcgtaacttaaaagccaatgctgaaaaaaaattacgttgaaaatatctcaaaatcaatcttaaaattaagtttgaaaattcaaaatttggcttattctttggcttattaggtcatctgatgggagcttgattaattcttctatttattactggagagatggtttgagacataaaatctaggcaaatttattatatatatatattaaggacttttattagtagctccagagagtagaaatgaccgccgaaatatttaaggaaaaacagctagactgacatgtatccagataaaaacaaccctgtaatgcaaataaatccaagaaacaaatcgactattttagttataaacttaaaaaagattacattagtggcgttcttcttgagcctaaaattaacatgctaccactaaatgggaaggaaattgaaaggacaagctagtatgtaagctattgattgattatggatatgcacatacgattctataacgtgagctgctttctctgtcccaaaatattaacatgtacgtattggcattaactttgaaaatgtactaggaattcagttagtttacaaacaagataaaactaattaatttaaagcactgaagtacttcctccgtttcacaatgtaaatcattctagcattttccacattcataaatagagatatatgtctagattcattaacatcaatctgaatggggaaatgctagaatgacttacattgtaaaacggagtaagtaaatcattctagcatttcccatattcatattgatgtgtctagatttattaacatcaatataaatgacttacattgtgaaatagagggagtagcaaagttaagagagagagagagaaatagaaaaaaaaattaagcatgtccatgtcagcttgggggtcctcttataagtcgtctcctccaaaccctcctcgcctctccatcctggagccacagccttctcccctattcttagcccgcctcgccgcctacgtcccggcgcgcgcgcggccggccgtcgtacaaacccgcgccccctgccccccgccattgccgccggcggccacccatggacatcgacctcgaccgggcgcgcgccctgcgcgtcctcggccgaggcgccatgggcaccgtcttcctcgtcgaggcccggtacggcggcttccgctacgccctcaaggtgttcgacaagcggtccgccgcggcgaccaggcacgacgccgagcgccgcgcgcggtgggagctgtccgtgctctcccgcctcgcgcacccgcacctcccgtgcctcctcggctccgccgagacgcccggcctcctcgcgtgggccgtcccctactgccccggcggcgacctcaacgagctccgctacgcgctccccgaccgcgtcttctccccggcggcgatacgcttctacgtcgccgagatcgtgtccgcgctgtgcgagctccacgcgtcgggcgtggcgtaccgcgacctcaagcccgagaacgtgctcctccgcgccgacggccatgtcaccctcaccgacttcgacctctcccgcctcctccctcccaagacggcggcgccgtcgtccgcgtcgccgccgccgcgcatgttccagggcggcggccaccgcccgcgcgtctcggcgaggagcgagatccctctcttcagccatgccaccaagcccgacccctcgccgccggcggcgaacccgtcggcgaagcagcagctccagagcctggtccggttcatcatgaagggcgacaggagcgagctgtccaagaaggccaagtcggcgcgggtgtcgccggtgagccggaagccggcgagcttcgcgtcgtcgtgggggaagtcgttctcgttcgtgggcacggaggagtacgtggcgccggagatggtgaggggcgagggccacgggctcgccgtcgactggtgggccgtcggcgtgctcgcctacgagatggcgtacgggcggacgccgttcaagggcaagaaccggaaggagacgtt

SEQ ID NO: 27804 - DNA, 5680 bp, Oryza sativa
  unsure (1)..(5680): unsure at all n locations
tcaggccctttgataaatctgtcacgctcgcacaaaacgaggaggtcgatgcgggcgatctcggcggcgccggcgggcatgctgcgggcgcggctccgcgggggcggaggcgacggcgcggggcggtggacgacgcccgggcacgaggagcggcccaaggggcacctcttcaaccggccgccgccgggggagtcgcggaagtgggaggactgggagcttccctggtacgtcacctccttcctcaccgtcgccatcctcggcgtcggcctcagcgccaagcccgacctcaccctcgagacgtgggcgcaccacaaggccctcgaccgcctccaggagaaggacctcgccgccgccggtcaggttccccgcgaactctagattttcttctttttttttctttcttttcaaacggtttgtactacgttatgtgtaattccgtaagtggattggatgaacctcaaactgataaaaaaaatgtacatctactgatgtttctcttgataactgtagtatgagtcatgattgtatctctctttctttctttctttttttggcatgatggtgaacatgttatacctttttagtggtttgcaaactgagatttttgcatacctgttgcagtacatttgtttgttggtatccattggcttataatttcctcctggttttggcaaaatgctacaatgaaatgcaccagtagatgaaaatgtcagatattatgcggggtaattcttgctgctggagtgccaacgattatcttcccctcttcgagaaatctctctctacgagaagttaagtactaggttatatgtaaattaaactgcgaaagcttatgttagtgacaggtgaggtttttaaggaaatgtagttgctcatgtagagtgagatagggtctgagtgaactacaagcccatggaatcgcgtgaggcttttgttgccacggatgttgtcctctagaggaaatggttgttacaatgcataatcaaatttagctggtcatataaagtttgaataattttcatgttgaatgtgacgattgttgttgaaagtcatagcctcatagggatcatgctaatgcatgtgtgacatactgatatgtgttcctggtgagcctgcattggccttatggcttttaaaacattgtcctggtttaacatcaaatattaaaagtgatactcccttctgctataagtaatatactcctcaaagattgacttgtgaaaatggttcctcaccaaaatgtgtgggatatatttctctcatgtctgaatgaagtggaggttcaaaatgtgctgttgaaatagagcatgaaggtatgtttaggtggctaaggtaatagcaattacaagaaagtgcaattttccatttggattaaggggtaaactacaaggattggttgtctgtgctcttgattagaatattaaagcaagaaacattttaaggtgggaaaatgaccttgccgtacagaaatccgataggcccagcggtgtgtccagacccacttcctaatattttgccatctctaatgcgacggtccctcagttgttacatggaattaaattgaatctctaagttgtttgcgctacccttcagctgtaaggactctcaatgcttctcttctttgaccatttattgaccttccctcttacaacttacaaggccccttgcagggttgggcctgtctatattcaatacaagaaggggtgcatactgaaatgctaaggctttctacaggcagcctatcttcctaaattgtgtaaactttgaactacaaggttgtgccatatgaacatttattagggcttctcctccagatacattctacagagacccagaaatccgagaggcccctgtaatcttgccccaatcagggtggctaagttcggatatcttgaaaagtttcactaaaatatttaatgtccactccaggacatcagtactatatgcctatngcttaatggaactgggttgttatcncattnttgaaataaatggctaannatatttgttaaatggatgcctccttttggaaagccttcacatgtgtacccttgaccaagcacttgaaaacaaaagtctgaaaaaaataacccactttacttaggcaggcatatgcttattgaccaacacttacctaacacattacacatattgtttacctgttcagttggtacatgatgcatttttgtgtctgtgctctgtatctgacaaataagctttacagtgaggattttttcaaattttgcatttgactgtcttgatcttttgcagcagtttagacaatgtgttgcactgttgcctcttgattaacggcgattcctatcgaagctatgaaattttctcctgcaatttatttatcactagttcactgcattattcttcatgctgtggtgattatattgtgcactgagtccctgacatctgagcatcctgtggatttattagatttgagcagtgtctgcatctttaccaacaaagcatttttgcactgtcactgcagcttttgttgtccagcatgcaatctcttgctcatgctatgattagtctttgtggacaccaatgctatcttgcagctttggcaatataaatttcttactctaatgatctaaatatgtataaatatagcctgccaaatttcatggatgcttttatatgatttgattttnaaattgggggaaaaaattttttttaancccaaatttntggttgttttcgttgaagatttagctcatgttgtcaaccgaactaccgaatgcattcaagaagtccttaaaccaattatccatattattagaattgttattttagtgctatttcttataagtctatgcgagctaaaaccataacggagtacattcttttatgccagtgaggcgtgaaccaaaccttttttccttagttgttgacatttcctaaataatttagtctacatgatgggatgattctgcttgttagggaccacaagcatggacatgaggcactggcattttgtttactgtctaaagtattcaagttaaaattgggtaactgtaagggctatacttcattatttcaattttttacattcttttatttaacaagcagctgctgaagtgctaataactaaaagtctatgaccaacacaacaaatcatcatatacttaagctgagtgcctgcatctaaacaccattgagtattatttgaaatttcttgtgcactattctaccagttaattgttgagagttgacatcatggaacttttggtctaccaaataaagatatgtcccttcacatttaacacattttgttttaccttaatgttacagccttcaaattcttagtcctttggacgacttatttaactcttcgatgtatatttgttctacttgctgttttggaagggatgtttgaaccatgtataaactttttggtgtcatgtatatgtctatcttgtactttcgcatgattacatttttccaactttgtgtatgcatgagctttcggaagagtttcagatctttagcagatgtgtagtaacttatcttacaagattgcaacttttttctaaagttatgaaccgatcttcctgttgtgacactaacttcttacctgatgatgcctttcaaagaaatgtagttgccatgtttatttgatgaataaagttttatacaatattttcctcatttaaaagctgagttactcttgctgatagctaatcttttgcatctttattatactagtgaaattgattaatttcactgatgctatccttagtgagaaccccaaagtgcaagttatagttgatgttatccttgaagaactccaaaaatgcaagttatagttcttgtcaaacagatattgagatataattatttcagttgcaatatcttgtgggaaaaaacttggttagagagtcaccacccacaaattatgcagtctcatcaaagttacatgtacttggatataatcattagtagggcgcctcatactgctccatctcaggtataacatataattctgctttattttctgtccctactgcatcactctcttgctgcctgttatgattgtgatccaacggatatgtatagctcaattctgttcatccctaatggaagtaaatgaaacattgctgtctcatcaccgttctacctgatgaattagctctgtgtgtatggtctcttggccctttcagctggttgcttggtttgcttcaccctccgaatcgtaactccaacgtgactccaggtcagtacattaacctactcctgtggctgtggttgtgatgtttttagtcagaaactggtagaatgggggatcagtgtaccacctaaggattgattgctgaggtactatgaagcaaccattgacattcaatctcacaatgcgagctgacaagctgtatatgcaaagcaatacggtggttgctgttggcatgtccttgtgagagcagtcgcggtcctaacatgctgctaagttaatttcttttttttcttttgtaggtccttcttactgaatactgatatggcctgccttgtagctccagaagtccagatctttctatatgccgaaattgctgacgagcagctagctagctctatggaacttctgatggatgggtttgctgacacctgtcggtcaatatatggagctctttttgcaggtatgacaatctttttttttagcaaactcccagtacaggtataattccatgctccattataaaaaagagaaaaaaaagggtataattccatgtgtctagacatccttttccaaagcctctttggtcaggatgaaagagacatattcaaactgcgtgaaaatgagaactgagaaaagggtctctcaccgaccgttagcagatccactgtgtgggggttgttggatccccacggaccaaaaccgaattgagtacacatagaggtttacatgataaatgtgttatacaactatacatgataaatgtgtcctcaaggaccacatgtcagtatgttacacagcattgcttaaactctgtacgactgtttggcatcattactggtgattggacatacttgatgagattagacgattttgctgttgagtgtagttatcatttgcttaatcttaatgcctgacttgtttagttccggagggcaaagtttgtcctcaaagtttcttttcccgtacatgacgaatttcaggtggtgtagcttcatgccttcaacttccatatagggatgcaagtggggcgggcaatcaggttttttttagcccgcttatctcatttctagtttatttttttttctaaattttgcactaccacgtaaaaattaaagtaatgagcgggtttttatacaggtagcgggactatccacttgcatccctacttccatatgagaagtacaacacattgcccatcttatgttcccccaacatgcgaaatataaagccccacttaccatgaagaaattccataatatcttacactattttttacatccattttctaaatatatggtgcagttgatttttctcacaaactgaacaatatttatcaagtacagtgagaaaagagtactactaaataacaatttagtactggattatacacaatctagtactatgaatttatacgctttggaacaggaaaaattggcatactttatgatagagggagtagaatgtataaataatcaaatgaattaaaaaataagtgtg

SEQ ID NO: 27805 - DNA, 6349 bp, Oryza sativa
ccccgtcctggaggacctgcggctcatccgctgcgccacgggcttcgccgagattgtgtcgcggacgctgacgaggctgatcatccacggcagcggcggcgagctggccgtcacagctcctcggctctcctccctgtgcctcctctctcgctggcctccgccgtaggcctcggagccgccgtgcttccctgcttcagccgcgccgacctcctcctctcccgccgcagagaaaactgagagagagagaggaagggagagaagagggggagagatttgacgtggcatcctgacatgtggggtccacgtgggtcccacgctgactcagtcgccacgtcggataaaaccggcgccaaaaccatctaaggacctattatgaccggttttaattagttgagggacgccggatatctggttttacggttagaggacaattttgtaactcgatgacaagttgagggaccttcggtgtactttttccaaaaataaattggtattgactcaactgccaaacggtttattttttgaaccaattttctgtagaaaagttgtttcatacaatcatattaatctatttttttaaaaaaaaatagctaatgtttatttaattattttttaataagtcgatctgcgtgcggaattcccaatctaatgagctgcctaaatgtagaattaaaataatgcaacgcacatgcattttgctagtgaaggagaaaaaatgtaagcttgtaatcatttgcttgctggtttaatcaatggttcagtgaatccctcaaaaaaagaaaaaggaaaatgatttagtgaatcgtttatttgaagacaaaaacgacacaagaaaatttggcagaatgaggcatcatcaacaaattatttacgacagaaatatgaacattagatccaccagttatctgtcaaaaaaaagtatgatttgatacttacagtcccagtcaacatattgacaactatgttgggcagcagttttatcaggtaggtacaggtaaaaaataaaaaatggaggcctgatgtccctattttacatcttcctagaaaaatcaggtaagctcaaattgcagcacaactgcatgactgcctaaaaatatgtttttttttaaaaaaaaagaaagtttaaaggatgccaccatgtgcaactgcacttcatgttcttttccagaactggtattctggaacaactttctctcaagtttcaactggctttaaggttggaacaatccctgttttcctccatattagagcaatcatcatccagaaaagagttatcaacagataatttcgtcatatgcatagactttgtaaaagctccacctccagttcttcatcatcaagttatgtcatgtctgagcattgtgtgaggcgccaattttccgaaaggttcctagcatgtgatgtcgaagaattatctttatcaggcaatattcaagtctttatatctaactggaaagtcttccattaggtagcgattatcagctttgggaagtgacaatggcaaggtctcttcgtccacagaatctcggtatttcaatggaacgacttcaatcgaaaacctattttggctggccgactttgaacgacttgtgggtaaagatggtccagtacctatttggaaaaatctcattagacatgatgacatagtagtatctatgaaaatgtgtaaaatgacagattgtggcatactgtcagtcatgtcctttgtcttgtggaggagaaatgtcccagaaaggatggtcacaaaaccacacagcttcgtgacaatttgtgttggattttgtcgatcccaatccctgcacgtataaactatgctatcacaaattgaagaaataaactttccataaggcatcaatttgttcttgaagacagcaacattgtgaaagaaaattaaggtgcgtagtgcacggtaacaacattgtgcaaaagtataatcacagcagcatagttagcggagcaggacacatgtagaactacacattaagccaaaaaaaaaaattgttcatagctttctgcaacaagaaagttgagtgtataagggctgaatgcctaatggaagtgatagaaaaagcttaccttaaacattatcacactggctaaaattgttagtgaagtaaacatcacgtaatatattggtgagacaactgctgtattaaaggtgtccaatgcctgcaagtcacagagataaaagaattactattgcgttaatgtaataagcccttatgtgatatgttacaataatggtagctcaataagctacatgttctgtactattgcccagagtgacatttcaatgccccagtgacgagccaggaaagttttacagcctgaagccctggaaaaatctaactacgctgagtatatgcggcaattctattttcaatccctacaatgatattaaaattctattgcacattcaccaacgatcccgggtggctccaccactgctatgccctacatattatttgagctagtgaagattcttttaaggacaggtgcgatgaagttgtatgaatgagacaagctgttagaagatcccttaaactcaagttaaatctcttcatgtaccttatttagatagtttatctgggtgctcacacaggtggctacaattagggcaaaagcccatgtctgaggatagaataactggttcactcctgagaatgttaacttcaatgcaatgccgagagcttttacactcatcacctgttaaattctcaccatcagatagaacatggaatttagttgaaacaacagtagaaaaaacaacaaaattgattatgattgggtcatatatttggacaggaagcgtacagtgagagatcctagaagagaacagactccgatgtacaccatgatgtttgtttgtccatgttgagggacaacaaaatatataagcaccagtgctgcggcaactactatagcagcgtagcaaagaaaacctggaaacaaagggaaaacaataatgaatcagacattcagtctagcccgtggaacttacagtaaggctgctgagggctatgttatgaacatattttaatacagtaaatacctggttcagttgcaagatcccaaacttcccttacagaatcgatgttgcgctcctgtggagcatggagtacaattgtgatagatccaactacacaaagaacacaaccaagtatgccaaaggtgtgtagtttctcctgcagaatggcgtgtgcaagtgcagcactgcacaaattgacaaaagattatggttttgatttagcaactagatagcaaaaacaaattttagcaagtttcttatttgattcatctgaaattacctgatgattatactgagtgccccaagaggagtaacaagaatagcaggagcaaatgcataagcagcaaaatttgcaatttctcccacaatcactgttcacaaaggtcatgtaagatgccattagtcaagtttctttccttagtgacattttttgtctaaaaacaaatgaaacagtaacttcagtatattagaaaatacacatttctgttcacttccaaccaataaattccaccaaatatcttactgaaagaataacaaggaaaaacaacagccctaggagcagacagtagtaagagatattcatgctaaggagccatattcaggtgacaggaaacactttgctccgtacaatcacttttcatgccccagttaagctcaaaggttctactaatatctagtcacatacttgtatcaatgtaattatctagaatatcgttttggcttcattgaattcagccccaattaaaaatgtttagtttctcctaatacaaagtaactgtatttatcctgattctcaagacacagaaacatcttattacaggtcttagggagttgacaacttgacatcaacacgagtttacatgaccaactaaccaggtaacagacaataaagatctcatcataatcaaagtgacatcaataaggaaaaaataattgcaggataatgtttgagcagagcaagctatatgttaagatcaaaggggaaaaaactgataaatccaatgatagaaaaaaaatattgtgcacataatgtgacagaaaagaaaggaacattttcaagaagtacaaaatattgtataatttaaaaaggaatcaaatgtggcttactagaaatcatgcctatccaccatagaggctccattaagtaagaaaatcctccatatcctgtttaatgcaaataaagaaaacatgtgacctcctgcattgaaacttgtagagcttgcaacacaatagcttatgaaatatcacacgaataatgaaagtgcattgatctgacatcaatcatttcaggtaagtgcataaggacatagatcaggttgagatgtaagtgcatgttttgttcatacgttaccactaggctgtcctaaagtaagctattatagagtaaagtatcatagtagttggttggtttgataaaatattgcacatgtgacatcgctatcatggaagtgaaccactagccagccaaaaagatgtaatttcgtcctggcatactgaagaaccatatcggttagccactaatcgcagaagcaccacaaccacctagcaatagaaacaacaacccgaaatttgacttgactttactctttccgcaaaccgaatcaaacaaaatccacagtaatcatccatgactcgatcagatacagcttacgatccagaaattcaaaataagcaaagcattggtaccacaagcattgaacatcatcttgtataaatatttaataatggaggacaattgcaaaaggccaaggataccaccacaaaagacaacttttttccggactcactcatcttagttccaataaaaaaaaatctcacaagtaacaaatgccgtatcaaatgaagcaagaaaaaaaaattcttcagagagtcaactgatcctccttgcaagtaaagtaaagatccttagactcgattagaactacttttgcaggtagaactttccagcttccacgcccaaatcattgcaatccttttcacccgcgagaaaagaaaaaagaggaacaaatccatccaatcgcgaagcaaaagatgtctctgacaagattcactacttgaatcaaagctatatttttcacatcagcagaatctacccgccaaaacggcgtcacctgtgcccccaaaaattttcaccttttcccagcctctctctcctctgacgagtgacaaccaaatcaagattctaaagaaaaatttccaaaaaatatttctactcccatgagaaatccccttgactcaatcagactatcaatttactacccaagaacaacaacctcgccaaataaaaaaaataaaaaaccaaagcagaaacagatccctctctctcccaccgagcaaaccaacaaagcaaggaaagaaagctaaccggaaaccgcgtcgccatggaaagcaagatcctccgctcgattccactgcccacgaatccaacccaacccaacccaactcaacccagcgaggaaaccgcgtagaccctaccctccccaaccaccgccaccgacgaacctcacaccggcgcgcggggggagatccaaacacccagagagcacgcgcgcgcgggcggccgcgaactcaccagcgcggacgccggagtcggcggccctcctgagccccatcttcttgacgatgaagctcgccccgatgaaggcgctcgacgacaccgcgaggaccagccccttggcgttgtcggtggacatccccgcgagccccgccgccgcagccgccgacgcgggcgccgccatcgctgccgcagccaccgccgcaacctacacttcgcccccgccactgcacggttactactccaacgccgccgccgccgacgaggaggtcatggaggtggaggaatcggaagcgggagggaaaggtagaagaagaagaagaagaaggtgagaagaagtgggaattttaaggggagggggtgtttttgcgacggggtcctcgaggattcgctttattaccaaatcctattcttttttgggttagacaagtagtatccgtttttagaacggtttacctaaatattaaaaaaaaacttgtctaactcttctagtttttgttggattaggcattgcattctcatctcagatctactatatgtgttgttcttgttgtaaaaaatactatccttttataaattattaaattattgctcgtgttcgcaaataaatacttgctatagtttattttatataagtactcgtacaaacgaagacaccaaaaccacattgggaattgtttatgtaagtgttcgtaaaagactcttgtatgtatgtttaaaattacttatatttgaaatcaaaagtgtaaatttctatgaggcagctt

SEQ ID NO: 27806 - DNA, 1288 bp, Oryza sativa
  unsure (1)..(1288): unsure at all n locations
ttgtgatagatccanctacacaaagaacacaaccaagtatgccaaaggtgtgtagtttctcctgcagaatggcgtgtgcaagtgcagcactgcacaaattgacaaaagattatggttttgatttagcaactagatagcaaaaacaaattttagcaagtttcttatttgattcatctgaaattacctgatgattatactgagtgccccaagaggagtaacaagaatagcaggagcaaatgcataagcagcaaaatttgcaatttctcccacaatcactgttcacaaaggtcatgtaagatgccattagtcaagtttctttccttagtgacattttttgtctaaaaacaaatgaaacagtaacttcagtatattagaaaatacacatttctgttcacttccaaccaataaattccaccaaatatcttactgaaagaataacaaggaaaaacaacagccctaggagcagacagtagtaagagatattcatgctaaggagccatattcaggtgacaggaaacactttgctccgtacaatcacttttcatgccccagttaagctcaaaggttctactaatatctagtcacatacttgtatcaatgtaattatctagaatatcgttttggcttcattgaattcagccccaattaaaaatgtttagtttctcctaatacaaagtaactgtatttatcctgattctcaagacacagaaacatcttattacaggtcttagggagttgacaacttgacatcaacacgagtttacatgaccaactaaccaggtaacagacaataaagatctcatcataatcaaagtgacatcaataaggaaaaaataattgcaggataatgtttgagcagagcaagctatatgttaagatcaaaggggaaaaaactgataaatccaatgatagaaaaaaaatattgtgcacataatgtgacagaaaagaaaggaacattttcaagaagtacaaaatattgtataatttaaaaaggaatcaaatgtggcttactagaaatcatgcctatccaccatagaggctccattaagtaagaaaatcctccatatcctgtttaatgcaaataaagaaaacatgtgacctcctgcattgaaacttgtagagcttgcaacacaatagcttatgaaatatcacacgaataatgaaagtgcattgatctgacatcaatcatttcaggtaagtgcataaggacatagatcaggttgagatgtaagtgcatgttttgttcatacgttaccactaggctgtcctaaagtaagctattatagag

SEQ ID NO: 27807 - DNA, 728 bp, Oryza sativa
aggcctccccctccctcctccggccagatctaggaggaaggcaaggggagccgccaccaccgccccatgccgttgtcgccgccgctgcccccgccggcctccccctccctcctccgaccagatttaggagccggcctcccccctccctcctcctcctcctcctcccttgtcacaccctgaagttctcctcctaagcctaaaatcgaattaataagagaccctaagaaaataccggtgcaaagcaagagttaaccctattaaatcaatgcaaataataatcggaattggcatgtggaatttttcttgagttctacaagtcgaaattcactaacaagatttttagtggaattttcagagctctcgaaataattttaaccaattaaaatcgagcatgcaatattttaaatcccagggaaattcttttcctcctttctttttttccttttccctcattttcctcttcttgggccgtcggcccagtccaccccgccgcgcgcgcgcccttctccttgtgggccggcccaagccgcccctccctctctccccggaacgccgacaggtgggccccacctgtcgggcccgtctccttccaccagccggcgctgccgcgcccgcaaccgccgacgggtacacgcctgcgccttctccgggccacgtcagccacgcctgcgcgtgcgccgcatttcccgcacccacttacccctatctcgcgctcgcgcccgtgcccg

SEQ ID NO: 27808 - DNA, 504 bp, Oryza sativa
cctgacaaaaaatgggaatccccttgttccgctcaacttagttatagatttagtaccaagatatttccttttcaaaagatcttgccacacacagtgttcatttattaatttaaacaaccacttacttagtaaacactggttttggatttctaaattatgaataccaagtccccgttgatctttatgctgacaaataacatcccatcttgtcaacctatattattttttatgttcatcaccttgccaaaagaaacgggatctataataatcaatttttcgaagaacccttttaggaatctcaaaaaacgaaatcataaacataactaaacttgataacactgagttaatcaaaaccaatcgcccacctacagacatatgtttacccttccaactactaagttttttctcaattctttgctcaattgttaactaatctttattacaaagctttctaaaatgcataggaataccaagatatctaacatgaaaatctcccagtttgca

SEQ ID NO: 27809 - DNA, 1542 bp, Oryza sativa
ccaccatccttgcgtccatatgcaatcttcataccttgcgatctcttaacctctcgagaaactcgttcaccgatttgccaagccaactctctccgtgccccatgaaggctgaattgcaagtgctggatctcagtagcaatatgctgtctggtcaacttggtgatttcgttggttttcacaagctcgaggttcttgatttgtcctccaactctttaaatggcaatataagtacccagctgagtgatttgccaaaactgagaagcttgaaccttagttccaatggttttgaaggcccagtccctacaagcatcgctacctctctggaagacctcgtgctctcgggtaataatttcagtgatcatattccaatgggtttgttcaggtatggaaatcttactctgttggatctctgccgcaataatctacacggtgatgtcccagatggcttcttgagcttcccaaaactcaggattttggtcctttcagaaaacaacctgacaggaaaaattccacggagcttgctgaatgtcaccacactgtttcggtttggaggtaatcagaataattttgttggctcaattcctcaaggaattaccaggaacattaggatgttggatttgagttacaacatgctcaatggtgatataccctctgaactgctctcacctgatactttggagaccattgacctcactgcaaataggcttgaagggttcatccctgggaatgtttctcggagcctccatagtattcggcttggtcgaaacttgctcggggaagcatcccagaatcaataggcaatgccattgacttggttaatcttctgttagatggcaataagttggttggatatataccttggcagctcagcagatgcaagaacttggcactcatcgatctgtcatcaaaccaggtgcagggtaatatacctattgggctgggcaacctgagcagctcgtagtcttaaagctccaaaagaacaatctcagtgaagatatcccaagttcattttctgacatgtcagccctggaaatacttaacctgagtcataactcattcactggagaactacctttcacaaattctactcagtcactgaagctctgctacttaggtttgcatggcaacaagctcaatggtgtgattccatcgtcgatcagcttgctgcagtctctgatcaccattgatctggggaacaatgagttgattggaattatccccacaaacattggaacctttctgaagttggagcgtcttgatctttcaaaaaactacttgtcaggtcaggtgccatcctcagttgcaaacctggaaagattaatgtgtctattcctttcagacaataacctttccggaccattgcctgagctacctaaatgggtgatggtcaatgtaactggaaatccaggcatcatactagacacggaagaaaatagaacttcaggcagtatgaaaggctcccaggatgatttcagatcagctatatgggtcgcagcagcttcttttgtacttggattcagcttgtccttctattgggctgga

SEQ ID NO: 27810 - DNA, 1151 bp, Oryza sativa
taggttttgagttgttatcgtgttcccactgacactactttatgatcataagaaacatcaatagcaatatttcctgataccagcccaatagaaggagatgatgaagccaactacaaaagaaactgttgcaacccatgtagttgacctgaagtcatcttcagtgctagccatattgtattgactgtcagagtcttctgtacatattgtgagacctggattgccagatacatcaacctttacccctctaggcaactcaggcatggggccagagagctggttatagcaaagagacaagtagatcaatcccttcaggtttgcaaacgaggatggcacctgaccggacaagtggttgtctgaaagatcaagtaacagcaagttacttaaagctccaatgctggatggaatagacccctggagatggttgtgacttagtataagagcaccgattttggttggcattgtaggaatggttcctgtcagctgattgttcccgagatcgagggtgctgagaaactgcagagagctgatcgaaggtgggatcacaccactgaaattgttgccatgtaaatcgagataacagagcttggacaataggaccaatgttgaaggtatctctccagagaatgagttcgcactaaggttaagtacttccatatttgtcataccagaaaatattcttgggatatatccactgaaattgttggtttggagcttgatgacctcaagttgctgaagatttctcagctcatcagggacaacaccttgcagcttgtttgttgacagatccatgagcaccatgttattgcatttgccgagttgtgagggtataggtccacttagctgattgtcatccaactccaggtaagccaatctgatggcattacctattgattcagggatgctcccgcttagcaagttgcaaccgagtctcaggtggtagaggctccgagagaaattcccaggaatgagcccttcaagcctattggcagtgaggtcaatggtctccaaactatctggtgagaggagatcagagggcatctcaccattgagcatgttgtaactcaaatccaacattctaatgttcttggtgattccttgaggaattgagccagaaagtttgttctcattacttgcaaaccgaaacaatgtgg

SEQ ID NO: 27811 - DNA, 542 bp, Oryza sativa
atcgtgtctcacataacatcacacacacaaacgctctgttctgttaggcccaagaaatagaagaagccaagaaacagagatgcggcaatggcggcggcgagctgcttgcctggatctcgatgaggatgatgcagtagaagtagtcgaacgcgatgtcaccgaaggcctggaggctgcgccagaccttctgcatggaggtgacgccggtgccgacgctaatgccggtgaggctgcccatgaacccgccgttgcggacggtctgcgcgatgccgagcgagaggccaatcgtcgaataggtgaaggacatgatggcggcgacgatggacagccaccatatctgatcgaaatccgggatctgtgagaacacgatctgcacgacgccgaacaggatcatgtacgggttgctcgagctcctgcacgggttcttgtgccccttctcgtggaagcaatccgccctcttgatcgccctgctcgatcgaatcaactaagctatcagcaatcacatcatcaatggagtttgcatcgaaaccgaatcgaaacaa

SEQ ID NO: 27812 - DNA, 690 bp, Oryza sativa
ctggacaggcgaagatcacttactggttatgtgtttactattggcagttgtgctgtgagttggagggctactttacagtctgttgttgctttgtctactactgaggcagaatatatggctatttgtgaagcatgcaaagagttgatttggctaaaaggtttgtacgctgagctcagtggagttgaatcttgcataagtttgcattgtgatagtcaaagtgcaatttacctcactaaagatcagatgttccatgagagaactaagcacatagatatcaagtatcattttgtgcgtgatgtgattgaagaaggtaagctgaaggtatgcaagattagtactcatgataatcctgctgatatgatgacaaagcctattcctgttgctaagtttgagttgtgctcaagcttagttggtttaattgaatagtccaagagactattgttggcaccagtggttttctatctttgttgttcaagatgattggttgatttatgatacaagaagaatttgtctcaaggtggagtttgttggagttgttccaaattcactttaagatattggccgggcttctgacgaagcttattacggtacggtatatatgccctttgctagggttttgtggagacttgattctctttgtaagccgacataggcgtttaacccaaaaattttgagataatgagattgttg

SEQ ID NO: 27813 - DNA, 7387 bp, Oryza sativa
taccccccagccacacccaccccacatccctcaccccgcaccttttagaaataacgtataataaattaattactaaatgattgtttgtggcgcaatatacgataagtaacatatttactatacgtaaaaattgaatgatgtatcaatcccgcaccttttgctagcccagccaccaacaataatatgtgtgactttagtaattcatttactatcagtatgttttcgataagtaatcgagttactattctcgagtaaatgagttactatcagagacaaagcccattagtaaatgagttactaacagataagagtaacatttgtttggcacttcccttattggcccatgagtaaatgcgttactaacagagacttggcccacaatgagttactaacatataagaatatcgtttgctagccacatctcgtattggcaatgagtacatgcgttactaatagagactcagcccatgagtaaatgatttactaatagataagaagcaacatattcatggaataaaaaaattactgatatgtattgggattatccaatcatggagggagtaaaaaagttacttagtagttgattgggcctgatatataaggtagtaaatattttactgcacgaatacgggtataatggactttgtttttacaattgatcgtgccatcatcgttacaaacacatatacactcggtaccaaaaaaaaaaagcacaatccagagggcatcgcatcgcctgccaccgaagcctgtcatcaattgtggtgtggtcgtcctgggttgaccctttgtgttggccgccggcgacgaacgttgacgaaggacatgtcgaggatggcattccagtggcaccaccaccactggcataatcttctcatgttcttttctagtttcctgaacacaaatgaattcacaattaaaaagaaaattcagatatagatgagcaaccaaaaaaattagaacatgtacatcttcaacagagcaaataccaaccaccataccatcaagatgtgcatccacctgcaagagtgcacactgtagatgctgatgcctgcaagaattagaagttaataatttcagtaaaatttagaccttagtcttagtctgaagatgtctgttctgtcaaaaatatacagagaaaaaagggtatgttcaacagcgaacatatctagtcagaagttcagaaaaaaaaattcaatcgatgtgctcctttgaacaacaaaaatttagaaaactgctatccgatcgagctttttgagctttcatctatccgaaaattcagaatcaggacatgcagtactaatttcagaaaaatacgacgaatactgtacacatgctgtaaaaatatcacatatctcagagtttacacatctcacaggacatgcagtactaatttcagaaaactacgacgaatactgtacacatgctgtaaaaatatgacatatctcagagtttacatatctcactgcttatttgtgaactagattagtgaaccaaatttgtcacttgaattgctagtaaagtacctgaactgctcgtaaagtaattaaacaatggctccaatatctctaattagtacctgaagaatcaaagcacaaacagcatcgcataacattgttattcagccaaattaaccgaaaaaaatctccaagatttcagcaattggaaagacaacaagtcattacagcttattgaatagatcccacaacagtctgagcactcaaaaaaactatgtccaattaaaatagtatggagaacaaaccgaatggagaccacggcaagacgacatcgcagcaccctagaccacgacaagagggatgtcggggacgcgcggggccgctggatacggcggatctggcggcaaggctcccaaaggctacacccttcttcacccctggcgtcctcaagtattcctcgtcgatgcaggctaacctatggagtgcagggagcaggagctcgtgtcgccctgtagcatgtacatctggaacagaagaacaaggggcatctaccagcaaggagcttctcacatgatacccatgccattgaagcttccagatctggagcagaaccaccatgcaaaatcccatcgcatgaagtaaagaaaaaaaaaagaaaaaccaaattctgattcgttcctatacgcagggagggcagaggaaccctataaatcccccaatccccaaaccctagagaagtccccacctcaccaaggagaacgatacagcaatagggatccagcggaggagttggcgtcgggaggtagcgcgggtgcggttggtggaggcctcgtcggcagccttggcggaggcggcgcgcttcttgcttttctcgcttgagggagggagccgacgacaaccacggaaacgagagcgaaaccgtccccgcctcctcgccagacatggacatgcccgttcttgccgcctaacccattagatccagcacggcgcctcctccctgtagcacgccatcgccgtcgccgccgcctccgcttcctgatgccacagctgccgagccggcttcctgcctctatagatccaaaaaaaaaaggggggaaattgattagtggttagttacggtgtgggaccaacacatgtatgtatacgacgatttaaacactactaccagtaaaacaattactcagtagaaattgatagtaccgttagtaacaccattacgggaattgagggggacagggatgtgctagtgtggtgtggtgtggtgtaggggtaggggtgtgggttgcccccagggggtgggttgcggtttaatacaacgcaacccatctgtagtatagggccggtttggttcatagcctaaaatggccttaccaatgtttgggccacattaacagtacaaagtataattttggtttggatccaaatattggctggcctatgcaaaacaataggtcacgcacccatttgtaaagttattgcactcagacgtaaaaataataattgaaagtcaattaaagtgatgtaaaaattattatatttcggttgatatttgagaaggtgaagaaaacaaaaaaaaatcttaaaggtaattggatgtaaattgtactagaacgcacccatttgtcaagttattgcactcaaacgttcaattcccaagttcttgcactataccgcacccacctgccaagttgttgtaccgtgggtgcaatttactcgcacaactaatttattgttttcaccggcgccagctaatgaccgtgccatcccacgaggaaacaatctcaaactataatggaaagaaaactactaggaggctcaactgaaccccagtacggtggctatttcagaaggcctgcagaataaaactcacctctaatgaataataaaacacaaaggggagaacatgctaacaatttcaaacaattgatttccccacgtaaaacttgtataagatctggcatcggcgaaaatttatggtctatgaggtggttagggtaggggtgggggggaccatttctatatggagatcctacagattttccttttgaccgatagagttggcatcgcctacggagtgtgtgtgcaacaaggaagattagacctaaaggagtcaaatatagccagcataaccactcctgatgcatgttcgtgtgaggaagatcggcgtgccaacgaatggctgaaatgacaactcctgatgcctcctatgccaacaaccagggaacatcatatggctggaccctggagtttcagggtgtgctatctatcaagtgttctttcatctctctctcagcctgtaaaagttgtcgctcttcctccgatctttgatttatacagcaattacatttttatgcaattgttcctactctgtcaggatagttcaatgtagcacctgccactccgtatatatgggccagccaatcaactcctacatacgtttagacaaggaaatattgatgactactccctccgtttcaaaatatttgacaccgttgactttttagcacatgtttgaccgttcgtcttattaaaaaaattgtaaaatatataaaatatatatgtgtacatgaaagtatatttaacaatgaatcaaatgatatgaaaagaaaaaataattacttaaattttttgaataagacgaacggtcaaacacgtactaaaaagtcaacggtgtcaaacattttgaaacggagggagtatcttttagtaccttactaattcagaaccatccactccaaacccactcgagctatacctgacacgaacaattcatcaatagggggatgatgggactgcattatatgtgcatatatgattccctgaaatgttctaatacgtcagtatagcacttgaatgtatttatgtccaagcctttggaccaatgcaaccaggtaatcaatcagaacggggcgttgacagttccatccaatcaaggtagcggttccgaactagggtacgtaattttatcattcttgagaaggaactgagagataccacatatttcagtttaaaatttggtacttctagctacgtgctaagtatctcaaagatcgtaaaatttcttgaacaaagatttctaacccacccaatatttattcgtattattggtcgagaatgcagcttaccactgtagggataactcacatgccaatggtaatagatcgctgcatgtagggatgaaaatggatcataaatggacggaaactagctttatcatatttgttttcatatattttttcggaatcggaatcggaatcgaaaactcggatacggaaatgaaatcgaatattatcgaatacagatacggagcgaatacgagacggaacgaatacggtagcgaatatttaccggtatataaaaagcccctcaaattgagtttcttgatcaaggaagagagatcacttattattttagttcaacatctccaacatttatatcgtcaattttgtagatggtctcacaaccgcatatgaaaatcgattttcatggttgttcctctaagagatccatatgcaaatatgattatcattttctattctcaagactttttagtagatgtataacttacttgacattgtataaattggagatgttatttattttacttcacatcttcgaaactagtaatatttgttttatgctttaaatgctttcaaatacaaatgttataaactacaaagtggtaaatcccgttgagctctacaattttgatatggaacacatctccatcagatgtcatttgaattgtagatctgagattttgtaaaaattagtatggtatattataatgaatatttagacccttaaataacctcaaataataaaatagtcaataagaaagttgtagatctcatcgacctctacaattttgatataaagtttgtcttcatctgattccgtatgaaaaagttatgtatatatacgtgttttttctaaaatttgctcaatgtctgcggatatccgaaaaacattccggatagttttcgaccgttttccgattccgacggatagtacccttactgtattcgttttcgtttccgagaaaaaaaatccgaattcgtttccgaatccgaggatttccggatagttccgaccgaaactatccgaatccgaaaaatggtctggacgaacggaaactatccgaaccagtttcatccctagctgcatgtgtacattaaaactgattgtgacaggcacaatgtatcggtgaattgatgggattattccactttgtcatgagggcatccacaatatgaaaaaaaacctgcaaataagtaggattactacttggttcaccattgtagaagtagatattaagatgggtaatagcttaatccaacaataacactactacatgacaataactaaacaaatattgaaatctctatcttcccttcatcctccctcgccccactagccattcatgcattcatctagaacaacaatagatgttacggctcgtgcgcacccatgagctgcaactcttaagcgatagatgtagcccagcaagataaaattctcaaggacatggtaaactagaacacttgagtgtcatccttcaagatgtcgcaagaggatcagtaacacaagagcttccggtgcctcccagacctaccctagctagtgacccactggacacggtaatggacctgaccataactcatcatttctgtatgataatttgtagcactggcgctcagtcgtcttatcttttatggcacaaaaagggcagttttagacaatcgtaccaaatgttagcttcccatatcgccgtacaattgcaaatgacatttttgcatagaaaactctccgttaatacaagtatatgttaggccccctgataatcctactgagccacctcccacccgtccgctcaaaattaagtggtagtctcttcgttccaaaatataaaggattttggagggatatgacacattctagcactatgaatctggacataagtttgttaggatgtatcacatccctccaatttctcttatattttgggacagagggagtatagatcagtctctttgggaagcggcagtgggtgtttttttcacatggaacccttcgttttatccgcatttggagtgaagaaatactcttacactgtcattactcacatctcacaaacttgacgccacattgccaccaagtcacagattcaaccttgctagggaaggaagggggtgggggagggtgtatcgatctcgtagcataggcgcatagccaagagattgatgcagttcttgtgaagtcgccagtcgccaccacagtccattcaggttgcgcctaccagcattctccccataaattttgatccttgtaccctgccatggtgatttgaagaagatatgataccaaggttggttttgtcaaaggctccatcaccaggacaacatgtaccgccaccgctttcagcttctacgaaatggattgtatgatcaatcatccatgtggctaatcagaaaggaagaattctgggaggtttatgaattctgacagctagcgtaatatcgtcaggatctgtatctaccaatatttgccattgtctggaccattcctcaattcttagtttgtaatcagtataaataataaaaacatgatcaaacaattgctagcggtgtgcctgtgttaatttgacttcctcattgcatttttctgaattctagctagttcaaactgcaagcaagcaccagttttagtaatgtccagcacgtaagatttacattttctttagatactagatatttcattgagtagtgaagttacatccggtgctctcttcatctagtgaggatgcacccagcccgaaaagaaaagaaggaaaaaaaaaactaaaacagcatgaacatatcatactgttgcaactgcctgcttcacctgtaactgtgacgacaacatagtgtctatgccatttgtcgaga

SEQ ID NO: 27814 - DNA, 19332 bp, Oryza sativa
tgaaaactagaattccgaatgggatctttgcaagttgttggtgaaaagacagttctctcagttgcatcattgccagcaacccaccacgctggtatttctcacttctacagtcctactgtttcatgttcacaatgcctaaccaaactaactgtatgaatgcacggtagtaccaatttccatgcaatttgtaacgcaggagttcccggtgcctcataggcctactatagcaacccaatggactgatttttatgatcactcttcattagcttgtggaacttgcagttggttcactcacctcatcttttatggagcagaaagtactccctccgtttcaaaatgtttgacaccattgactttttagcacatgtttgaccgttcgtcttattcaaaaaaattgcgaaatatgtaaaactatatgtgtacatgaaagtatatttaacaatgaatcaaatgatatgaaaagaataaataattacttaaattttttgaataagacgaatggtcaaacacgtactaaaaaatcaacggtgttaaacatttcgaaacggagggagtaccacacaatacatattgcttatctcatatatatcttttgtgatgtacacaatccattgcttggcaattatatattcaagtgctgtaggtgttcaatttgcagctacagctgcatgcttaatctcaaccatcaaatgctggactgtaagatttttgcagttgtccaatgaaactattagtgtttttctccgagcctgtagttatttggtgctctttgacaaaaagttttccctgcgaattatccaaaacctgcagttcagtataacatgcatacatgcacatgccagcaagttttgttcagttagttcattctagacctggaagtgtagacgacgctgcatgaggcagccattagattaagccatacaattctgagaacaatttagacggccaatctgaaaatgaaaaatattataataaattgttttccattcaaatgttacccaattagtagttgttagcatcatataaatttttaaccgtggtgtggctcaataactaaacgatgaaagaaaaaacatctcccaagaattcttgtatcatatgacacaaacatgaaacattaacttagtcgtacatattaaattcttaaaccatttttgtatgatgcatacaagatttgtatgagtatacaagacatgaatatcaaaggaaataaaaatgataattagtggttttctagaagggatccaagaggaaacagatgttgcaatggccccaacggtttcctttggttgcattctctctgcacaggtaaggactggtcactgatcagtggagtaacagttcccaatgcctccaaggcccaacaacaaccatgcatatcaaaataaacctgttgcatgattgatgtggccttgaccggcctccatgaagcattgtgtttcacctttctctctctctctctctctctctctatctctcatgctatggaattttcttgctccttgtgatctatcatgtataaagcatgcatttcatttgatgaatctattccaccattgtcattacagttggacgcagcaactacaacctgtatatatgggtaggggtgggcgtttggtttccccggtttaaccggttcagtttatcaaacattaagccaatcaacatctttaagcctggtaattaattaagccaagcaaggcaatcgtgtgtccagcctagagtgacttatctgcagcctctccatgatctttagtctgtacaacaatttattaatttgatgcaattattcaactcggttttacaatttaatgcactacctaccaaaccggttatatgggacaatcgtgcggtggggtacagatatgcaagtgggtagtcctgctacccgcaaaaaaaccccgcttgctaattcatttttcacatgttagtacaaaatttagaagaaaaaatgaactagaagtgagataagcgggccaaaaaaaacccgcttggccgccccgcttacatccctatactagaggtatcctctacttaattacttggatgttcaactcgcttaaagagtttcatcattatctatacatcaaccatcgtccccagctcagaatccttataattagtttagacaaactccatgccatatcgttttgttgccaattaacttcaagagggaggaggatgtggtgccgagtgcacccttgatcctgtgagcccgtgaggcgccaactatcattgccgtgcacggaggaggagatgtgattgaggataagcagggggcatgaatgaataatgcgtaatcacattggcagatcgagagcgagcctgacagtgaggaagacaaagacatggtgtcttgcacggctgaaattttataatttgccactgtagtcatatgagtggtaacccatttgctatattggtccaattccgatgatatagatggtccacatgtcagtggcaaggggaattgcacccgtttgaactaaaactaatatggggcttgtgtaaatgtagcaaaacgttgtgcccacctagttttacaggctgcatgtaaaccacaaacatttcctacccaccccatatatatgggctgcacgtagaccacgttatcatttcagcccaatggcctaaacatgcacatgaatcgcattggatacagataatatgggctgaaggcaacagtaccgttctggcccaactaacatggttcgcatgtcaaccgctgtcaccccaaaagctagccgttgaggcaaggggctcccctacttatatcttaggtcatttgcccttccacaactaatgtgggactattcaacaaagcgctttggcatgtaccacatcaattccgcttctacacctggagagcttagctagtgcattgattatgatgaaatagcccctgtcaggagctgtcgatgttaaagctgcttgtcaggagctattgatgtcaagccgttgttaagaaattatgatacaggaatccctttcacctagtttcagcacaactatcacaatcctctgcagtctgaatttgcaatagagacatctactttcaaagtccgctaatacatcattgatgaatacaagttccatgctgagcctaacattatatgggctcatcgagcctaacaatatattgatgtgcaagagctttgcacatcaatatattagtaagagagaaaaaaaaagtacaactgtgacctgatgtagcggtcatgggagtttacacgaggagaaaggagagcaaaggctgtgttagctaattaaaatcaggccccgaacaaacaataaggcaggaaaaagaaaaaaattcaggactatatgcgagaaggactcctagaggattaggcttcactcctacctagagcttcccctcctacacgatgagaccatgccaggtaacaaggaggatgagggagtcgaatcctttgctgaggttatcaggtggctgccggtgagagcagttccactggacttggagtgtggactgtcggttggatgaagaggaggctagtccgtttttaggcaacaaattggaatatatgcgaaatagcaaaatgcaaaatggaatgcagagtgtggatcgttatcaggcatatgcacaatggaattggtatggtatgtcattactttcatttcagaccaagtgacagtgacaacgccattcatcatgtctaaaatcatcagcgatagagccatacaattttgagaactgtataagaaaatatgatccagaaagtttctttccagatactcaatttttagaataaggctagcacagtgtcttaaactgctaaaccatctatctaccatatatcatgcttagcagaaatcttactttgatcagctgaaaggcaacccaatcatgctcctgccatagtggaccatcgataggaggaggaaaaacatatgaccggcttgacaggaacaggaagaagacatggatgaggctggtatcatcagaggcggcgccgcaagaagacataggcagtagtctgccatgccgccggtgcacggtttcggcccctatatggacccgaaagacggcgaggtccacctaactgctctcgccatgacgacaccgataactagcatggcatcttatcatcccaccgcgtgaatatcttctcacctagctgcgatgctcagtgtgctcactctcgtcaaggacagttgtgccgagtgcgagtgcttggctgtaggattgtctcaaccctgatgacattggagatgatgaagtaaaatgatgaatcccgatgcctcctaggccaaacagcctgcaggcactacaaagtgacctggtacatggcggtacatataatatacttggagtggcctgatctgccagaaagtattttcacatgaagtgttgtttgttcccactctgtgtttgtagagaattcgcttctttgctgatctgttgattgattcatacaacatttcattcgatgcaattatttatagagcctttatggtacaatgaaaggttctaagtcctaatgtatagattgattttccttccacttaaatagattaaagtataaaattaaaagcggtaaaattgtatttttgtgctactgctcggatgcaaatctataaatttgctttgtataatggaacaacgctaggtgttttcccccagacgagcccattcctcattccccatcatccactcgtccttcaccatagcgaggtgctactagctactgcaagtccatgcacaccgtgccactgcacagtgggcatgctgcgctaacactcattcttttcaattttgtggcaaatttgtagagcacctttacggtgctccatactaccatatactagtggattatactaccgatccagtggtttaaattttactagctcaataactaactaattactacaaatcttggtttgatcaattacatgcagagggccatcttggttttgaggcgaccggcttctgccgatgctccgcaagaagaagctcgtcggcggtagtctcccacgcttccagcgtgcagttttagccccaagagggaggcgaaagtcggtgaggtccatccatctaaccgctctccccgtgccggcgccaacacgcgtggcttctttagatcgcaccgcgtgagcatctcttctggaagctgccatgcgcagcatcgttgccttcctcaagtatagttgtgatggcggcaagcgctcagctgtaggtctatgatgagcctgatggccgtagggatgatggagaagcgaaatgacaaatcctgatgcctcctaggccaaatagcaaggcattgcaaagcacatggctgtgtgcctggagtggtctgatctgcaagaaaatttttttatatgaaatgttgtttgtttgccccccccctccttctttgatctggtatttgatttatacagcattttattcgatgcaattagttaactctatcgctgcagttgaatgcagcatctacctcgtaccggagatatctcagtacttaattttgaggataatatcgtttggctccaactcagttaaaaggttcaggaaaagaaatgttgatggctaataattgtgaaaccaagtgttgttttggtttatttgtaaaattggcaaggaaattggaaaccttctgttggtttaatttcttggaaatttggtttgaaatgttggcaattgtcaacgttagtgcgcgtgactaatgtgggtcaggttgctatatctatgactagaaacggttgtttggtctatatgtgtactatgtgattgaagtcaaccttggtccatggcgaggatcaggattatgcttagggagaagcagaggtctagcatattccagactatgctcacatagaagaagaaatttccaaaatttctgaattttgggtctatcagaccccctccccacccccgcgatgcaaaattattttgctcgaatatttttggattttttcaactttttgtgaattcaacaaaaaatatttgaatttgaccaaattttattaaaaattcaaattatttcagaccgaaataaccgaaatttcggccgtattgtcaacccctgatggaactaccgaaattgaaatattgaacatgtcacgcccggaatttctatccaaaatttcaaacgcttacatgcgtgtgaaccctcgtccaggaatcagccgaggcatacaataacaaattgataatagagtataattattactctaattaataagcgaataaatgtcattacagaggtagatagttcctctcaaccaataaagatctaagcagcagaaaaataagataaacggtgcagacgactccactccacaggcaacttgaccagggttacacctaatcctccataccatcagcatcactgtagaactcctcctctgatgaatgattgcaaggtgagtatatgacatactcagcaagccacgcagcaaatatgcaagtgcacaggataacaaaggatggcatagtagggtttcatttgcataaacaacatttaataaacatttcagaatttaataaaacggttaagtaataattaaacaatattaatccaacgctatacaacataccctgttgcataggcccaaccattctgaacaaccatcccagctgcagagttctatctccaaaccaggaatataccattccaaaccaggagctaatcaaattattaccagttatagcatcttttattatggtgagaaatgtgaaactaatcacgaaagacattattagacctgcccataaccgcaggcacggctattcgaatagttttactctggccagaggtgtaccactgtacccacaagacacagccccacaacgtcaccatgcgcctcaataccaccacggtacctcagaaaggagctgtgacagtacccctcgcacaacacaatccaccacagcgcaccgttcctggatcataatcacccccttataaacaaggcatggactccccagcgacccccgtgggcttatctccgccacttctcagtctggtgctccgcaatgaaccatgctatacaaaaggtaaagccgttgcccacgctggcttgtggttggcacggttaatgtttcacaactgaaactcgtgaaccggtccttaatcgtcgtgagcacgaccatcaaaaccatgtgctcacaacccaccattatcaaattttagttggcaatttaattaattaaccaatcacgattgaccatcgtgagctatcattaagccatcattaaataatagtgagtcataagtatcccatttatatggactagtgtttctaagcatggctaagcaatcatatctgatatctagctgaaccaatatataaagctcaactagtcaagttataataacccaaggtatcaaggaataaagtaatcaagaacaaaagggctataacaaacaataggttaattccacccaatgacattcgaaaataaatgcaatagttgaatagaaacaatagctttaaacgggatcaacatgctcaaagggttgtttgggatctgtgtgacttgccttgctggccttggaactcttcaaattcttctcctgcaaaaacggactctccggaaacgtcggaatctaaagagaaaagagcaaaatcaccaaaacagcacataaacaagcatgaacagtatatgttgatatttttaacatctagatctcaattttagaaaaatttagagacttgaaccaactaaatccgagctaagatgaattagttatgaatttttaaagattaaatcggattaaaacacttatatggattttaattgaattatgacgcaataatgaattatttttgaaaagtaaaagggaattattgcgtcagcggctagggttcgcggtgaaccgggtgcacggcggcggctcacggaaacgaacggccgagatcgattcatccaaaacggacggccaagatccatcggtccacgaccgggccacggggaatgacgacaatgacgtcagcggtgacgtcaccaccggcgacggctcgggcgtgcatgctcgccggcgaacgacagcacgacagcgcgaacggagggaaccaacacgtagagggcgacgcggcgaactcaccggtgaccaaaacaatggtggaagatcaacggacggcgacggcgtcgaggaagaagcggcggcgaccttcggcttgacgacggcgatggtgttacggttgtcgtcagcgacggcggaggggcagacgaggtcggcgacggcttggcgatcacgacggcggccttcccgagcgacgacgacgaccggagcggcggcggcgcacggctggacgaacggcggcgacggcggcgctaggctacacggtgctagggctctaccggcgacgagaggcgaaggcgagggtggcggcgggtagcggagacaccgggggtccttttatagggcttaggaggcggcgacgaaggcccacggcgaccggcgacgtgaaggaaagtctagggttcagaggagagagacgaatccgattcgagatcgaatccacggatttccaaacgaaattagccgacgattccataagagaaaagatagaggggatcccggggatcatttcccctctactaatttcatcggaaacgaaaaggggcggccggatttggaaggagatggcggcggcgcgactctagggctcgggcggcgggcggccggaggtagacgacgacctgacaggcgggccccacctgtcagcgtccaagggcgcacgcacgcggctgctgcgggcagactgggccggctttggccggggagagagagagagaaggttttgggccgactttcggcccaaagccaaaagaggacttttaaaaccttttccaatttaaattattcattaaatgcaattccatttattaaaaatacttccttagctcaaataaatcccagaaaaatctaggaattatagaattaagcaaagtatttaatgaaattttatctggccctattttatattgtaatttattatttaaaattagatcttctcttctaggcttttaaaataaattctaataattctaatttagacaacaatttatatatttgggatttttagggtgtgacagaacactagccctaatcctaccatagtgaaccatcaacgggaggttgaagaacatatggccggcttgacagtgatagtaagaagatatggcagaggatggtgccatcagaggcggcaccacaagaagacgcggtagtctgccacacattgccggtgtgctgtttttgcacaaagagggacatgaaagacagtgaggtccatctaactgctctactcgtgatggagccaatatgcgtgcatgacatcttatcatccccaccgtgtgaatgtctcctcggcaagctgccatgctcagcgcagcgtactccctccgtcccaataagaaccaattcctggctatgaatatggacatatgcacatatccatattcatagccaggaattggttcttttttggatggaaggagtactcgccatcaccagggaaaatcatgatgaaggacgagtgcttcactgtaggactgtttcaacactgatggctgttgagagcggcaatgctaggtcttttcctccatcgatccctttcatctttcctcaatatcgtccactcatcattcatcatagcatgtcgtcactacccaccacacaagtccgtgcaccaccgccttgcgcacgctgtgttgccatttgccctttctaattttctagcaaatttctaaggtacgcttgtttatactgatagtattaatatcagtatattgtactataaaattcctcattaattaactgtcgttgcagatgaatgtagcacctacttccacctgtgtatatatgggccaatcatcagatgtgttttggagatacctcaatgcttaattgtttggataatgttttgctccaactcaatcaaaagttcaggcaaagaaatatattaacggctaattaacggcatagtatgtgtacgtctccttaatgttctttctgatgttgaatagacacaagtagcaaacaaaaacatcctttagaatttataatgcaagagctgctttcaccttactttcatagtggttatatatccacattctctgaagtacgcattcgaccggagatacaacttcaaagtctgctcgtgcatttggtactagatttccatcttcaagggtctcattaaaatcaaatggcatatgatcaactcctaagaattgtccattggatgccaaaaagatggatgtacggtgtatgcacagaactaatgttatgggcagacaggttagttgttactagagccccactacagtgctctctactggtatagaaagaaatctgaaccattgatctcatttgataaaagggttcatatctatttatactaccatcccatttagcggtagtagaaacgtggagggacattattgtatcaaagaaatatgtgcggaggggcataatcatcattttgcagttactaaactttttttccttattttttggactttttcaaggaatactagtgatgccagtgcaatggataatcataaatcgatttagttggaaaagaacataaatgacagttacttctaattatggtattagtaaattactaatttgcccctaataattactggtagtataatattaccagtatagagcaccgaagcatcgctcggattactaaggttgcttctccgaacttattctccctcaattgtgtaacaaggactctgttagttggacagactcgagaccaggcctctagtgtaccactgctattgagttcatcattttacacgcagatggatgggcctgcctagactggcacggaaagacgaggtcaaactaaatatgtctaatctgaaaataccaaaagaaaaatttgtgacaaaaatgcgacttaagtcttttcgtcatgttctgattccagtggaaattcatctacaatagtagcgacaacgacagatgttatggcctttgtgagttgacttactgctaccgtcgacaaacaatgtatgcccctctgcaagatcaaactattgagtgcatgacaaagagaaactcctgagaagtcaacacaagggttaatttccgtatgtaatacatgagtttgtgtttgcttctcaggtgtaccctaccattgggccactagagaccagactggttctcatcctagtcttttgacctgtaattttggagtcattggctgtcgcttcttataagaaaatgccggaatgaattccattatcttataaaaataaacttcttactaattacagctggtatgtgttggcttcatgctactatcgaaagatggatgccggtttgctagaattgtcagaacaatagaaatgaagtaacacaggagcttctctggtgcctcccagccctaccataacaacccactgaatagtagactcgtcctcactaactcttcatttctctccatcagcttgtagcacttgggctcacccactgcctctatatttcatggaaaaaagggcagcacgataccatatatgaagatcctcgacgttactagctagcacattaactaacaaatgaaagaaagaacaagtcttaaacattcttgtatggtatcacacacttagtagaaacctcaatttgaataaccagacataggattaaggactaagaaaaggtaatatttgcatgcataaattaaaatatactatatatacaatctgaacaataagaatggggatatgtgccaaacttcaagggattcaagaagaaccaggcattgaaatcaactcagtggtttattcagtttgcattgtggaatcaagaaaactgagaaaaatcctttcccttgtcacttggctgttatcagaagtgggatttaccaaggatgagtcttgttttttccttttgtgtggataaggatgtgtcttggttctttgtgctttgatgattttttttttgcggggttgtgctttgataattcatacacttggtcaccagacatctgctttcgacactagtagcgaagccaggatttgatattaggggggtgtgggtgtggggataagccataagaccgatcgaccaatatcgatagctaagggtctcaaatagtcaccatcaataacaattaatgtgtaaactagtcctttaaaaaaacttgaattctagctctttaataatatcacagaaagtttggaactagtctttattgctaaatcctttcaatgtaaactactgaataatctcacaaataagtaacttctattttacttccaaaaaagatgagaaatcacaaactaaatatgaaagttgtagatcatgttcttgctaatgttttttttcagaactgatcttgtaagtacaaccatacaacaacaggttggttgtgggttggggggggggcgtccggataggtgggtgttgaccccctctagcaccccccacagttgtgccactgttcgacactgctggccaagaacttatttcacacatgcgtcttgttcctgccatagcaaagtggtgacatgaagaagaaaatgtcaatgacaaaccaaggttggttttctatgaggggcatcagtaagaagagtccccagtcttgtttgcctccttgatgtggctccatttcttaggtggagggaaaattaatcactctaagaatggttcgacattgtaggttcctatgttaacagtgataaggacaagcgcgctacctggctcaagggacccccaacgatggtttgagcttccctgagactgagagggctcaacatgcttcaagggaaccgttaagtctagctctagctctggctttgtttcattgtgctgccggcaacctgaccaaactagcagcacgtttcctcacttctgtcgaatgtcctgagctctgtataaaacagatgaactcctggtgcctcccaggcctaccacagcatgcaaccttattggccagtcctcataccgccattagctcttagcaaagtgctctttctcatcacaagttttatagagaaaaaaaggaagtacgatctgattacatatagttattcatcattttctgcagttcttttgatcattgtgcacctacaactgcatatatatttttccttttggagatatgacttcaagattagtcactcttcaggttatcattagaatgaccatacatttaagagcaaaatatatggccggttcttaaacatgacagaggtgccacttagctccataaactagaaaaatgcacatataggtccatcatcatggcttgatgaaccatggtcggtccaaaccttatttgactggagttgaccgctgacgtgacattccacgtgggcaagactttctcagccacccaccactccctcctcactatcccgccgatgtggcattccacattggcatcccaataccccgcactgatctgcactatcttattcaccaatgaagacataactctatagataattgatgtatcccaatcccaaaacttacaccctgatccatctttctacagaaaatccaagtaatgtcaaatcatctccctcatcgctacccaacacttcggcttggagtggtgggtggctacaaaaccaaatgaactcaactaataatcatcaggtgactaggcaagtttagaaaatattgccctgattagcatccgtcattgctgtgcacttcatgatggtctgatcattgcatgaggggcactgaatcaacggaacaactaacctcttccggcgactactaaatgaggacgagcttggaggagccatggcggcctgaagcgttgaaccctagttgtcatgggagaaggcgacagagcatggatttggggattttgtggctatccaagtggtactatagtttgaaggggctaactgcaaatatttctccacgcttcattgtggagggggctggctacaaaaatggatgcccacgtggaatgccacataggcggtcatccctggtcaaacgaggtttagaccggctatggctaattaaaccaagatgatggaccttgatgtgcaattttcaagtttatggaccatcaagtggtacccccctctcataagtttaagggcgggccatatattttattcgtatgagtaaattacacacaggggaaaggccaactccgtgtttaagtgccattaaaaagagaaactacattgaaaaaagcactacagaattcctgtctcttgccaaatcctccactcatgcacaactgtgcacacaccccagactcatggacgaggcgagattcctaattggcgcatacgcgccccgggcgcgcaattccggccctcggcccacgcggccaattaggaatctcgtgtaagccgcgtgccgcctcgaatctcgtgggcccttgacgttggtctctttgtacgcttcgtaattgatttttttacaagtggctttctttaaactaacgtaactaaatatgttagttaaggataatgatagtatttacggaattttttttggtagattttttttattaatagattgaaactttttaagttacatttgaaaacttttgacttaagatttaaactttgaagttaaattttaaaaactttcaactcatatttgaaaactttcaactcgagatttgaaatctttcaactttcatctcaagtttgaaaaaatttcaacttagatttgaaaacttttaacccagatttgaaaacttttaacttgagatttgaaaactttcaagtcgagatttgaaaactttcaactttcatctcaaatttgaaaaactttcaacttagatttgaaaactttcaacccagatttgaaaactttcaactcgagatttgaaaactttcaactcaaaattaaaaactttcaactcaaaatttaaaactttttaactcagatttgaaaactttcatgtcaatattttgacaactttcaaatcgtattttgaaaattttcaagtcaatatttgaaaacttttaactcaaaatttcaaaagcaattgtttttatttttattgagagattactgtagcatttcgctaattgccatgattagcgctgatcgttgggattagcgacgtagcgtcattttgtaaacgctacggacgaggaggccgcgtgcgcgcgacttaagatactcgcgcgtgcgcgcgagctagctatctcctggacgaggatccctggaaattccgtgcgttgcacaccttccaaattatgtggggaacgagaatcccacctgcatcaacatgtagggatattggtaggttatgctagacacaccaagtaaagtatcatgtatagttaccactcgacatgccaagcagtggatgaagattctgagcagaccgatccaacaaagcgtgtgtcaacgtagatggttagatagtgtttttatggatgatcgatggttcttaataattcctatatctcttttatttcagaacttatgggtgtgcttgtgatttgacagtgtatcctacctttgtagaggctaggagtgttctctgtgcagttgactcacctggactgttgtatccgtggagtattcggctcttcttttgtaaaagaaagaatattagtggttttcctctcgtagcctcagctgctgtatggcacaaagaattccctacaatttataaattaaaaaaccagcagttcggtttatatgcttccactgtggtccagttatagtttatcatttcagaaattcagcatctttcagaagcctactacgaaattgaccttttgccacaaaacaaattgttgcattattagagccaaattcatggcaatagctatgcattgccacaaatctaaagttatgagaaatgcccaggggttttccggctagctccacaaggtggtgcgatagacgacctgggttcaaagcctcacccctcctaattatttgatattaggtccttccctaatattgtagttttttttttcaaatctaaagttacagtagagttgctagctagccgtggtaacaaatcttaagctacgatagagttttcttgttgcaacgtttattttcatggtgctttctgatttatattgcaatgaattgctgaagtatcgccacaacgttatatcatggcaagaaagtcttatttattactacaaaaccaaaaattgtggtgaaagtataaactattgccacaactcatatgttgttgcaatatgttcgtggcaatagttaacttctcctgtagtgatccatgcaaccatggttcaggtggtcaaatctgaataaaaaaaaaacatatcacaagaaaacaatatatcctaccatatactaccccttactcaatttttaacagcttcttaatattactgaagctcctcaatgttactggcgcaaattatatcgcccctaataaagcagcaaatgtcaccttcaacgtaacacccttcttttgttcattgtgcgtgtcataaaaaataatccgccacaatttaaccagccaatcaagccacaatttttcatcaacaacggaaccgactcacggatataccattttaccatgaaggcctattttgccatggctcctactcccaccagagcctgtgcctttgctctctggcttaacaacaatccccattcggtgaagatgacccaaccacacaagcaggaaggctacgctgagctctgtttcgtgagaagcgcgcggcgtacatcagcaagtgaatttggttgacgttgccagaacaggagggttgatggtgccaggagtgttgaggatgatggctcaaagacaaccaggcagttcagggtgatacggtcaaatggcaaatcctgattcctcccaggccaaccagacaaccagtggctgatctgccttttaacatgtggtgtgttgttcatctctctttggttctgattttttttttatttatggaacatgtccagtgtttgatttatacatcatttgtattcaactctgttactgcagagtaatgcagcacctaccacctgtatatacgggacaataatggtctgatgggtgctggagatatatctcagtgcttatttacatggataattttcagctcggttaaaaagttcagacaatgaaatgtttatggcttattaagtactccttttgtgctcaatatgttaaagactcattaatgctctttctgatgttatgtagtagtaataagcacggaagcaaaacattattcaaaattcataatgcaagagctacttccaccttactagtcatacatattttctgaagtctgaattctcttcgagacaacatcaagtctacccatgccttttggtgattactactcgctccatgcatctcgtactggattagacatattccagtactataaatctggataggggcatgtccagatttgtagtacttgcgtatgtctaatccagtataaggttactatattttgtgatcaatgaagtacttggtagcaaccttgaaccgttacctggaatattaatatggtgccaaacatccatctttgagtgtatattcaaaaccaaatagcagttgatcaaccccaaagtgccatctgtttgtgtgtaaaagaaatataaaccaatcgatgtacacaattatgttttgggcaaaaaggatagatgttgtcgggatcaaactggattattgcagtggcctcgctaatcctattcattgttcgttcatggcgcgcatgtctctggccactggcaaggaacattaatttacgaataaacatcgagatcatatataggattggaagttacaagaatgcgaggactgcgcttgatgaattttccttaacataattcaatcaaggacctaataatgttgatttatagtgtaggagtacttttaagtcactccgggattgtttagatcgtccatttcatagatctaatgtttggtactcttattgattacctcctatgaggtaatagctcttaaaaaaagaccatctgtttttctgcattcgatatttacagcatggcgttctataaggtcagtactaagtgcaataatcttctcacatcctaaaatcccaattataatgtaccagtgtcttctaaggctggccgctaagttgagtgctgcaccttgcatgaatagaaagtacaatctggactcatatggaagtgtcagaaagaaaatggctcatgctaaatccatcctgacatacaaatagtctttcaaaattagcctcgatttttgcatagaaaaatgtcatgatgaatacatagtgattttctttatgggatagtgcgaggtatatttgggaacagagatagattcaagattgattcaagttggtgggcattggacaagtctcaactgtttatttttaaatttttattttgtggcaggtgtcccaactgataaattggtgaacaagtctcaggctctcagctggttgaagcagaacaacccagtaaaagttcagtttgacatatacacagcaggctaccagttttgtccagttcatcatgacaaatctgagaacatcactccatcaatataggtggtttaatctttaaaactaaaactagtaaggtagcccgcgcatacgcgtgggcatgttgtttaatcttgtttgaaattttattattatgaatgtttatgtgtggatgatatttttgaaatattttttactgtattttaaacatatgttcgttaataactgttgggcatattatttgaacctgtatatcctcaaatttattagaaaaaatatgtcacaataatggagttagttcatctatttatattgtgcgtgattctttttttaaaattattggagtttccaaactttatataacattttttgttttgtatgctatagatgactttaagtaatattttaattttattatatattaatgaaatatattttctattaaaaacatagctaatgacgctacttcatctaatcaaagatagacttatattacttatattccttccgtcacataaatcaaaggagttaaattttatcccaaaacaatagaagaatttatatgtaaccaagacagtgattttctaaatataccacgataatctccaaaataccttatcatattttgacaaatatctatattatagtgcatgttcgttcagtgcccggtttgttttccacacctattgtttctaatcacatgagacaccttcagtaatttggagaatacatatgtacatttaaattagtgttgtacatttggcatgtgtttttcacacctaaaatatgagtgaaattttatcataacattaattattacatgtcggctccatatttgtgatgtattttgggctatagatattagtagtttatttatttaaaggaatacaaccggatcacaaattggatatatgaaatttaaataattt

SEQ ID NO: 27815 - DNA, 19310 bp, Oryza sativa
  unsure (1)..(19310): unsure at all n locations
attatcatcatcagattcatcaacatcagaacttgcattacgagcaataaaagctagatcaacaacttgcttacctttgctctcatcttcatcttctggttcatcaaaaacttttatgagttcttggattaaccaacgcatacaatgcttcttcttctccttttccttcatgttcttcttcttgttcacgtcatcatctttgactcttccatcatcttccttctttcctcgcccaagcttaggacaatgcgagcgaagatgatcaagtgctccacactcaaaacaacgattcggttctcctcttttcctgttcctaacatttttcatagctcgagaaaatttgttagataacaaaaccaagtcctcctcctcgaactgttcgagttaatcatcgggcatggcattaaataaagcaagaacagaagacttcgatgaagaagcaccaacatccaaagaagtcaaggaaaaaaccaaagcagtagacttagaatcaactttatgagaaagaatattcatctcatgagttttcaattttgtgtaaagcgaatctaaagtcaaagtagacatgttcacagactcctgaatagatgtaactttcatatcccaaatagacatgtgaagaccattcaaaaagtggcgagaaatctcagattgtggataattagcatcataagaagaatcaacagatctaagatcactcaagattttattaaaccgagaaagatagtcatccaaagcttctccaggtttcatctcaaatttaatatactcctttttgaaaagatcacgacgaagttctttaatattatttgttccttgatgaaaattactcaaagcaatccaaatctcatgagaagtttgaagatgagcaacacgatcataatccgaatgagagatcccactcaataaaagttaccctcgaaatcgacggaagtcggtctgaccgagattgatctgccagtctgaccgactggatgccaccggtctgaccagtgttgaatcttcggtctgaccgccaaagttgcctaccgcgcctgtgatgtgagcgtgtgcataatgaaaactgatgcaacaccccttgattataaagatgtcagtagaacttggtgctataactgttgcatatgcttcacttagaggaaagtatatgttgttgttcaactcattgaatttgatatgagttgattggttgatgactccaaactcccagacatgtaagtttaatcttgacctactactctgaagcgaagaaaaaattgatgactcccagagttgactcgttagctgattaattgattgcttcatcttgacataaagcttgctgaattttgagccatgtatttgtgtagcccccgactctttggttagttgggaaacaactgaacatagagtcaagaattatagcttcttgtcgtcgagtagtcattgcttgattgaaggtatgtgttgaagatgtccaagtagaaatcctgaatattggagagccacttgttgtagtaaaataacaaggcatcatatttggtgacgcatgccgagatgtcgaaactcttgtagtcatcgtggttggtgaagtagcaaagcttgcgaagcagaggcaatagagtttgccggtgccgaagacaatgaagatgaagtagctccaccatggtgacaaagttgtatagccatgatgacgtgaacaggagtcggcggcaacagaaacaaaccggtggcgaagatgcgcagtgatgaagataaaaacaccagtcggtagtagaagaaccagtcggcgtcagacaaggcgaccggcggtgaagacgatgacgtccatcagtaatagtagcggcataaaccagccgtagaggcgagggcaccaatcagcagcagacgagacgaccggcggaaacaccagtcggcggcggcggaagcaagcctatggtgtagatgacgtagacgcccaacaacggtgatgtgaccaaccaaccgtataggcgaagacaccagtcggtggcggatgaggcggccggtcggtgaagacaacgacgcccaataacggcggtgtgaccacccaaccctataggcgaggacaccactcggcggcggcaacggcaagccggtggtgatgttctgactgatccattcctagagcgtaagagataagcttaaagccatgaatcccttttatgcatatctggatctggatcctgcagaacaaatatataggatgagtagtatctgatataatactcgaggaaaattcaagtatttttaaaatgtttataaatatgtatttctcctcttgtcaattttgatttccccgagcggatgactccttatgtttaaacactctgcccgactagtcatagcccccatgcaccgggagtcggcctaagcacttcccaaacatgcatatgagtgacatgaattcgtcattaatggaacaaagtttcacgaatcagaatttactactcgggtacttccgcaattgttaagagcagaaaataaatttatcttatctctatgcttttgatttattccgaataatacttagcaccttgcgttactcggtccatccaacgagcccccagctgctaggaatcggcccaaaggcaactatccatcgataaaccaaacggaaagcataggaagatagaactccataactcgataggtacttttgtacttagattatatcgcaagcaatcaagataaatattataaaaattgtttagaaaatataatataacatctgtagcccccgactcactagtcaacggcgaaccagttgacatagtgaggcagaggaaaaggaaaatgtcatataaagaatgaaataaatgatgacttagctttgtaatattccccttggtgatgacagaggtggccaatgtgggaacaaagtcgtccatcaataacaatgaagacaccggtcggcggcaacgaaggcggttgacggtgaaagcgaagatgcccaccaacggcggcataataggtcagccgtgtaggcagagacaccagtcggtggcgatggaggcaggccgagggtgaagtcgtaaacgcccaacaacggcggcataataggccagccgtgtagacagagacaccagtcagcggcgacggaggcaagccagtcagtgaaaatgtagacgcccaacaacggtggtgtgaccatccaatccgtgtaggcgagggcaccagtcggcatcggcgaacgccaaccgtgaaggcaaagaaatcagtcagcaacaacaaaggtggccgacacgggtacatgcaaaatagatcaatcaacatatgaatctgtttagtaccacgaaatataaatataaatataagcaatgtatgtacatgcaaaacatgcaggcaagctcaattaattaatcaattgatgcatgatcctggcgaggtgtcctgttagttgaatcgtgcatgtcgatagatcaacacatgcatgtgaattgctcttggctgctggtgatcccgtgtgcaagctgtaggcggcgctgcctatagtcccacagtgcatcggggaacacgaggcattgggcagacgcatcgagatgatagccattggtcttgatctcggtcggcatgcaaaaacaggagagtaacacgaggttaatctgtagttagaaaacaatctaactgccgggaagacaaacccaatgaagtttcggcggtgaaggctgccgggagatgacaaagatgcccaacaatagcggcggcgtccaccaacaaccgtggaagcaaagacagcagccggcaaaggcgaaggcgttcggcggccaaacggtgctgcgcagctccctcttgttcgctgtgtgagtttcggcaagaacagacgctaggtgacgtgagtggggccagcgcgatcagcagcaccacagccagaacctatcgcccagcagtagatagcttgcttgatcttgatcgctatcccgtgcacgtgaacaaccaaagctccagcatgcatgcaaaataaacaacacagcttaactcatctgttagtgtacaaataaatattctgtatatagaaggatgaatgatgcacggcatgattatcagttaatccatgcacgcagattggatcagcacgccgtgtgcatgttttattcctggaaaacgacgatgtccgcatggctttcctagtgggcggagcgtttcgtcttgcgcggcggcagcttggccttttgtcaatcggactcagcagcacgcttgattcaaaacaccaattaatctgctgatgtgatccgtcaactggccggatcaatgatcggcccaaaaactcgacatggaagccgaggatgtttacatgcatgcaaagatacagactaaccattgtgattagtactaaaagataaaattatctgaatttgatagattagaacggctaaccagtcgtcgatgaggatcggagctatcaaatttgtcgggactaatttccttgccccgaagggaaaacggatatggtaactcctgagatttgttccatcacacttatcgacgaggaactcgacacgcccctacctggcgcgccaactgtcgaaacataaattcggcaataataaaaggggtagtgcacgagacctaaaagtggatggatgcggagacaagagatttagacaggttcaggccctctcaatgagaggtaataccctactcctatttagggatttcaatccgccaggtgtattataagatctgacgatctagttatgtcctgccccctaaagggcctcctgcccaccttatataggatggggaggcaggattataagatagaaaccttaaccgatacggtatcggttttctaaatctactttacaatcttatcaaaccagaactttaggccattctataatatacaggaaaacgtaatacccaagtcatgatccattacatattccatagttataagttatcccctataaccagtcggataatcatgctgtgtggatatggggtacctataatctccacaatgtgggagtgagttttgtatgtagtgttggtgcgttctacaacaaactgatgtttcattcaatgcatggctttattctaatggcctcaaaaatgccgagtggcaacagcatctacttcctgctctagaggagatgattttttttttcctttcaaacgccgggaaagatgaattaactgaagcacagtgataacgtagcctggtaagtgcattttccaggtatatcaaaccgacctgcgcaggttttcgataaatttaaaggaatctttgcaattttgcatcactgttgattaagcatggaactcagctgggttaatcagagttcattaccactgcaactcatcagtttatgtatccaacaattcggctatttggttcaaaagtatggaattcactcatgagtagatcagagttaatcaagtatgcagttgtagtgggtgggcattaaactccactgcaaaacttgagtcactccaagttatatactcccttcgtcccaaaatataagagattttaaatggatggaacacttcctaatagtacgtgtcccattcgtccaaaatctgatgtctcacctttttctccatgaaagataagatgagagaggccaagttctccatgaattttccccgtgtcgatgaaggaactttagtcaaatttattaagaacgagtgccataagagatgatgtagaaaaatgaatagttacaaggaccaatccagttgggttgatatcgaagggttgggaggcatctgaagttcttgcgttaccaaagctttgctcgattcttcgagatattttagataaaggattatcaaacctgacctctttacatttgtgggggtgtacacagctaaatattcgaacacgagtacataagactttcccttaaaggggtacaaactgcagcaactaacctctcccattacatgagagataacaacacaaaagtcttaagaacaacaaaagaaggaaaagactaggcttcaaatcttccaccaaagttccagtgatacaccgagaagaactccaatacacacttctccagcaacttgcaagagctcttaactgtttcttcatcgactcctttaagaagcaaagaccaagttcttgcccaatgcattcccacaaaaaagacctgcaagaaagatgtagaattggcaccattaaagaccacatctctgttcctacataaccaaattgtccaaagaaatacagctatgcccacaaagcattattctcttgagcctaggttcaagacacaatctagctgtcacgccccgaactagtcccgaccggaactagcccgtgacgctccaatttaacctgttaatcgataccagtcccaggaaacagtgctggtatcacagggagacagaatatcacagcaacagaggtctctttattatagagtagaggtacagtcatgttaggctgcggacagatcccgagctcacaactgcattacaaaagggaaacggaagccaggacttggaccaaacacacaggcgcgacttgggaactaggccgaaaccctaaaactcatcgtagccggcttgctcctggaagaactcctcatcagcaggatctgcttcatcttcttcagcaactgggggggatatttatatagagcaagggtgagtacgggagtactcagcaagccatgggaattaagtgtttaatgcaggcttcaaggaaaggctgttgttttcgcaatttattttatttaaactcttttctaaaaacaactaagtgagtgcttctcaaacgacacggatgagatagtgcgtctcgtccggtcggagtatgtgcaatgtatcagtctttagaattaaaacaaggttggcacccggccaacagcttttcaaacggccacccgggccaacaacttttcaaacagccacccgggcctacaacttttcaaacagccacccgggcctagctaatcccaacagctgcagatttttcaaacatcgaaccccttttcacaacagcaatttcacaagcagtagtcaaacaaaactacgctaggaatcacctcacatccgcccatgaccatgggcacggctgttcgaacagtttgttaacctctgcagagggggtacactttacccacacgacattactaacccgggtcacccaacctgtggggatcagccacgtcgggagacctccaagctttcatgacaaggcatttcgaaagccgacacaggtttaccatatgccgacgagaggggtcccagaccaacaacaggttaggtcccagaccatactgtgccaggaagcccaggggtcctccccgacaccaccccggcgaatccacatgtctctcggcatcaaggctcccctgataagctagttactcagccagaggtgtcccattccacccatgtggtcgtacttgtcttatgtttggatgaaattccaaggaaatcggtccttaagtgcaagagcgggaaaccgtacacccgatacgttccccggtccgtggttttggaaattcatttagttcgtaagcaccgacccaggtgtcgggttttccaaatctttcgtaaaacccaagttttacccaagttgttattcagattataagtttgaaggcgtccgtcgatactcgcacaggatgcacgaatatcaagacgcaactaggtggttacaaggggacatgctgtaacaattaacaaggaaaggatcaaatgcaacaatttaggtaagtccgccaatctgtcttgcagacgggacaaaagattaagtgcgatcctatcaatgcataatatttttcaagcaacataattaaatttcaaatataggctcaagatgttcaaaggtggcttgccttgctcgagatctagagcttgatcctcgaaatcctcgcactgcgggtcttcgggctccgaaactacacgcgaaacgggacaactcaacaaacggcgaaaataaagccctattaatgacctctgagcatgccattagatagatctcgagatttgaggaattttggaagttgaacggagtcaaacggatttatggttgggaagatattgaatttctaagattattggatttttgatctaaaggaaaaaggatttaattaaatcctttttgaaaaagaaaagaaaagaaaagagggaggggaaatagacttttcctcgggcggctagggcgcggcccgagagaaaggacggcttggccgagcttaatgggccggccggcccaaggaggcggcccaagtgcgcgcgcgcgggaggggaggagagagagggccggtggaccgggctcaccgtgcgcggtcccggggtggacccgcttgtcagcggctcggctcaccgtgcggagggaacacgcgatgcatgcgcgcgggcgggggagggacgcggtgcatgcgcgcggtctgcggaggaacggatgcggcgggcccacgcgcagcctcacggctcgcggtggaacgcgcgcacgggaggggctgaccggggtcggcccgtcccgacctcggctgagctggcgccgacgtggcgcctacgtggctgccacgcgggccggcgggaggtagacgacgacgccggccggaacggacggcggacaacagcggcgagcggcggagcgaaccacggcgataccggcgaaagcgagcacaccgggtagttgcacgagacgaggggagacgagccaacggctcggattcgccggaggttgctcgacggcggcggattgcggcggcggcaaccggcggcgggagaagagggaaacggcgacgaggtcacgagaggtcgattcccggcggtgagagcatctacgcggcttcgggaactcgacgctagcgtcgaattgggcggaactacgccgagcgaggccggcgacgggcgggtgctacggagctcgggcggcgacagcggcgagcacacggcgagcaacggcaacggtccgggcggcgccggctaactatggggaggctactcaagctactaccgaaagctagggggaggagatggagcgaggaggaagaacggagagaggcatcaccgagaagaggaggggcgctgtgacgagaggccgacggcgcgggagtaatctctccggcctcgggccggggaagaggaaggagacgagtgcccggagtccccttccacgtccacgaacgcaccggctctcccggcgcttggcgatggacggcggaggcgagacagagcacgggagcggcggcaatggcgagggggtgaatgggagaggaaaggaagggagggggaggctgggggtttaaaggggcggcaatgtcggtttgggaaccgacttagggcggtcaagggcgcgagctggcgctcggcggtcgcggccaaagcggcgacagagaggatgacgccggcgaggaaaaaaaaggggaaaaggagggagaaaaaggggcttgcccctttgcccgattcgggaaaaaggaggggggagcgggccaacgcggcacagggaggagggatcctgcctccgtcccttggcggcttgcgcgcggagtgacggggtccgggcggtacggacgcgagcggtttggaccggcgcgacgacacgggcgacaggcgcgggcaggcgctgccgatgtcggcaaccagacggtcgcccactcggcatgcgcgcgcgggaaataacggccggcgtccgcgcgggcgcgcgcacgcgaacacggcgcgcgggaagcggctttgcgagcggggagctcgcgcgaggggagggggggcgctcggcgtgggcgactcccgcgcacgcgcgcgcggcgtgcgggcagagcggagggggagcggagagagagacgctcggcgcggctctcgcatgctcgagcatcgtgcgggcgaggctgagcggggctgagcggggggagagcgcgccggagaggggagggagcgagagagagagagagagagagagcgcgcccgggagagagaggagagggccgggggagagggggagatgggccgagcgagattcggcccatcgacctcgggggaggcaaaatagacttttgcggaggaattgattttggaaggatttggattcagaattgaactcgacgatagatcggggattgagatcttgagatggcacggacactagacaacaagcaaggaaacaaatttcgcaaatagggtttttaagagataattttcccgctaggcgccacgacggaacgggcgctacactagccaattcccaaacatttgagacatgttgtaagtttgtctaatcccaaatgtaaaaaggagagcattgtctaccaaatgaggaactacttcatttagagtctcaaggtctcacgccctaccgatgagaatggcaagcatatctgcgcccgatgcttcgagataacagtagtgttcttttcttgtcatgtattcgataatcacgtctcatggcaactgacaatggcagctactgaccgtaccatcaaactgtaattagttgaaaggaagtctattggtgttgttgatgaccattcactactataaaacatcaaataggtatcgccactataagtgccggaagtactaaaatcggcacctataggcattttcccaccttcgcgggttgaaatcgaaaaaaccggcacctttaagcaattacaggtgtcggttctaaataaaaaccgacacctattctatatgtatcggttttttaaaaaaaacagaacctttaatattaaaaacaggcacaggttttcttaaaaaaacggcacctacgaattgagccgaaccggtgggccccaccacgacgcgtggaggaaggtccgctcggcgctcgcacgaggagataaggtcttcgaactctctcgtctcatctcgatctctcttgttctctccgctttctctcgcgacaccctccaaacctctctctctctctctctctcatagcggcctggcggaggtagtggcggccgcggcgcctcccctccgacagatctggccaggagcggcgacccggtaggaggggaggcgggggcagcggcggggggggggggtggcgggagggaaggcgacagccggcgggaggggactcggcgatggctcatgtgttcttgtgtgttttgtggttttgtgtgctcatgtgttcttgtgtatgacttgtgtgttcatctcgtgttcttgatgtgttcttaatgtttatttttcgtgtgaaattgcttcatgcatcggctcaattcaaaccgatccatcgagctagctgtttttttttttgcgttcctgaggcctcaaaggtgccggtttgaaccggcaccgatgactttcagtcatcggtgccacctccgtggtgccggtttgcctaacgttggttcccaattaccggcactgattagcttctctgtagtagtgattcagtagattcttggaacatatgctggtaatcaacagtatcaggtgttgacatttgcaaaaaaaaaaattcttataatattttcatcattttttttgacggaaaacagcaggagaggataataatttcatcatcgacagcatagttcgaactgacgacgacaaaattaaatgccaacctcggcatgctcatgcatctccttgccagtatgactgaactgcagacactccttgcacactggcgctgaatttgttgcagggaattagctgacagtactatgtacatccacccgtagccttcatggtagaagccagatctagaagctgaagtcaatgacataaatgagaatttggcaccaaattttcctgataattttaacatactggtagttaatttctcgcacatttactactacataaatcattttaccatgtggccgaaagtgatatttgcatgtgggcccacctgcgttaaaagatctatgaaaattggatttgtgcatgtggctagcgcatccgcatgtgcatgcagtaatttataccgtcctcgtgcaaaataatttcggtgaaaaacaaaaaccaaatcggccgaaccgtaccctgccactggccgaaccctagcccaccctccgccgctggtcatcgtagtagtggcgccgctgccacccaccatcgtcatcgggcctctgaggcccccccgcccccgctctctcccgatgtttccgcctcagccgccggagtgggaaggggagaggaacaaaggagagggagtagaagaggaagagaagagaagagaaggagttggagtggataagaagagagagaggaaaggtttggtggagaggtgtaggagagaaaaggtgcagtaactattgtgtgaggcccatttgctctccgctttgcccacataatatggtctcttaagaggcctgtctaggaaaataagtctatttttacatgctggcctcttaagaggccacgtgcaaaaatacattatcacatataacccataaacctttttctgaaaaatgatttttgtaggcacgaccagttacagtccgcctgcaacctacagggatactcataaaaaaaatgtttctatagtagagattcgtgtctagtaggtcatattcgaatctaccatgcacatgctacctggttcaatggttggttggtgcattctattgatgagctagctgaagatttagttagacgtagttgcaattttgcatagtacagtgatttgaataactctgcacagaaagagatcctactgtccttttttatggataaaatacgacacaagcaagcccaactgtgctacagcctacaagcggaagcggaagggaagagatgatcgaactcctagaatagattatctcttgagaggtaatttttttttaaaaaaaacacagtgcaaacgaagtcgccacatgtctaggatttgaactcgggtgggctggttccaccacaaggaacctaaccagttgagctattctcacttcgcctcttaagaggtagttggtggtgcaccttaacacaactcataaataaaagctcgtaggaaattatataggctgataagacggggaacaatacttcatatgcatatatatatatatatatatatatatatatatagccagatcggttatgcagatcaggaaactccggaaatgcgacaggacacattgcacgtaggcataggaggcatcaggagttgtccttctttcgatccttcatcgccaaggccttagcgatggaattgtcgaaactgcggtatgcagaggagcactcgacgccggtcagacggtccttgacagtttccttctcgttgctaaacttacagtaagcttggctgcttgctgagaatatgctgatgactccatgggacgagaatgtgccatccgtgttcatcgccgtcacgtttaaccaactgctgtcgcttctccgggcactgcctcagcaaggaatagttcagggaggcctgcacactcagcaatccagtttgacctcagtatcttcttcttaagaatgatcctgtgcatggattagtttatcgtttgtatatacatacacagttcctggatggttctgaccgtattctatttcattggaaatcaagaaaactctcaattttgtgctgcttcgtagattagctagctcctaattaaggcttgaacattcaactgatgagatgaacagtttcctattgaagtggtgaattcgactattgtggtaaatttctggtagatgaggtgcatgtgttaactgaaccgcaccctttatgtcttacaactattgcaggagtcatacatgatacacagtgcactactgtttagtgctgaaattttcagttatatcagataattaattaatattgtcccatcttcctaaaggtcgacatgatttggtgtgaattaacggctctggatcaagttaccagatattcatcaacttttccttgtttctcaaccaaacttttcaatcgaattgaacattatatgatcaagcgctgagatatatccagtcccccatcgatgataattggcccatatatacaggtggtaggtgctgcattgaactgcaatgacagagttgagtaatatttcaatcgactgaaatgctgtgatcgagcaaaaaactcttacaggctgacagaaatgcaccgcatttcaagaacagagggcatgcagaccaggccattgccactcactgtgcagctcgggttgctttgcgatgcatatgcttttgtttggcctaggaggcatcaggagtagtcttttcactggtgtgccatcagagtggaaatgggcgtatatgtgcagcggatcgctcaccgcagatgggatgttgttgttgcattaccatgagtaagctgaaatcgttgccatgcagtggccggcgacaacggtggcaggcatatcaatggagtaactatgtgacaggcacaaattaactgtcctccttctgtataatgtcttgtgtgtatgcaaatcgtgtagtttgttagtctttaactcctctgagcagttgttcagattcaaggtgatatatgtttgtttaggacctgcgcttactgatcgagccagcacaattgaggaacaatagtaacattcggaagatgctagaaattgaggaacttcgttatattcaaatgatgctaaaaagtgggggtagattaatattttcttgtgatatactgatatttaatctttcagatttgaccacctaaactgatctcaattctgatggcgtgatggtttcaaatatttcccaaatgatgaactggacaaaaagtggtagccctgtggtcctgatgtgtgcagtcaaactgaactgcaggttttgcataaattgcaggcaatcaaatactgcagccatgttgagattatgacaatagctccagtgctacaaaggctaaaggggaaaactctttttcccttgccaaaaggagagatgaacaggccagttacttcattcaatggaaccgatcagtattgtagtgatgagacaggtgcagaggtgcatattggattcagcggcacaacttgaattactgcatcgatacagattttgcatctatatggattaattttatagtccacgagaagataccgggtgataccacatattatattatagtgtaaaatttgatcacctcagacaccaataggtgttaaaatttacattaaaaatttggtacttctcggtaccttaccaggacaatgaaaagtctcattcatatatattttcatccatgctgcccgttttgttccatatatagaatgatagagatgatcagtcagctcccaacttctatactacaagcctacagagagaatgaagtgttttgttgaagatcggtcttgtgaccctgcctcaagtgggttgctataataggcctgggaagaatcagaatgtccggaatttcccgtgttacgtagttcctccacttggctagtaagatagaaccaaggactaatttattttttctgtgtactcgagaatttcactttgcatggcggcatccatctactgacagtaacagccagtcaagttgtataggccataagttcttccggtgctgttgaactggttgtatgtgatgcttcccaggcgcctagtttggcatgctgaaaataaagacggtagtttggcatgattttacgttttgatattttcagaatatatagatatagtatagtttgatcttatctgtttatgacaatctaggcatgctcagacaactcttgtgtgatatatacccttcaaaaatccaggattttcttagcgggcacaaaccggtaatggatggctattgatgaatcttaaacatactgcacagacaacgccagttaattagccatcaacactccttcgtcttaattttaactgagcttaaaattatatgagtaattaactactgagatatctcaccccatctgatcaccggcccttatatacaggtggtaggtgttgcattccactcatcttctgcaatgacacggttgaataatttacatcgaatgaaaagttgtacaaatcaaagaccagatgaaggtgcaagacagcacatgtcatacaaaaatattttcttccagactgatcgggctacgctagggtgtaggcgtgcagcggggtgctttgacgcatggatgcttggtttaggaggcatcaggagttgacattacacatatagatccacacgctgtcaccatgacagtcgacatagtagatatgcggtgaagatatcgtcgccgccgcttggtgggggctaataattcagcttgccttaagcactcaaggatggtgtgcatgtcctcattgttgtcacgggattggtgaaactgagtcaaggctactaggtcggatgaatcttggtgtcctcaaccctcctgctgtgggcctgtggcaaccgaaaccaattggtggtggtgtgtcaggctagtggcgaattgtgctttccttacatcttttaattactgagctagaagagttgaaaacttcataacatttagaagatactaaaaattgaggaacttcattatatgaccatcatgaagataaaaatataagaacctcactgaaattcagaatttcaggtgatgctataaattgagtcaggagttaatattttggatggacattttttatggtatttcctttttcagattaaaccacctaaactgatggagtgatggtctcaagtaagtctgacatgatgaattggacaaaactggtagcctgctgtgtatatgtcaaactgaaatgttcntaaggtgttcttcttcaagcagttgatgttggaattaatgaatgggccttagcccactcgatattaattctttgaaaatcacaaaagcccacctcatgcgatggcatgcatgtggagtttagtaccaccttgcttattctagaagagggggacctccttaaaagggaggatgccttcctagccacttgaagcatgtgtggtggagagaagaggggaaacacacgcgccctgttcgttcgcgacggctcgccttcttcttcgctcgcgtgtttcgtgccttcgtagacacttgcgaaaagtttcgaccaagcagccggtctttccgtcacctcggtacgtgttcaatatgttgcgcatatttgatctgttcatgttatactgtgtagtttacatgtgtagatctaatgatgcgttcatgctagttttcatctgtaatgtcatgatttatttatggaatagattaaatcattatatgtctataatctcaacaatccaaaaaccttattataggcactgtgattttactatggctggttttgccgatgcactgaggccggataaattcaccggtgtgcattttaagagatggcagatcagggtcactctgtggctgacagctatgaaatgcttctgggtgagtactggcaaacctgaaggagttcttactgctgaacagcagaagcaattcgaggaagccactactctctttgtgggatgcattcttagcgttcttggcgatcgtctggtcgaggtgtatatgcatatgaccgacgctaaggagttatgggatgcactgaatactaaattcggtgctactgatgctagcaatgatctgtatatcatggagcagtttcatgactacaaaatggctgacaaccattctgtagtcgaacaggctcatgagatacaaaccatggctaaggaactcgaactccttaagtgtgtcttacccgacaaatttgtggccgggtgcattattgcaaaactacctccatcttggaggagtttcggtactgcactcaaacacaagagacaggaatactccgttgaggggttgattgcgtctcttgatgttgaggagaaagctcgggaaaaagatgccgcgtctaagggcgatggtgggcagtccagtgccaatgttgtgcacaaggcccagaacaagagcaaggagaaatacaaagctcagcagaccaccaacttcaagaagcagaagaagaacaacaacaatcctaatcaggatgagaggacttgctttgtgtgtggccaagttggtcatctggctaggaagtgtccacaccgcaaggggatgaaggcacctgcagggcagacttctaagtctgctaatgtgaccattggcaacactggagatggaagcgggtatggtaatttacctactgttttttcagttaatcaatctactaattggtaggttgatactggggccaatgtacatgtttgtgctgacatctcattgttttcttcttatcaggtcgcacggggttccaccgtcctaatggggaatgggtcacatgcttctgttcatggtgttggcacggtagatctgaagtttacttcgggaaagatcgtgcagctgaagaacatgcagcatgtcccttctatcgacaggaatcttgttagtggctcccgtctgactagagacggatttaagttggtttttgagtctaataaagtagtcgtgtctaaacatggatattttattggtaaaggttatgagtgcggaggcctgttccgcttttccctttctgatttctgcaataagtatgtgaaccatatttgtggcagtgtggatgatgaggctaatgtttggcattcacgtttatgtcatattaattttggcttgatgtctcggctttccagcatgtgtttaattcctaagtttttcattgtcaaaggttctaagtgccatagttgtgtgcaatcgaagcaacctcgcaagcctcacaaggctgccgaggagagaaacttggcaccactagaactcctacattcagatctttgtgaaatgaatggggtgttgacgaagggtggaaaacgatatttcatgacattgattgatgatgctactagattttgctatgtgtacttgttgaaaacgaaagacgaggctctagactattttaaaatttataaggcagaagttgaaaatcaacttgacagaaagataaaaaggcttaggtctgatcgtggtggagagtttttctcgaacgagtttgacttattctgtgaggaacatggcatcatacatgagaggacgcctccctattctcccgagtctaatgggattgctgaaaggaagaaccgcacactgactgacttggtgaatgccatgttggacaccgcgggactgcctaaggcatggtggggggaggcattgttgacctcaaatcatgtgttaaacagagttcctaacagaaataaggacaaaacaccatatgagatatggattggtagaaaaccatcactttcttatttgcgcacatgggggtgcttggcgaaagtcaatgtaccaataacgaagaagcgcaaacttggacctaagactgtggactgtgtttttctgggatatgctcatcatagcattgcctatagatttttaatagttaaatccgaggtcccggacatgcatgttggtacaattatggagtctcgtgatgctaccttccttgagagctttttcccaatgaaaaatacccatagtggttcg

SEQ ID NO: 27816 - DNA, 18795 bp, Oryza sativa
acagtagttcatcacaaaagcatatgcatctcctgatgcagactactggaaggaggctgtccgtagtgaaatggattccattatcgctaacgggacttgggaggtgacagagcgaccctatgggtgtaaacctgtggggtgcaagtgggtgttcaagaagaagcttaggcctgacggtactattgaaaagtacaaggctcggcttgttgctaagggctatactcagaaagaaggcgaagatttctttgacacttactcacctgttgctagattgaccacaattcgtgtgctactttccctagcagcctcacatggtcttctcgttcatcaaatggacgttaagacagcttttcttaatggagagctggatgaggagatctatatggatcaacctgatgggtttgtagttgaaggtcaagaaggcaaagtgtgcaaattgttgaagtctttgtatggtctgaaacaagctcctaagcaatggcatgagaaatttgacaaaacattgacatctgcaggctttgcagtcaatgaggcagataaatgtgtgtactatcgccatggtgggggtgaaggagttattttgtgcttgtatgttgacgacatactgatatttgggacaaaccttcaggtgataaatgaggttaaatcattcttgtctcaaaattttgatatgaaagatttgggagtagctgatgttatcttaaacattaagctaattagaggtgagaatgggattaatctcttgcagtcccattatgtggagaagatcttgaatcgctttggctacattgatagtaagccttctccaacaccttatgatcctagcttgttgcttcgcaagaacaagagaattgctaggaatcaactggaatactctcaaatcattggctcgttgatgtacctggctagtgcaactaggcctgatatctcctttgctgtgagcaagttgagccgatttacttctaatccgggagatgatcactggcgtgcgcttgagcgagtaatacgctatctgaaaagtactgtggaattggggcttcactatactgggtatcctgcggtactggagggtcatagtgattctaactggatctctgatgtggatgagatcaaagccactagtggatatgttttcacactgggtggtggtgctgtttcatggaggtcttgcaaacagacaattttgacgaggtcaaccatggaagcagagctaacggcactggatactgctactgttgaggcagaatggctgcgtgatctattaatggatcagcctgttgttgaaaaaccggtgccggctatccttatgaactgtgacaatcaaacggtaattgtcaaagtgaatagttctaaggataatatgaaatcgtctagacatgtgaaaagacgattgaagtctgtcaggaaattaagaaactccggagttataacgttggattacatccaaacagcgagaaacctggcagatcccttcacgaagggactatcacgaaatgtgatagacaatgcatcgaaggagatgggtttgagacccatgtgagttatactatggtggtaacccagtctatgtgatcggagatcccgtgaattagatcctgggaagaacaaaccattaataaactagaggagagtaccaatatatataccctatccaagtgaagatgcatatactctcgtgagctgcaaggcaggttggctatgccttaatgagttctgttggctttaattagcaaagatgttgtcctgcagagcattcttgaaggaactcacctttgtgagcttgactgttggtcgcagtctatgaagattttgggtgaatcttctaggaagcttactaaagacctaggagtatgacttatacgctccacccgaggggtagtctacagacggtctagtaccagataagactttgagtgaaacttgcttgcacaagacttgcaattcaaggcgtagtccattgttcaagttgtgagtaagtgtagcttggagttctaggtggatgttcaaccttaattggtctccatcgaaccgctggtatataaacagtacattggaaaaggcaaatctcagtgggattttgagatttggtgggggattgttggaattaatgaatgggccttagcccactcgaagattaattctttggaaaatcacaaaagcccacctcatgggatggcatgcatgtggagtttagtaccaccttgcttattctaggagagggggacctccttaaaagggaggatgccctcctagccacttgaagcatgtgtggtggagagaagaggggaaacacacgcgcgcgctcgctcgcctcgcctcgcctggcagggcagggcagggcaggcggcgcgcgtgcacgacgtacgcgtcgaatggtccgaaaaattggctcctcacccttgcgcagatgcagcctccttttgcagttttgttttgctgcaaattcggattcgtttttgttttggaaacgttccgaaaaatccggtgcgtgcaaacggcgtggagtccggataagttacgcgcgacttatccggttcggttacgcgtagtagagatcgtgcgggcgccctgatcaagcgacccttctctatataaaccgacccgccgtcttcacgcaatatttgcgagatcaatctagggtttgtctcctactctgtactgcgccgtcgctcgtagactactccatcccgctcgccggcgtgcaccggcgatcgggagagcaggtctccggaacctctgtcttcgacgttctgcaccgggagaaggcggcaataaggtttttgggaagcgcttcgcgcgactgctccctgctcgttcgcgacggctcgccttcctcttcgctcgcgtgtttcgtgccttcgtagacacttgcgaaaagtttcgaccaagcagccggtctttccgtcacctcggtacgtgttcaatatgttgcgcatatttgatctgttcatgttatactgtgtagtttacatgtgtagatctaatgatgcgttcatgctagttttcatctgtaatgtcatgatttatttatggaatagattaaatcattatatgtctataatctcaacagttgagacctatttaccaatttatcagttgggacgcctggcaaaaaaaaataaaaataaaaactaaacatttgagacttgcttactgcccaccaacttgaatctatctttgtgccaaaattttgaaagagtacttgtatgtcaagattgtttttagcacgagtctttttctttctgacacttcattgtatagtttccaaacatgtaaggtacagcacacaacttaccagccagcctctgaatacattggtacattataattggaattttaggacgtggcaagtgagattatttcccttattacttaccttatagaatgccatgctataaatattaaatgcagagaaatatttgtttcttttttaagatctattacctcatagtttcatggctgatattctgattttaaattttggaattttggatttttggtcccctggcaggacactctttcaccccaatatttattttttttaatatatagaaaaatgtattatacttcaggtaaaaatgttaaaatttcaattttttccagccaaaatattctgaaatttctccaattgggatcaatcttccagacccaccctcccccccccctaagctttgcataatatagaacacaacctaccgtacaaagtcaaactgaaaaccttggtgttgtataaaagttacaggaattcaaggtactgcatccatatgtcagattttttgaaggctcagagggaaaacactaatactttataaattgtgccaaaaggaaataattgacaacaacccagctacttggtcaaagatatgtgcattgcactgttgagtgttgaatatatagttgattaatcctggagttttaggtgcacattgaactcagctacagaacttaaatagctgcactggtatcagattttgcatttatatatgatatcattttgcccatcttcgtccataaaagatagagatgatcagtgattccaaacatgcgtgcggataaagagaaatgaacagttttagtgaggactggcgcggtctccaaatggttgctatgctaggcctgggaagcatcggaatctcgagtgttacaacagctcacttgttaacttgaaggactgtgtactgatgagtttctttctgttctgtactcaagaatttcattttgtttagtggcaaccatcattcgaccctagtagccagtcaactcacataggccgtaacgttcaccattattgctatatggctgtagagatgaacttccattagatcaagaacgtgctgaagaatgaacctacggttttgcacaaatcgacttttatttctacatttccagattagacaacacattcttatcttagtttgttttattaaaatctaggcatgctcaacttttgttgagtgaaatgataaaatgaagagcagtggcagccagcagcctgctagctgcacgtccaaaactaagctgctggtccctccatccaccggcgaggcggcggtcttcaccaaaagcttcgttcacaccatcccaagaacatattgcctgctacataacactggaaaatgaataggtttagcaaggccatgctaataatctagtttcatcccaacttctatcctaccatgcccaaaacataattgtgtacattgattaattagtttacatttgttatatacaacagatggctcttttgagtttatcatctgctttttgattttgacatacactcaaagatggcaaattagttttctaaataactgttcagagtcgctacctaaaagtattaatcacctaaaaggcatgaccttgaagttctctctctctctcttgcaaattcagatttcagaaattaccgatgactagtaaggtgaaagtatttcttgcattataaattctgaataatgttttgcttcagtacttgttactacttacaattaataatagaaagaacattaatgggtgttcaacaaactgtacggagacagatatattagtgagccatcgacatttgtttatctaaaccttttaactgaactgaaattttccgagtaattaagcactgacatatcttcaggacataactattggctcatatatataggtggtaggtgctacttctgcattccactgtagtgacatataaaatgatgtataaataaaatagaatcagatgaaggaccaaaagagagatgaactacaccgcatgcatagagacagatcagggacactgagattcaggttggcctcggaggtatcaggatttgccatttcaccatcaccacccttactagtagcccttcttgatgatcggtccgtacatacaaggcttcttcatcttcttcatttgtttcctcattttctaattcgacatcagttgtgggtggcggttgctcgtcgggttgatcgtagtcttcttcatcaacgatattctccattccaacaatatttagcttgcctacgaatacaacatgatgtggtctggcagatttcgcaagtgatgggtccttgacatataatatctgcttaaaggatttcgcgagcatgaacggctcatctttgtagccaacatcattcaggtcaacgatgatcatcccgtgcttatcaaccttcaaccctcttggaattcttacccacttgcatcggagtagagggactttgaggactctgtaatctagctcccaaattgactctatgaaaccgtaataagtctgcttcttgccatcatcatcataggtgtcaatgctacgccactgttttgatttgtacttttgttgtcctgggccttggtgtcgtaaaaagtatacccgttcatgtcagccttggtacgtgtggattatgttggatggcccccgagataaagagaacagttggtcactatcgatgtctgcagttgtcaggtactccatcaaccatttcccaaattgaagtttatgcttcttcacaagccatgcctcggattcctaggattgtctctgcagatttcatccaagtgcatgtccacgtatggagccaccaaagccgattgccgtaacactgcaaaatgggcttgtcttatgttttgtcgattggggttgacaattctcttgtggcctaatgttctttttccaaacatcctaccctagtgacggtgcacaattacaccaataggttgcagatccatgtaatctatacataattcaaccataaccattgacgatgctgtttttttaaaatatctattacctcatactttcatggctgatattttgattttaaaatttgggaaatttgggatttttggtccactggcaggacatctttcaccccgatatttatttttaatatagaaaaagtattctactttaggtaaaaacgttaaattttcaattttttccagccaaaatattctgaaatttctccaattggaatcaatcttccacacccaccgtcctcccctcttaagcttttcgtaatatagaacccaacctaccgtgcaagtcaaactgaagtgcttggttttgcatacaagttacaggaattcaaggtaatgcatccatatgtcagattttttttgaaggcttggagggaaaacactaatattttttaaattgtgccaaaaggaaataattgtcaacaacccagcaacttggtcaaaggtatgtgcattgaactattgggtgttgaatatatagttgatatcatggagttttgggtgcacattgaactcagctacagaacttaaatacctgcactggtatcagatttcgcatttatatatgatatcatttagcccatcttggtctataaaagatagagatgatcagtgatcccaaacatgcgtgcggataaagagaaatgaagagttttagtgagcattggcccggtctccaaatggtttgctacgctcggcctgggatgcatcggaagctcaagtgttacaacagctcacttgttaacttgaaggattgtgtaccgatgagtttctttttctgttctgtactcaagaatttcattttgtttagtggcaaccatcattcgaccctagcagccagtcaactcacataggctgtaacgttcaccattattgctatatggctgtcgatgaacttccaatagatcaagaacatgctgaagaatgatccaacagtttgccacagattgacctttattttgatattttcagattagacaacagattctgatcttagatttttttttttatcaaaatctaggcatcctcaacatctgttgagtgaaatgataaaatgaagagcagtggcagcgagcagcctgctagctgcacgtccaactgagctgctagtccgtccatccaccggcgaggcagtgaccttcaccacaagcttcgtccacaccatccaaaaacatgttgccagagccggcaaaatccctctctgatggccactgctacaaaacacaggcagatgaataggttttgagaggccatcgtaataatccagtttgatcacaacaaaatctatcctatcatgcccaaaacataactgcgtacgtcgattagtttatatttattatctacaacagatggctctttggagtttataatctgctgtttgattttgaacatacactcagatagaaatttggtaccaaattaagttttgaaataactgtttagagtcgctacctagtagtaatcaccaaaaaggcttgggcataccatgaagctctctctcttgcaaattcagacttcagaaattacccttgactagtaaggtgaaagaatttcttgcactacaaattctggataatattttgcttccgtaattattactacttacaattaataattagaaataacattaatgggtctttaacatactgtgaagacaaccaggagcggacccaagtctcgagccacctgggccgtggcccgaggcctagtactggaggcccaaggggatagtttattttccaccatgtattaatcatgttgggccatattctccatgggctggcctgagccttgggccagtcttgggtccgtccctaaagacgatgatatagttaatgagccatcgatatttgtttgtcttaactttttaagtgaactaaaactatccgagtaattaagcactgaaatatcttcaggacaaaaccattggcccatatatacaggtggtaggtggctgctacttctgcattccactgtagtgaccgataaaatgatgtataaataaaacaaatcagatgaaagatcaaagagagatgaactacactgcatacatagaggcatacagggacactgattcagcttggcctaggaggtatcaggatttgccatttcacaaccaccaccctgacctacccggtccagacgtacgcatgcagttgatcagtcaccacaggtgctactgtccttgaccagggctcaagcttaaccctcctgcaaggcgtcctcaaacctcctgttgtggcaatgaaaaccaaataccgatggtgtgttcgactaccaccatattgccatgctgacgccacctctcatgaaaccaagctctgtctagtatttataattgtgtggcgggttcaccatagctggccggggaatcgtgttacgccggtggtcaggcacaggttaccggggataggagcaatgactaagtagccccgtgtggcaaatgacagatccgtcagtcggcgccgttgttgaggtgaagttcagaagttgtagaaaattgagtaaggtggtaatattttgtacagtggcaaccatcattcgaccctagtagccagtcaactcacacgagccgtaacatttaccattattgctctatggctgtagatgaacttccattagatcaagaacatgctgaagaatgatccaacagtttgccacgaatcgactttcatttcaatatttccagattagacagcacattctgatcttagataaattttttttatcaaaatctaggcatgcgcaacatctgttgtgtgaatgataaaatgaagagcagtggcagtcaacagcctttgctagctacacgtccaactgagctgctgatccctcaccaaaagatttgtccacacaatccaaaaacatattgccggcgccagcaagtcccctctctgatggtcactggtacataacacaggcaaatgaatatgtttggcgacgccaccgtaatactcaagtttgatcctaacgacatctatccgaacctatcatgaccaaaacataattgtgtacatcgattagtttatatttatcctatctttctataaagttaaggcccactacatcgtaaagctcaacatacaaagatgccacatcatccactaacatttactatatctcaaatctcatgcaagcatgctaatttattaagttttagagttttaaaatgcaagcattaattaaattatcatcccacgtaatctatctatctattatatactaaaagtccattaaacttcctacaaacgctctcaagttaccacatgacactctaataaattagagaaaatcctgtaaattctaagaaaaaagcaaaacatctacctcttgattttcacttaaattggtgggtccaatattatacaccgttagataaaattgatcctaaaataaaccaaatactatgggtcccacctaactcacgtacgtacatgggtatgcagtacgtacgcctccttccaattattttcgtatgtagtatgtacgcctccctccaattatttcttcctttttctctcttcttttttccatttatataattgatatatatattttaaataaacataatttacaaacaaagaatataccatcatataattctttataaacacagttaactaaattagctctacaatctttgaaaataaaatttacaccattatatgtttacccattaaatcaatataatttccaattaaaccagtgtactcattattatttgtactatttttttcaaataatacactattttaaaataaagtttacacaattataatgtgtacttatcaaataaataatttaagatctatattaactaattatacgtgcacttaaacagatggacccattatttaaatcatggtatctattttttttattaatttagactattattctcaaataatgtactattttaaaataaattctacaccatcatattgtgtacccattaaattaacaatttaaaatatatattaactaatttacatttacactagaaccggtggacccattatttaaatcaacagatctattgttaataactaaagtgtccaaagttctctttttggtccgctgcacaatgcacgtctacacctttgcctttcgcacgtgtgacaaagtatcgtgtctgaggcatcttaggtgatcacgatcgctgcaacgctaccgcttttgttaataaaaaatcttaagccaccacatatatatcaactgttaaagatttttagaatgagaaaacaacgagttctcacctacattatttagaaacattagaaaaacaatgtcccctccacctccctctccaatcacatgtgcataacactgttacactgccaacccatctctggctcgagttgtatgctattcattcctctccaatctcctccctattttcagcataatattaacacatattaatagaattcgtactaggataagagtaataagggagttttaaggccctatttttttattgattccatcttttgcattttcgtttgcacgctccacgctttttcaagtttataaatggtgcttttcttaaacgactttttaactatttagaagttaattcatttgtttataatctcaaatagctatcacataaatcagataattcatcaatttcagttgtcctaaaccctaagtagtacatatttttttcgtacgaatcatggtgatcaacgaataatcaaagtggtaacatgaatcttaagagctactatgaacaattgcaaatatgtgtcaaaattatttgctattaattagacatctaatggtttgctagcaacatatttaatttctctctacatgtatataaacatagacaaagctagaatgaatattaacatatatcccatacatatatattacatgttaatattctcattacatgtggtaagtccattaaaatttcaaataccctcaagctaccacttggtgctctaataaattagagaaaatattagaaattctaagaaaaaaagcaaattatctattacttgattttcacttaaatcggtgggttcaatattataaaccattagattaaattgatcttagaagaaactaaatactacaaggtcccacctctccaccttcgatacgcacctacgtacgcgtgggtacgtatgcttcccctcccttttatcatttttccctttcttcttttcttcatgtatacgcttctctctctttcttactatatcatgcgccttcatgagacgatttaatcacaagaattttgagtatcttgctctcacatttttaatttgtagccatactataagcaatatatagtttattatttactcaagaaaataacatgattcaaaagtcgtaagtacttaatccatctcctacttaaaagtttgtgaatggatttttaagataccttaagaaaaatagaaaccttaaattattataaaataacattatccgaactttagttttcccttaatctatgagacaaaatctttgaacaaacaataaaaatcttacctttcaataatataagtgcccgcgcatacgcgcgggccatcttcctagttcacataatatttcaatatatctctacatcactttttataatatcctatacacctatatagttcatcctcatttaaattttagagcttaaaaaatccaagcattttaaatcatcattacacataattctcaaaatatttcaatatatctcaccatcattttatataatatctatatacctatacaatttattcccatttagttaattttatttctcttctctctcattaagccatatcacctcaattatttctaacccttaaatgattaatctatgggtggaattatctccctcattttcttctctcataaagccacatcatattacttttaaatttggctcatcattctatatactatttaaattatgataaatcacatgaacttatgtaagtttctatcatctagctatcttacacattatttatatttattattatcataccaaactcccgcagcaacgtgcggggtttcacctagttatatacaacagagatggctctttggagtttatcatctactatttgattttgaacatacactcaaagatggaaatttggcaccaaattaatttttcaaataactgttcagagtagctacctagtagtaatcaccaaaaatgcatggtaagaccttgaagttctctcattttcaaatgcagacttcagaaattaccgatgactagtaaggtgaaagcaactcttgcattataaattctgaattatgttttgcttcctacttattacgactaaaaattaagagatttgctccggtccagcaaaaagtatctcgagctaccggtatctcatggtaccaaatcatttccgatcgtcggatctatctgggcaggattggtattgttagatgcaacgatcgaaaacgatttggtaccgtaacgtaccggtaccttgagctactttttgttggaccggagcaaatcttaaaaattaatatcagaaagaacattaatgggtctttaacatactgtgcagacgatgatatatatagttaatgagccatcaacatatatatatatatatatatatatatatatatatatatatatatatctgggtgtacgtactcctgcttgtatcagccgtccatctgtgcacccccgatcgagttatcgaatccacctatgacctatcggacccgttttcatttttgtggagaaaagaataatcctagtaaatctgcaattatcccacagggatcggaactatctcttttaaaactctgttgtttaccaaactaaaccacaaatcgataaatcggatctgagggcgaggtcgcaatctacgggagattctggggcgacggcacaatcaatcggcgactcgacgtcctcggcggcgattcgctgccgtacgtccacaacgtggatccgtcgactaccatccacggtgcagtccatcagcaagccggagtcgacgatgagatcgacgacaactcggtgtcaacggaggcgaagagttcaacgtccacggcgaagctgcgatccgtcgcgacagcccatctgcaagccgaaggcgacggcgccatctccatccgcacgaagaaagcgaatcccctccaaccgaagatcagggcagcctgcctacccaacgaatgccaggagttgcctggtagatacgggcagttctgttctttctgattatctgatatgttttgagattatcgatctggttgccgcatacatataccaccatctcttcttaactacacactccattgaatctcttcttaattatactaaagtaagagatcgtattatgtcaggcaataagaaaatcgttccaaaattcagtatgtttcttttcattcttgctcatcgtattgcatgcttgcagcaactgctatccagttctttacgtctaagctgaaataaatccatgttagaaccaggtgcataggacgctgccaaaaaaacactggcaatctcatgcatacgtacgttctggtcttctgaaattaaactagaatcacctttttgttttgtttttttttcgacgaaactggaatcacttggttctgaattttgtgaacacggctgatatacctctgtatctcctttttttttcaatgtatggactacttctgaagtcagcagtgtaccacttctgtgaaaagcatatgctacttccaattttccaaattcatgcatatttcaggaaaggacccatgcaacatttttagtcacgccacagcatgcatgcatgtatcggccaagcctcaaggatgtactgctgcttaaaaaaatagtatgtattccaaaaggtagcatatacttctctataataaaaatgatagtatatactaatataaagtagtatatacttctctttaaaataaagaagtatgtggcagcacatacttctctacgtaaaaaagtagtagaaaagaagtatatggcagcatgtacttctctaggtaaaaaaaacaagtgtgtggctgtggcagcatatacttctctacgtaaaaaaacaagtatgtggctgtggcagcatatacttctctatgtaaaaagcaggtatgtggcatatgtacgtatctagctaattaaaagaagcagcacgaacctcttaaaaatgcagtatatgcttataatcctcgtgattaactattaatattaatcatgaatatactagttggaaagaaaagaagtatgtactaacatactacttttaaaaagtacatacttatactgcaaaacaagtatatatacttctacaacaagtagctaagtatatacttttaatgagaaaaaaaggtatatacttccaacgagctaccattaaattttttgaacctagtcgtacgtacgcaccggccggtgcatgcagataatttgaaaaaaaaacaggaatggtgttttctttttttatctaattattcattatgaactaatggatatccattaagaagagggagtacatacacctgggagtataaaagagagatcctatatatatatatatatatatatagacacacacacaggtggaaggtgctgcttctgcattccactttagtgacagataaaatgatgtataaataaaaacaatatgagatgaaggaccaaagagagatgaactacaacacatgcatagaggcagatcagggacactgattcaggttggcctaggaggtatcaagatttgccatttcaccactacaaccctgaccttccgggtccgaacatacacatgcagtttgtcaatcatctaacgtgcaattgtcctttaccagggctcaagctcaaccctactggcatcctcaaacctcctattgtggcaacgaaaaccaaatgctgatggcatgtccaactaccagctagcgtattgccatgttgacgccgcctctcatgaaaccaagatctgcatagtgttcctgcgtgtgtggcgggttcaccatagctggacggctaattgtgttaagccggcgggcaggtacaacttgccgtgggggtaggagcaatggctaagcagcatcgcggggcaaatgacagatccgtcagtcggtgccattgttgaggtgaagttcagaagatgttaaaaattgagtaggggggtaatatctggatgtgtaattcatttcttgtggcatgttcttttttcagctttgtgaaccatttttctatggctccattctcaaaaatgctgaatgtctgaaatgatgaactacaacttaacacattggtaacgtagcctggtaagtgcatatcaaccgaactgcaggtttttgaaaaattatagggaatcaatccttcaagccagagagcagtagactatgagaggacaacgactaatattatttctgtgagaaaaggagagctaaattctccactggtccaacaatcgaccacttggttattattgagagaaattttacggtcctggagaaaatacttcgaggtacctaaattttacacttaaattttttgttgtctagaatgcaggtcgtgaggaagatggcgatagaaaaggcgactagcgtggtggcagcagcgacggcggcgtcacgaggcggcaccgcctcgccgaagagcggactttcctcaacggcgaccccgtggatgggaggtgttctgaacgtctcaactagcgggaggcggggctgggatacccagggtgttcgagcccaaggtaagcccaacactgctcatgcggtttggcgggttcatggtggagggatccgacatgggtggtccatgcgggatttgcttctgaatccgattgaggaggttgctatccccgcaaggtgggtctgggtcccgaaggggaggtctctaagtccgcagctagggtttccagctaccaagcgtgaaatagggcgatttggggagaaggcgacgccaatttggaggatcccggcgaagttggttgacgggagttccttccttgaagttgctaaggggagtggagagatggatcgaaagcctcagcctcagcgtccggagcaatgggtgcccaacaagaggagggcttttgaggaggaggggggggaattgggggaatcgaaactttcaagatagggaggagtgagagttgcggtctcgtttgatggggcaacaacagcagcgcgagggaggaggatggcagcaagttgacaggaggggggggggacagatcttggcaaggggagaggaacagagatggagatgcctgggaaggtggtgacagatgatttttcagaggaaaggagaaggttggagaagtggggagagcaggagcgatgcagaaggaagagatcaaatgtttcaattgtggggaaagtggtcatcatcaggtgaattgtcagaaaccccctctatgctatgtgtgtaagaatccgggacatatctcatctcattgtcctgctcatggtggggggagtagttctagtgatgggaatagagtggctgttaagttgaagggttttggtattcctgagcagggttttttcagcttgaaagtcgatattcctgatatggaaaaagtggctcagtttagagggattcttactgttgaaaaaggcaatgggtctgttcagaaggtggctactgaaatgtcccatttgttcaaggaaaagaaatgggattggaatgtaaaacaaatcagtagcaatgatttcctgattgatttctctagtgaggatgaaaggaggcaagtgaccaaattcgggggttttgtgtttaagacttcatccattaaggctagtgtgatagattcaaaaatgacagacagtgcagtggatgagctgtttgtagtctgggttaaagtgattggtctaccaagctttgctaagaaacatgatattgttagggccatctctgacattgtgggggagtttaaagagattgatgaagaatctctaaaaggggaaggagctgtaagggtaaaggtggggtgtttggatcctaatgccatcaattactcagtgattatctacataaatgatattggatacaagattaaataggaggcagaggttgaccatgatggtactggctcagtagaagggggtgatgaggatgatgataatgcagatgatctagatgatgactaccctcctgggatggggggtaaaaaggatggtaaagagaaaaaggatagtcccaagaaggagtcacctaaaggtacagatagtaaagggaaagggggtggcaaggttcaatctgctccccctgctctaaggagagccacagagaccatgcagaaagcctttaccttgccggtatcaattgagcctgctgaaaaggatgttggtaacactgtcattgaggtagggaaagagggggaagacaaagcagtagtgctatggaagtcagaagatttctctcaaccagatatttttgacaaagatgtctcaggaggacgacaaaagtaatgatttgttgaaaagaatggatgtggacttaaaacttgggggtgtgaaactatttactgatgaagaggaggagaaatgtgcaataccaactgattcagacattgagatgatgagggctgaagaggatgaagacaatgagaagtttgtactagatagtgggatgggggaacagaacaagggagagattttctaggaagtcaagaagaagaagaagaagaagcaagtcttgcaaacacagagacaaagctctagagttaaagataaggaagtccccgtccatctgaaagctgaactcaggaagtcgtatatcaactcatcttcaggtttggtttctaaaaatccttatgcaatctttcattctgttagtcaagatttccttctaaaaattgccaatgttgggagggtaaatcttggtaatagtagtgatgaagttaattctaatcttgatgctataagggccagagaattagcacaagctactttatttgaagctgaaaagagaatgtagcaactggccgaaaaggataagggtgagggtgagaagggacaggagttttcagatgaggcttgcatggtgcatcaagaggttttggtagacaatgtggaagagaatctgagtattccaggtttggaaagggggattggctctatgatagatgagagtgaaaaggggtgttctgatatttgtgaggtatcagatctttctgagccagcaggggggagaaagaaggaaaagagaggtaagcaatgtggtcaaaagggtgttgacagaaaacatgtggcctgggagatcgcttaactccagtgcaggtccaaagctcgccttcggatgttgttagtgtgtcagttgatttgatcctgtaatcaacaagaaatagaagcaaagaaaccgtggttaaatctataaatgatagccgatcggctaggtgccgatgacatatcatttatctttgagccgatgtcatctgtgtatcgatcggcagtcatgaataagtaaagaagaactaaatctactcgatcggctgtagatattaacgatatatactccttatatcgatgtatacttaaatcaagtgattgggatagatcggtcaccatgccaagacagtataaataacttagatcga

SEQ ID NO: 27817 - DNA, 14687 bp, Oryza sativa
tctaacaaactctaaaataacaataagtctttaagacagacttttgcccacatttatctataagaaatttacataagatatcctaattaatagatacaattgcgttcccgggactccatccgtgtgtggcaatcatcctgaagtacattaacttgaacccgatgtcgcgtacaagtcgtattgtcggaatcggccgtatcggcttgcttagcccgactcagacccagccgatcctaatagtagccgatctggacttgagccgactcctgctctgtttccgaactcgatctccgcctcagacttcgctttgatcaaatcttctgtcctgacacagatgttaccaaatttggtcattaacacatgcccccaagtccgggatatttgataatgttccggatttgccatgtaccgactccgagcaagtttcgcactccgccgcttttgaccgttattccagcactttaaatactaaccgttacccccgagaaatctcacgccgtgacttccgttttcaccgctcaagcgaaacctcttctctctcttctccggcgattcccccggtgcaaaggcgatttctaggcgacttcctcctcaacgagatctccgcccgcaccaatgttgtcttccgccagcccatctggtgcgccatcagtcgaaaacactgaggtaagttctcatcggctaaatccccttccttagagcagatcgattttatcctacctcatattgctttccttctcttggttgcctcggatttgtagcatctttcccaccaagtcgcaattcccagtctgacgcatgaaaaccactactttctcggcccaatcggcaatcctgaccccaccgagttcattattggtgaatccaataggatccccttcagattaaccaacccagatctagctcactggaagaatactttcaagtcctggccgtctctagagaaagttccaccagaaaagagctaaactacatggttcaaacgtgtatcagccagcaagagggtccactgggatgaaattggaatcggccaagcacttgattttactatagcaaactcggccaaagatgaacccctgatagcagctgcttcttacttctggtcaaacactattaatgcctttttattcaatcaagggctgatgacccaaactcttatagatatcagcatgatcacgggtttggatgtcacctcatcggccaaccctatgagcttgaacacaaagaaccaatatgacttcaagaccaaaagcataggaggttggtcaggctatgtagcggcatatatggatcagggctcggtcacccctcgggaacatgtggccattttgttaatgtggctagaaaaatttcttttctgtggatcaagttgcggccccacaaccaactggcaatttctagctggagctctagaaacaaagagacaattttccttgggcaaaattctcctcggctatctataccagatgttgaacaatgcatcggctaagatagccatcggctcagtggttggagcaggtagaccctggtggctgctacgaacctggttaaacctgatagttatgaaggttgtcaatcggccatccgtatcagaagctgagttcccaagactagagccgattgtaggggatgatggagaagagcgtactcatcagagatgcacatcatacggagaatatgcttctacaccaactgatgccggggcaaaactatcggctgaactgctcaaagattggttctgcagcttctatgaaggctttcaaaaagatgctcgagtttggttcctttatgaagattctacagaacttgagcacccactagacttcagattcgaagacatcaaccacgaaatataccaatcgtctagggagattttctcagctgcaatcagcccatgcatccttcctgttggcattcatcaaggaagaaacatccaagcttcttacgaattctatcatccaatgagctcagctagacaacttggaatgggccaactcccaattggcttattctttgccgacaagatccaatgcggaggagaaatttcatcgaccttgatgatggatcggctactcaaccttcatggaccccctctgggcagtattgacaacatagaattggcaatgttgagaaacaaaaactttgacagatggtggggtgaatggaagctgcatctattccaccaaccagcttcaatgtatatgacagacatcttcccagatgttgtccctcaagtaagtctttaactccacttgatttaaatagctgtttggccgattaatctcaactaatcctccttttgatttgcagacaacagaatcctctcctcgccgtcaaagcaacagtggtaaggatatccaatatgccccaggtttaattcctaacggaggtgggctatctcctccggttattggatatgatgcccccaagacctcacctcttcttcaagggcttatcagagaaccagctgatgctggcaaaaaaaggaaaaccagatcgtcggctgtagacatcgcagccccaactaagaagaagaagacaaagaaaaccaagccagccgatgatctgcctaccctagattcatccattgaacaagctctggatgaagagataattgatgacgaagttgatcaggccgcagtcgaagtaagcgatactgaaagaacaccatcggctttgcccaagcaaacccctccaactccttctgctcgattcacttttcaagggtaaatatctctctttaatccctttcataattattttgtcttatagccgatcattcccaagtcttataattgcagaaaaagaagactgcggtgaagaagaaatcggctacaacaacgtctaaaccagctctaccagtaagatagttttaactttcattagttaatttttagccgattctggctgacacttgttttctttcagccttcccctcctccttctcctcctgtacaacaaacatcaagtgaccagaccccttcagctgtggggagtcatcacgtcgaggaagaagaacaaccagctgctcctgctatcccagtaagtttctttttgtctcaacaagcattcagattggctatgactgtttctaactgcttctaaatcgttgctgcaggtattagccgatcttttctcttttgacatcagagactatcttgatgaaggagaagaagataccacaagaaaaaccttagcccctttatctgatgatgtgaagaaaactctaggaagaatcttggatcggctagaagcatcatcgctagatagcctggtggttgattgtggctcaatcagggctcggctacatgagattcaggctctaatcccagatgagttagccaatatcctcaccccagccgtttaccttgagcaacaccaatttaaactggaaaaagccaaattaagactagccgaacggcgagagcgcagggatattgaggccactatccaagctaatcgacaacttgtgcatgaagagaaatccaagcttgatcaactatctgaaggcctaatcaagtctaatattgatcggctcaaggctcacaagattgaactcttagcacaacttgaagaatgcaacgctgagctggacatggaacacaaaaaactagccgatctcccaaaatctattgaagaacagaaagcaagactcaaatcggctatcaagcatgttgctgatctgaccaagtctctgaaatttatccctagaaccgacgctcaggatgcttaagccatagaagaagtagagcagattaggcagaaggctatatcgaccatccagcgatacttatctcaataatttttgtgtaataaaacttagaatttttgtaatcggcgaacactttactatctttacaatcctttgtgccgattaatatgactttgaaatgtgctcaaaatttttgcactgcattttgatatatatgtgcccccctagttttgcaatgtcaagagcattgataaaattatataacaactaagggcgatataacaatatcggccattgtacattggcaaaccacaaccgagtacaccatgaaaaacaactaagggcgatataaccatatcgacacaaccttataaatctggaacggtccttcccaattcggcgaccatttgccgaatttactatgacgagtaccaatcggcaaaatcaacttccatacaagttcaccttccgaaaaatctttaggtaccactttcttattataatgccgagcaacatgttccttatccttggtaacctttgccagggctcgcaatcgcgactgaaccagatcctcgctctcatcagccataaggttgtaatactcatcggctgttaaatcgttttgcaactccgttcgtcgagagccgattctaacttcccatggcaaaacagcctcatgtccataaacaagccatcctataagaccacaatgcttcggccaaccgagtatgccattgctgaggataatcagaaattttccgcttaatgaatttgatcaaacttttattagacgcctcagcttgcctattagcttgtgcataataaggtgaagaattcaacaacttgatacccacactatcggcaaactgaacaaactcatcggacacaaagattgaaccttgatccgtagtaatagtttgaggaagaccaaatcggtagattatatgctcctgaacaaattgactagcatccccagaatcaactttcttcaaaggaatcgcctctacccacttggtaaaataatcagttgccaccaatataaatttatgtcctttactcgatggtgggtttatcatactgattatatcaattccccaacctctgaacggccatggcttaataataggattcatagccgacgccggtgctcgctgaattgctacgaacttctgacaatcctaacaccccttataatatctgaaacaatcctccagcattgtcggccaaaagtatcctgtacgccgaagcaaccacttcatcttgtgagtcgattgatgagtaccacagatcctctcatgaacttcgccgattgcaaccttagcctgatcggcactcaagcacttaagtaatactccatcaattgtccgataataaagctcgtcatccaacagtgtatactttaatgccttatatcttaatttcctagaagccgactgagatagattactcaaatactgatgcacatcgtacctccaatcatcggctgacattgctgcaatttcaactttaacatctttgatcattagcttataccccgactccccttgagctaaatcattagcttcaagattttgttctcgagatacatgctttaaagtaaccagccgaaactctttcattagttccaagcacttctcattataaaccatcaacgtatcgttcttgcattcatattctcctgccaattgactgattacttgcaatgaatcccccatgacttcaatggtatcggttttaacttccttgagtaattgcaaccccttgagcactgcctcatactctgcttgattattagtcgcatatggtttaatagtataagcaaactcgaaacatgcccccctaggggaaattataactatgccgatgccacaaccatgagtacgtaccgatccgtcaaagaataaagtccatggcactatctcaaccgagccgattgaatcttcacgatgctctacaataaaatcggctatagcttgtcctttaatcacttttggtgattcataccgaagatcaaactcagtcaaggaaaatatccactttccaactcttccctttaatattggagctgatagcatgtacctgactacgtcggctttgcatataacagtgcactcattagataatagataatgcctcaaccttgtacacgaaaaatgcagacacaagcataacttttccacaggagaataccgagtctcagcatccaagagccgtcaactgagataaaatacaactcgtttcttcccttccaactcttgaatcaaaaccgagccgattgactccttaccagccgataaatataacctaaacggtattcctttctgtgaaggaatcaaaacaggaggagagctgagatactccttaatattatccaaagccttttgcttctctgccccccaagtaaactgctgatcggcttttaacctcaataagggtgtaaaaggttccaaccttccggacaaattagaaataaaccttctaacaaaatttatcttgccgatcatttcttgtagctctgtcttattttctgggggctgaatcttcttgatcgcattaacgctcctttgggttacctcgatccccctttcatgaacaagaaatcccaaaaactggcgggtcgacacaccaaaaacatattttgttggattcatcttcaagccatatttcctggttctctcgaaaactttccttgaatcggctatgtggtcctccacttctttagatttgacaaccacatcgtcaatataaacttcaaccaaccagtcgattaaatcatgatatatataattcatggctctttgatatgttgctccagcactcttcaagccgaaagttatgacgacccattcaaataagccgattgcaccagggcccctaaaagccgtcttatggatatcttcctcagccataaaaatctgattatatcctgcattcccatccataaaactcaaaattttgttccctgctgaggcatcaaccagctgatcggccactggcattggatattcgtcctttggtgtagctttattcagatctcgaaaatcaatgcacaccctgaccttgccattctttttaataactggaactatgctacaaacccattcagcatatcagcagggacgaataaaaccagcatcatacaatcgtttgatctcagctttaacaggttcgagcatatcggctttacatctcctcggaggttgctggcgtggtctaacccctggcttgataggtagccgatgttcaacaattgatcggctgagtccaggcatctcataatactcccaagcgaagcaatctctaaactcttttaggagctctatcagcttggttctaaactctagagacaaatttttgctaataaatgtcggccttggccgatcgtctggacctatgtctatttcttccaactcatcggccgacataaaaccttgaccttgcttgtcatcgagatcatctactgtatccttagcgtagacatttgaaccctccacgacgccctcaaagtaatagcttgggttctccatcttcgattggctgtatatcagaatcggacacttttagaaaatctccatcccagacttttccagataaacaatcaaggccatccatctcccaaagggctaaatcggcactggcaacattaactgacctgtcggctggcacgatctctatcttgtcaccttgccattaaatcaagcattgatgcatagtcgaaggaatgcaacaattggcgtgaatccaatcccttccaagcaacaagctgtacgaacccttcccatcgatgataaaaaacgtagtaggaatagtcttgctgccgactgtcagctccacatttagaacacctctggtttccgatggattaccaccaaagtctttgagcaccatatttgtcttgatgagatcctcggcgttcctacccaacttgctgaacgtagcataaggcatcaaatttaccgcggccccaccatcgaccttcatcttagacatcggcttcccattgacgtagccgtttatatacaatggtttaagatgccgattctctgtcccctcgggtttctcgaatattgcctgttctggtgaaaggaccaacttagccgatccctcttccacttcatcgacatcggcctgatcgatcccgaattcggctggcaatgtaaagaccatgttaattggtgccgctacaatgctcttcccttttgccaacctcttcgcctcatcggctgcagcatcatcggcaacaggaacctgattcttgacacgccactcctatcttggctttggtttcctcagctgatggttgatttcctcttcaacctcctaaaaacgctccctgttcctcaatctttggacccttcttttctgattcttcgtgaaaataccagaaggacaccattgattcttcctgattatctcatcctcttggccataatcttgattcatcggacccaatctctgatgaacaggaagtcttgtctgccttagccgattacctctactatatgaccggctcgagctctcgacgatatcattgcacccagggcagttttcaatgaatggcaacctcatcccttcgttccagcagaatctaaagaactcacaaccccaatgaggatcaaaaccatcgtcgtattcttcataatgcttctcctgctacttgttatacttcctctgatacttgttgataatcctagccgaattcactcgaaaaccctttgcatggaccctatcggctgcttgaccggctatatgcaccatattaacaggaaaaggattacaatcgaccttcatcggttttttggaatcatcaaacctaatctttcccccttcaatggcaacttggatttgctgtctaaaaaccttgcaatcgttagtagaatgagacccagaattatgccatttgcaatatcgcttcttgcctaattcctcagccgatggtattgtatgaccaacaggaagctgaatttgcttttctcggagtagtaaatcaaagatcttgtcagccttggtgatatcaaaatcatacttttccacttttccagaactttttacccattggcatggtaagacctttttgcttctcacctattcggctgcagctatttcagaatcatcttccttgtcatccgatccatacatgtatggacaaacatgattaactttcttagagcttctcctcacttccgccgacctatgctcatgcaaggttaccttctgtatcagatgcaataagctatcaaagtcttcggacgagaatttctccctgattggaggaatcataccatggaatgccaaatcggctaactgagcatcagttaaactcaagctaaagcaattgtttctcatctccctaaacctctgaatatactcgtgcacgggttcatcatgccgctgcttgatcgctgtcaagtcggacaacttcatctcatgaaccccactgtagaaatagatgtgaaattgcttcaccaaatcggcccaactactgatcgacccacatggcaaagaggaaaaccaagtaaaagctgatccagacagagataaccggaataacctaactctcagagcgtctacagccgatgcttcaccacactgagcaaggaatcggctgatgtgctcataagttgacacgccctcttgtctcgaaaacttggagaaatctggaactttaaaccgattggggagagggactatttcaaaccactcaggataaggcttccagtctcttttggtttaagcccaaattgttctctcattacatcggcaatcacatcggcccacggtcgttgctgagttgctccttgtggctgttgttgcatagactcgaactgaccatactgacatgcgaactggggctgagccaatccccctggctgatattgggcttgtggggaaggaggctgatattgatagctcaaattactcccttggtaattatgaagattcggctggatgttgcgcaccaagtgttcaggaaccatctgaggtatcactgtgccgtccggctgtgcacggtgaaccaaatgctctgggataacctgatttacaaactgctgtacaggttgaccaccaggtactgcgaacccggccgatgcatttactgaccccgggtgctgaatcagctgaacgatctgttgtctcaatggagtctgttggatcggctgctgaggctgctgccttggtggtgtctgctgaattggttgcagaggctactgccttggtgatgtttgctgagcctgttgtactacctgttgttggattggttgtacaacaggctggattggtggtgtctgctgaatcggctgctgctgcactggatcaacaataggtggaggtggcagaaacatggcagcaacttgatcttgggttagccgattcatagccttcccgccatgctgtggcagatcccttgttaacaaccgagggttcaccggctgtcctggcgtcatagctagtgtagcaagcaaaggagtcgatgctggcgccgtcggctgagttgtgggtgcaacggagggaactgcttgaacagatggctaaacatcggtgatcaaagatcgataatttaggaagacacctccatgcaagtaaactgtgcctgcagcctgatgctcagctatcgaaccatcggctattgtcttcatcatgtttgacaatgtattgactaataccccggactgattgatcaaagcatgatgcacagcgtaatcaacccgatcttggaagttattgaaaaaatcttgtgctagttcactattctagttaagattccctccttgtggctcctgagcaccatcaccttgtacgccatggactccttgagaattgtcgccttgatcgctcgtggagccatcggtagcacctttagtactcggctgagccgagccacctgaagcttgtttcacttctccatctttaaaagaaccggtctgtaacatcccggcctagggcttaataggattaatagaatactcatatcaacaagttgcaacttcttttccggaagccgatctccaaagaactccggggttaagcgtgcttggcctggagcaatttgggatgggtgaccgaccgggaaattcttcccgggtgcacacgagtgaggacaaagtgtgcagaaaagatatgtgttggtctgtgagggcagtctatgacatatgatagctatcagatgtaagcgggcccggcctgggggaaggcgggacgttacaaaatggtatcagagccgactctcgcggtttcacgggcgcgtgtgtcgcagttgcgcaggcatggtgcgcatggctggtgtagaccgggagtggttacacagcatggcacatgcgccgccatgcgctggcactggatacatggacgtggccaagagaggacgttcctggcctagggttgatcgacgggggcgtcgatctctcttaagggggtgagggtgtaacatcgtggcctagggcttaatagaattaatagaatactcatatcaacaagttgcaacttcttttccggaagccaatcttcaaagaactccggggttaagcgtgcttggcctggagcaatttgggatgggtgaccgaccgggaaattctttccgggtgcacacgagtgaggacaaagtgtgcagaaaagacatgtgttggtctgtgagggcagtctatgacctatgaaagctatcagatgtaagcgggcccggcctgggggaaggcgggacgttacacggtcccaggactatcagcaaccacttttattttatacttctgaacaagtgtccccttgcgggtctgctcaggcgtgaatttctctggatcgatcagcatgacgttgacatcaatgatgtcagtcaatccctgctttaacgccttgcctttaacagaacctgggctagatagtggtggttattttatacttctgaacaagtgtccccttgcgggtctgcataaatgagtttaggaactgatcccgtgcctgctgcagggttgcttcaaactctgccatctgctcaggcgtgaatttctctggatcgatcagcatgacgttgtcatcaatgatgtcagtcaatccctgctttaacgccttgcctttaacagaacctgggctagatagtggtggtggctgtttctcggccatgagaaagaactgacgtctgacttcttacaggacccgctggacgtgccaaaagcgtgttgacagaaaacacgtggcctgggagatctgcttaactccagtgcagctccaaagctcgccttcggatgttgttagcatgccagttgattttatcctgtaatcaacaagaaatagaagcaaagaaaccgtggttaaatctataaatgatagccgatcggctaggtgccgatgacatatcatttatctttgagccgatgtcatctgtgtatcgatcggcagtcatgaataagtaaagaagaactaaatctactcgatcggctgtagatattaacgatatatactccttatatcgatgtatacttaaatcaagtgattgggatagatcggtcaccatgccaagacagtataaataacttagatcgaaatatatatcaataacagggttatatatgtttgtagcatagccgatcagatagatctagcatgtatcagctaatactccgatactactttatatcaagatattaaagcaagtataatatatcgagcaaaagcctaacattcttagacacagcaatatcttaatataaagggctgatttaacatatcattgaagcatatagaacaaatataattaaatcagatacgatcggctgaaactccgatgctattctaatcggcaactagaaggcagactagagatcgatattctaagcacgactcaataggtcaaactcaactgatacagcattaagtatgaaaagaagaacaatatttagacaatcaagccgctagaagtttcatagaatggtagatatctcatataatctagatcaacatcaagatctaacttaatcggctgccctctgtgtacagatatttgccgatagtagattaggtggcgatattgctagagattatgtaagatatatgataactcgacgaattatataaacaagattagagtatcacaaagatggaagcactaatcctaaaaacacaatccgtcataacgagttttacctcttgttgaagatcgaaaccgatgtagctcaacccgaaagcaagaactcgttgaagcaaaactaaagcaaaagggtggcgatgcgccgaaattgtattgaacgtgtgtgttgttaaattacatagggctcggggtctatttatacccgagaattacaagatatgcccataccggacacgactattatctctaacaaactctaaaataccataagtctttgaggcagacttttgcccacatttatctataagaaatttacataagatatcctaattaatagatacaattgccttccccggactccatccgtgtgtggcaatcatcctgaagtacattaacttgaacccgatgtcgcgtacaagtcgtattgtcggaatcggccgtatcggcttgcttagcccgactcagacccagccgatcctaatcgtagccgatctggacttcagccgattcctgctctgtttccgaactcgatctccgcctccgacttcgctttgatcaaatcttctgtcctgacacagatgttaccaaatttggtcgttaacaaaggggtatggaccgaaaaggagggggagacctaggaaaacagataaaagatgagagttgtattttggaatatcagagattgggggcttctgggaggcagagacagttaagggagatgatctttgaacaacaggtagatgtgatttgtcttcaagaaactattaagcaaaccttttcagaaagagaattgaggaatctggtgggggatcattttgtgtggagatatgtggttgctattggacactctggggggatcatgactggggtgagagatctaatgtttgatatcctagattgggatcaggggaagttttctctgaaaatggttgttaagaacaagagggatggtttcatttgggagctgatcaatgtttatggtccagcacatcaatcaaatagggggggtttttctggatgaactttcccaaagaatgcagcagggggtgtatcctatgatcttggggggtgatttcaatttatatagattttcagatgagaaatctggagggggtggggtggatgttaggagaatggatgctttcaatttgttcattaaccagtatggtttacaggagttgtttaagcttgggggcaaatttacttggactaataagcagtctacccctataaggagtgtgttagataggattttagtaacatctatgtgggaacagaaatttcctttagccattgttagctccattttaaggttggttcagatcactgtcctttgcttttggacacaagagaaggggggagaatacatagcacttgtttagggttgagatgagttggtttgaacaagagggtttcaaggaagatttgttaaaaaaatgcccaattaagttgcaaggcaaggctatggattactggcatcttctcatgccaagtcttaggagatggatgatgggtggagtgctaacatggttaatgcgcaaaagagaagaaggaaagagatagaacttaagttggcagaattagacaatattgaagaaaggagggatttgtttccccaagaatgggagatcagatatgagttggaaagggaagtggaaaatatttatttacaggaggagatttggtggcagaggagagggggtgaacaatggctgttgaggggggggtagtaatacttctttttttcacaagattgccaatggtagaaaaagaaaaagtcatattttttctctgcagcaagggggagacacaatcttagacttcaaccaaatccaacatcacatttatgagtactacaaaaagttgtttggaagagaggaaattaggaatattcatctg

SEQ ID NO: 27818 - DNA, 883 bp, Oryza sativa
taggggatgctctctcagtcattttggagaatgcttgtaacggggagtcttagaatgtttggttcccaatttggttccaggggggttaactcaccttcaatatgctgatgatactattctttttactaaagcttctgaggagaatgttttggctttgaaattcctgctttattgttttgaagaaatgtctgggatgaaaataaactaccaaaagagtgcagtttatgtcttgggggttcctaaagaaacagaggaaaagtttgctgatatgttgaattgcaaagtggggagtctgcctttcacttatttggggttacccatgggttttgagaaaatagggttcttcagaaagtggaaaagagattggaatcttggtacagtgggcatctgtcatatggagggagagaaatcaggattaattcttgtctgtccagcatccccatgtactccatgggtttctttaagctccgagaagaatttcacaagaagatggacagtataagagggagattttactggcaagggaatgggaagaagaagaagtatcatctaataaaatggcagggcctgtgtagacctaaggactttgggggttaggtttcatggatactaaggttatgaatatttgtttgctgagcaagttggataataaaatggaaaatgattctcaggacatgagctgtgtggtccttagaaacaaatatttgggccaaaacaactttttcaggagctcagctgggggggggttcttagttttggaaaggtctccatgattgcaaagattggctgaacaggttggtggttaaaaaagtgggaaatggaaagaaagtgttgttttgggaggatatttggcttggggaggtccctctcaaaactctttttc

SEQ ID NO: 27819 - DNA, 2112 bp, Oryza sativa
ccctcgtttttgttcggattgttcaggatttcaaattcataaacctgtgcatgcaaatcttgtagtagtttgttactccttaatcctacgtgacctatggttcacatgaatgtttatactttgtgtgatatgatgcaaaaatctttatgtacaatgcttttctttatctgttactatttatttggaaggtgtggaacgcgcagattttgcaggaatccgtgtccacggagtctgggatgtgtggcacaactgtgcaagagtggaggatttcgcaagaggcgggtggttttctccccgtagtctgttccttttactcgaactggaacacagagttggcctttcccctcggcaatttagttgccgtgttctatgtacttgtaacgacactcctgccctgtctaaacaagaattcttggccggcattctttcaccggccaacgaaaaaaaaaacaaactgaacaaagttggaagctcagttcatgaaagccaaacctttttttttcctccaaaacaagacactccattacatggtgagatgaagagtgattaatcttgcagtcatatccccagaaggaaaattacatatgcagttgtaggtgcatattgaacacacctgcggaacttgaataagtatgaaattataccatatgcttcctttttttctttataaaataacagatgagcgagcacttttttataacttgatggggtatgagtatgaggcttggccattaggttgttatggtaggcatggaagtctcaggagcttcatctgtttgacaaagtgcaagcctttggattgcactaaaacatctcgttgctagtatcatcagattggcgtgaaccccatgatagatgccagagctggagctaacaaaaatggctttcttgtagccattcctcaaactagctgatactccttagagatagacatgatcagtgtgatatgatatgatatgttagtggtttaagacttgttctttctttcatctgccgattattgagccagaaaaaatgagaaacttcagtaacattcagaagatcgccaaaaattaaggaacttgatcatattatcatcacaaagattgtaaaaatttaagaactccactgatattaattcagaatttcaaataatgctacaaattaagtgtgttggagttgttccaaattcacttcaagatattggccgggcttctgacgaagcttagtacggtacggtatatatgccctttgctagggtttcgtggagacttgattctcttgtaagccgccataggcgtgtaacccaaaactcttgagatagtgagattgttgctggctggtgcccgtggttttttcccctttcgcattaaaggggttttccacgttaaatcgtgtgtctccgctgtgattgtttttcgtttactttgtatttctatacgtcgttcataacaagtggtatcagagctttggttgctgttagggttcatgacgacgtcgatgaagttcgatcttccgctgctgaactacgacacgcggttctcgctatggcaagtcaagatgcgggggattctggcgcagactcatgactatgatgaggcactggataacttcggcaagaggagggccgagtggactgctgaggagatccgcaaggatcagaaggcgctcgccctaattcagttgcatcttcataatgatattttgcaggagtgtttgacagagaaaacttctgcagaactatggctgaagctggaatcgatctgtatgtccaaggatctaaccagtaagatgcagatgaagatgaagctgttcactctgaagatgaaggaggaggattcggtgatcacccacatggctgaattcaagaagatcgtggccgacctagtgtcgatggaggtgaagtatgatgatgaggacttaggtcttctactgttatgttctttgccaaattcatatgcaaatttccgtgacaccatacttttgagccgtgatgaactaaccctaaaggaagtttatgatgctctccaaaacaaggagaagatgaaaattatggtgcagaatgacgggtcgtcgtcctcaaagggcgaagctttgcatgtgagaggcagaactgaaaacagaacctcaaat

SEQ ID NO: 27820 - DNA, 2425 bp, Oryza sativa
tgctgcttctgatgatgattctggtgattgtctggtagtatttgctggttgagttgctggtcatgatgaatggatttttgattccgcatgttcgtttcatatttgcactaaaagaaattggtttagttcttacaagcctgtgcagaaaggggatgttgtgcggatgggagatgataacccatgtgctatcgtggggaattggatcagttcagatcaaggactgatgatggcatgacacgcaccgctggaaaaaatgtggggtatatgccagggatgtccagaaatcttatttcattgagcacgcttgatgcaggaaggttacaaatattccggttcagatggcgttctaaaaggtatcaaaaggttctcttgtttgtttgaaaggtgatcttaattctgcaaagttatatgtccttagagggtgtactttaactggttctgattccgctgtgctgctgttagtaatgatgaacctagtaagactaacctttggcacatgcgtttgggacatatgagtcacattggtatgacagaattgatgaagagaaacctggtgaagggcttgacttcgagtaagatcaagttttgtgagcattgtattttcggcaagcataaaagggtacagttcaacacttttgttcacaccaccaaaggtactctggattatgttcatgctgatttatggggtccttctaagaagccctcacttggtggtgctcgtatatgcttacaattattgatgattactctagaaaggtttggccttattttttgaaacataaagatgatacctttactgcttttaaaaactggaaagtaatcgttgaaaggcaaactgaaaggaaaggaaaaatgcttcgtactgataatgggggagaattttggtcgcatgcctttaatgattattgcagacaggaaagcattgttaggcatcacaccataccccatactccacaacagaatggtgtggccgaacgtatgaacaggaccattatatccagggcccgttgtatgctgtctcatgcaaggatgaacaagcgtttctgggctgaagctgcaagtactgcctgttatttgataaacaggtctccttctattccactaaataagaaaactcctattgaggtatggtctggtacgcctgctgattattcacagttaaaagtttttggatgcactgcttatgctcatgttgacaatggaaaattagagcctagagctgttaagtgtcttttccttggttatggttcgggagtcaaaggctataaattgtggaatcctgaaactgggaagacttttatgagcaggagtgttgtattcaatgaatctgtgatgtttactaacagtttgccctcagaacatgttccagaaaaagagttgcagcgtatgcacatgcaggtggagcatgttgatgatgatacaggtgttcaggtggagcctgttcatgagcaggatgaccataataatgatgttgctgatgatgatgctcatgatgatgttcagcaaactccttctattttgcagctagaggaggaattacctattgctcaacgcaagtcaaaaaggacaacaaaacctcccaaacgtcttattgaagagtgtaatttgtcttactatgctttgagttgtgctgaacaggtggagaatgttcatgagccagcaacctataaagaagctgttcgttgtggtgatagtgagaattggatttctgctatgcatgaggagatgcagtctcttgagaagaacagtacatgggaggttgtacccttgcctaagaaaaagaagaccatcagttgcaagtggatcttcaagagaaaggagggtttatcttcaagcgagcctccaaagtataaggcagggttagttgctagaggttacagtcaaattccgggtgttgactataatgatgtgttctctccagtggtaaaacacagttcaattcgtacttttcttagtattgttgcttcacatgatcttgagcttgagcagttagatgtgaagactgcgtttttgcatggagagcttgaggaggacatatacatggaccaaccggaagggttcatagtgcctggcaaggaaaaatatgtgtgcaagttgaagcgatccttgtatggtttgaaacagtcccctcgtcagtggaacaagaggtttgattcatttatgttgtcacacagttttaaaagatctaaatatgatagctgtgtttacatcaagcatgttaatggatcacctatatatttgctgttatatgttgatgatatgctgattgctgccaagagtaagattgaaatcactaagttaaagaagctgttgagtagtgagtttgatatgaaagatcttggtagtgctaagaaaattcttgttatggaaattagtagagacagaaaatctggtttgctatttcttagtcaacataattatatca

SEQ ID NO: 27821 - DNA, 39174 bp, Oryza sativa
tttagtacttttagtttgatttcttcaattacaaagttttttttttatcttctctttggtctttaaacatttattttagttctgaaatcgcaattttctaaattttgtttgaactgatgcttaataatttttaacaagaacatatttgtgtgcatttgaaccttgcggctttttttgtgctctaacgtttaaattttggccttataattaaattctagagttacgtctcctttttcatcgaaaaaaaatatatattggttgcaaggtggacgtctaaattcgctcgcaacttattgattttatgaaaatggtagttttgtcgtaccaaacgatttcttggttctctgttgaggcttcatttttcatcaagaaatttatattttgtacttttaattggattccttaattttgaaacattcttcttgcatcaattcttcaaatatccttcttggagtttccaattatttttgttgtcacggttcatcttccttaagttcgtttgaactttgttttctggtttataaaaacaaaatattcttttgcatttttccctaactgatttattttgctcagacattagtgttgaacttttaattgagttgtaaagttgagtctccgtgtttattgaaaacaaataactttgttgtgagctggacccttgtagtttgttgcacgttcaatcttttcggaaaatcacagtttccttgtatcaaacgtttctagatttctcccttaacgctttattttccgtcctttcatttaaactttaagcttttagttagattgctttatttttttaatgttctcttgtatacatggttttgacatgcaatttggactttaaaactttactttggtttattgtgtgatggttcttttatcattcttaagtttcaactcggtacttcgagtttgatttcttcaattacaaagtctctctttttgcaacttctctttagactttaagctttactttagttcagaaatctcaatttgctaaattttgtatgaacttatgcttactagtttgtgaaaaaaaaattagttgcttgcatttaaaccttgcggcttttttctgctctgccattttaatagtagacttataactaatttaatttctagagttatgtttccctgattatcgagaaaaatatcttggttgatggataggcgtctatatttggtggcatcttattgattttgtaaaaatagtagtttgcttgtccctaacgatttattagtttcgtcgttgatgcttcattttttatccataaatttaaattttgtacttttagttggattcctttattttcaaacgttcttcttgcatggattctttaaatatcctttttggattagaattattataatctagattattagtaataatctaaaataaacaggtagattattatgattgattataataatctataagcctgattagtataatctgttaatctcctctaaacgtgcttttttcaaattgttgggtggctagagactcactacccttattataccataatccacatgaacatacaactcatagcttattcgactatagcttattataattcagcttttattaatctggctcaataatctggattacaacaatcttaagttgaaacaaccgaggcctaagtttatttgaactttgatatctgttatatgaaaactttatttttgtttcttgcatgacgtttgttttttcattattgaatttcaactctaaagtttctctttttggaacttctctttggactttaaagatttattttagttctcaagtctccatttcctaaattttgtatgaacttatgttactagtttgtgaaaagaaaatagttgcttgcatttaaaccttgcggcttttttgtgctcggatgtttagacttataactaagttctagagttaagtttccctgtgtattgaaaaaatctcttggttttgggctagatggctacatttggttgcatcctattgattttatgaaaaccatagtttgcttgttataaatgatttattggtttctctgttgacgcttcgttttcatccataagtttaaattttgtacttttagttggatttcttgattttgtaacgttcttcttgcatcgattcttcaaatatcctttttcgaattttcaatttatttttggtattacggtttgtcatcgtaaagtatgtttgaactttgttttctagtttataaaaacaaaatattctttttgcattgaggattaactgttttattttgctctgaagttaattttgaacttattaattgagttgtagaggtctatcttcttgtttattaaaaacaaataactttggtgtgaactggacccatgcattatgttgcaccttggagcttttatgaaaatcgcgatttcttaggtttgtccattcacgctttgtgttccgccctttcattcgaactaaaccttttagtttgagttctttattttcgaactttctcttgtatcaattgttttgatgttctctttggactttaaagctttaatttagatttgaaatatcaatttcctaaattttgtttgtacatatgattactagtttgtgaaaagaaaatatatgcttgaatttaaaccttgggctttttttgtgctctaacatttttattttcgacttataactaagctctagagttacgtctccgtctttatccaaaaaaaatatgttggttgcgggctagatgtctctatttggttgcatcttattgattttatggaaatcaaagtttacttgtcccgaacgatttattggtttctccgttgacgcttcatttttaatccatatatttaaaatttgtactttaagttggattccttgattttgaaatgtttcttgcatcaattcttcaaatatcatttttaaggtttccaatttttttttggttgtcacggtttgtgttcgttaagtttgtttgaactttgttttctcgtttataaaaacaaaatattctttagcattagggccttatcgatttattttgctctgacgttaattttgaacttataattgagttgtagagttgggtatccctgtttatcgaaaacaaatcggaaaacttaagctacgcagctggggcagccactcacgcgtgccatgtcggattgctacagtgcgcacggtggaatttagctataaagtcctccggtttctacgtaattcgatctgaggactgaggtattattttacataggtgcccttagaaaatatggatattgcatgcgaagaagagaaaaatcgcggattagggctgcgctctaaaatgtggaagccgagcggctttttggcaaaaggacaatcactaacccgaaccatgccccaacccctagcctctgaaagcgcatagaagtcaacgcgataatagattgatcacggacaagatgtcacgggtgaggagattggaagggggattgcagcgaagagagtatttgaacgcagttgttgggcgtgaccctggacctcgtcgacacggcggagccgttttcggcaccacaccagctgtaacaccccaagtaaccacgtacctagagtgccacatcaagaaacactcaaaccactaacttccaaaattattagaaatttcggcagtctcccctgtaaatacggacatccacgacatgcaattataagttaaactaataacaatatcattcccacaatacgacccatccttataatccatggggaagaaactactagaaatctaaaagattattacaagaccaaactaggatataatttaagtgtcattatggacctaagcaatatagtttgatagggtgcgagtagatgtggatataagggtgctacttcccgcccatgcatgtcggtgtaaatgcgtacctaaaaccaaataaaacacaagtgagtataaaaatactcagcaagtacaatatggaactagaaaacacatatacacatcattgacaataaagcatgaacagaaggatttctttctttgataggaaacacatttccaaacaccaagtcaaagaatataatagttcccatcccgggcaggcatgaattgaaatagtagtttccatctcggacaatagtgaatacatcctagcatttgccggcaaagccgagtaagcgtgatcagcgcttacccacaggaacatgaataaagatccaaattgaattcccatgactacgcatggtccttgaataattgaaaaccagaatcaaagaaccaaattgaaaccatattgcacatccatggcaagcatggtacttgaattatttaactagatccagaatacaaaatattgaaacaagaataacatcgtaaacataagatgaactcaaaatgtaaatagcgtgaacaataatctgaacattagtcacttatcacatagaaatatatcagaaataaatagatagagtaaacaatccatgaatcacacaattagttcgtcatgcacttgcctccaacgaaggattagtatcatgcacgatctggtggaccaccacctaatcacaaacaaaacctcagcaaacacattcaaacatgtgtataaaacaatgaaaaaggtgaacctactgcgccatcctatcaaaactcaataacaaggaacgccgcttggactatacacaagactgctgcttcaaacctttatatcttgaaatatgaaaaggctatgactgaaaatgtatacattttgaaaatctacagaacaatacctacaactttgatgtagaaagcatatttttattctgccatttaaatggtctaatttgcacttgaaagcaggcttccgaatctgtccagaatttcagactgtccacactaaaacaaccataactggagttctactcgcccaatcagggtgtactttaccaatatggaaagctaagaaaaaacttctacaactttgtctataggcggcctggctgattccactgtttaacccctccaaaaacagttcaatctactactatccagattatgacacaaaaacaacagtcatactaaaaaaaattatatctcctaaaccacttgagataaaatcgcgccctttggtcagaagatagatccaaacattatctaaaattcctagttatacactttcgcagaaaataacatttagagccccgaaacattgaaacgctgaagcactgcaaatctgcccacatgcagaactgcaacaaaccgaaccacaactacccaaactccttctctagccttccctaaccacgaattaaagcactaaagccatgctagaacaactgatacaacaaggggataagcctcacctagggtttctttagagaacttgtgaggagacaataagggagactccggtctaacccctccttctactcctctcctcctcctcgttccgtttttctacttcgcttcttgttccaagctatgaaggtggagatttagggagagcaatttgttgtagagggaagagatgcgaacacaggaggaggggagtagaaggtgccggccagggagaggggtgacggcactatgaggggaggtgggattcggttcccctctctctaggtttcaggggagaactaatggcctgggtttatgggccttctcacgctggcccacttctaaagatatttttcttttatttatttctgttaacatttttattttaacaagtcaacccaaactaaaaaaacctaactatcttttaatatacggggtattacaccagggaggcaggaaatacatcagatgtgatctgatctcaattgaattgacctacaaatttaaagcaaatccaagggatagaatcctagcaacttaagagataaagaactaacaaactccctaacaaactctaaaccggaccacacactattcctcgtcacggattgccgtcgctgttcctgttgcggcgccgtttatactataatccccacatgacatctctccctccctggagaagcaactcgtccgtgagttgaaaatctggataccgagaccgaaattcatccagcgacatccatgaagcttcagctgccggtttatccttccaatgaacgggaacttcacgaacaccacgcgccaaatggcggcccacatgaaacacgtcatgtaatcaagcgcccgggggtagatgaaggcgatacgccacggcgccaatgacaatgcatcccaacttgccgcgtcccttgacagcgagagacgcaatcggatggtgaagcaaacgaagccaaacccagccacccacactgaactccaatgcacgatgcttgccgtcatacgccatcttgtaagtctgttgagcttgttctaaacgatcacgaaacgccctcaggaagtcgtcccgctcctgtaacgcctgttgaactgcgggcagacgacatgaacccggctcgtaggcacgcagcgtcggcggctcgtgaccatagacgacgcggaacgacgatgttcgaagtgacgactgatacgacgtgttgtagcaatacatcgcgcatggtagccatcgaagccattgacacgaacgattcctagtgaaacatcgaagatacatcatgatgatcttgttagtcacctcggactggccattggatttaggtgaaaggctgatgaaagattcagctgcacacccgccaaccataaaatttcacgccaaaaagtgctggtgaagactggatctcggtcgctgacgatggagaccggaaaccatgcaagcggacgatctcagcgaagaaggcagctactaccgacgtcgccgtgtacggatgagaacgggatgaagtgggcaccgttacgatgaccgtcttgccatgtactcgcgggagcccctcgacgaagtccatagcgatgtcagcccacaccgccaaaggcaccggcaaggattgtagcaggttggccggttggaggtgctccgtcttgttccgttggcacgtgaggcacgcgcgcacgaaatcttgcaccgtcgctctgtcccgcgagatatggaaatccgcgcgaaggcgagatagggtcttttgcgttccctcaagtcccaagccatgcaccgactcgaggatggccggcaatgattcggatgatggcggcatgaagacgcagcccttgaacatgatgaggtcgtctgtgaacgcctatgctggcggtttggcacccttggtgatgtcttcacaaatggcggacagggcgggtgtggaggctacctcgcgggacaactcatcgaacagggagaattggtgggggggatgataaggcgaacgcctccgccaggtgttcgtcccatctagagagcgcgtccgccaccaagttcgccattcccaacttgtactacacgccaaagtcaaagccgaggagcttgcttgcccactgatgctgtggaacagtggagagacgctgatccaagaggaagcgcaagctgcagtggtcggtgcggatgaggaagcgacgcccccacaagtatggccgccaatggcggaccgcctggacgaggccaatcaactcgcgttcgtaggcagcgagcttggcgtggcgcgacgcagtcagcttgctgaagaatgccaccgggtcgatgccttgatggagaacagcacctaggccggagcccgacgcgtggcactcgacgatgaactccttgtcgaaatccgggagctggaggactggggccgccatgagtgcgtgttgtagttgccggaacgccgttgccgcggtgttagaccagtgaaagccctccttccgcaacagcgccgtgaggggcgcggcgatggtgccgaagtcgcggatgaaacgacggtagtagcccgccaagtgaggaagcccctgaccgtgcgcgtattcttgggcagtggtggacggagaaggccggggcagttgacgcgggaaggagcgaaaccgaccaatgccggtcacatctggagcgtaccgttccaccggttgagtggcgagggccaattggtcaactggtcgctgctagggtggctagtactgttgctgctgttgtcctccgttgttgttattgcagcgacggttgcggttacctccctgccgatcggtgttgttgccacgatttccagcgttgccgtagccggtggagtatgcgggcttgcttcctaatggcacccccccggaagtggaaggtcggcctccagtgccggcgaggagagcagtagaagcttagcaaggacgacccttcgtcagttcttcgagcagaagttgagcacgtacttcggcaaatgtggggaaaggtttctgcatagtgaacgcagattgcaagtgaccgaatttttcattcaaacctcggattgtagttagggaaagagtgcggttgcccacatcgtccaagtcgtctgccatggtcttcaacaggcaacagtagtcgttgatgctcaaatcatcttggtagaagttgtaaaactcggtggagaggttgagagcgtgggactcgcggttgcccaagaactgaggtttgaggccacgctgcacgatgcgagccgtggtgttgtgcgtcatcacggactccagtaagtcgacggagatggtgccgtagagccacaaaactacgatgcagtccatgcacatccaatcctgacgatccggcctgtagaggttggtgaggacgtgatcggcgagcgcgtacttgtcgagggtgacgaggatgagaccacaccattgtgtgtagttgccgaagttgagatcgagggtgacgggcatgagagacttgatgttcagcatcgagaccgcctgagcgtggagattggcggtggcgtcattgttgaggtcgacgttgtagaagttctgggcagtaggggcaggagcagcaccggtcatcagagggatgaagccaccgtagccgggaggaggtggtggtggtgcaccagctgcttgaggaggaagacccactagagggagtgttgccgatgcagcgccaggcgtgatgaagaaggcggagacgtcctgagcaggcagagcggatgcagaggcgtcggaggtgccatagaggccaccggtggcaaggatggccgtgagctctggcggtagtgggagagagatcggcggtagtgtcgtgcctaagggggcagtggtgaagagcccggcagacatcgtcgcagccgtcatggtggtggtcgcggctgaggaagaagagttgtcgccgtgtgggtgttgccggcgatgaaagaggtgccagtaccagcttctcgatgaaagaggcaagggctttcctggtggcgcaggcagcagtggtggacgccgtgtcgatgacggaggcggctatggctgggtcaacatcaaccctagatgagggttggaagacatcccgaactgcctcggtgaccacagatgtgatggtgtcaattgcggcagagggggtaaggggagcgttgtcggccatggcgcaggagcaatgtggtggcggcggtggtggcggcggcggcggcgtcagaagcgtgcgtagcagaggagcgcatggcgcgatgcgagattagagttggaggcggaagctaaaagcatctgataccatgaaagcgtatagaagtcaacacgataatagattgatcatggacagagaacatatatagggacggtggacctgtatctctacccgacttatagaaacagaatcaggagataattaggaaaccgaacccaatacaaatatgactctaacagcctctgccgcccgctcccacacctgctccctctcccgcgccgccaccgagcgctgcctacgcctcctcatcgcgctgccacctccgccaccgccgtcaccgagcactgccacaacaacgtcctccactgccgccgccatcgctgagcgccgttgtaatgccccgaatttcgaattagcatatttcggggaatattatagcaaacgagcaaaagttcaacctttaaaccgttgttcgaataggcgatcaggaaccgtggatgcgtagagctcgccgagtagtgcaaaataaactactagtttatagaaatcagagtccgagcgaagtccccgggattgaaacgatgtgggccgttggatctcctttgtctctttatataactaacaaaaaaaaagaaagaaaaaaactctcgctacagccagccctagccctagccgctcctgcgctcttgccgccgccgccgctgccgccgtcgtcccggttgccgccgccgtctttgcgctgccaccacggccatagccggaggccgcagccgtcgtcatccatcacaacctgtgtttcctttccattttcctttttcccggtgagttctggcggctgttccttgttctatcgttgccaatctgattgcttgttgctggggctactgatgccatgcgactgctgctgctagggttgttgctgctgctgctgttgttgcttgttgcggtggccctgctgctgttgctgctgcatgatcagaggagaagggtagagagaggttgtacaggagggagaaggaaaggaaaagacagagcagcgttgaggaatttcagcaatttcgcaaattagggaaatttgtcgcaaggtagtgttccttccctgcaaaggcaacttctctttagtccctagaagtataagattcaaatagaaattgattggatagctgctcgtgcaattttttaggtgctttattataggatgaaaccatgttttcaaatctggtatgaaaccatcaggattcaggttagttgtcctaaataaagtttgtagtcatcgttgatatctttctaacgccgctggtttcgctcgattccgataatcggtttaggagaaacaacaaaaacagtactgttgaccaggtccgaaaatcaggacaccaattcgttttttcttaatatgggatttacagagccataatctgattttcctcccaacataaaagttgtagagaattttatctagatgtcaaagttatattattttctagattccgttagacggtttgcgagttacacatagaacagtaagggaactgctataggttaattaatacaaatcggtaaaaaggtctatatattctaggttatcgattttagtaaatatcacttgtaactatagttagttgaatatagtggtttatgcgtagctttgctccacaggtgtggagggttccaacattggaggagttgagtcggagtatcgaaggagttaagacaagtacaagacggacttgtgtgatgtataaactgtgtttcttgtttgatttcacatacccaattattattcgaaagcttactatcagtaattatgtggatttggtatcattgctacatatttacgtttcactttatgttcaagttcacgatgttattcatgtttcattatttcggatgtttttgtttacattattcaagtaccatgcgtagtcatgggagtgtaatttgggtctttattcatgatccttgagaagtgttgatcacgcttgctcggcttaccggtaatgctaagaggatattcatacctactcaggagggaactactatcttttgacttctttggtttaaaataaagtaaatccaacccttcatattggtttcttattgcattaatcatgtgtatgttttactagttcaatattgtacttgctgagtattctttactcactcttgtgtttaatttggtttttaggtacctaatgacattgatcggcatggggcgggagtagcacccttggactacactttattattgcacactattgaaatttagttttagactatgtttatgcatagcacaagttttgcgttgaacttgtaaaggtcatttaaagttctggtccttattttcacgtggaatttgtggagctaggatggtttggattgtgtggattatatcggtattgacttttcttataactacctgttttcacatggaatttgtggagctagaatggtttgtattgtgtggattatatcggtactgatttttcttataactgcctgtcgtggatgtccgtattttttaggggagattttaccgaaatttctaataattttgggacttaggttttgagtgtattttggtgtggcactctaggtacgtggttacctagggtgttacagccgccactacatccttcgtcaccatcgtcgatggccgctgctgcgccctctgttgccgccgccatcgaagaaacggcggtggtgacagaacagacgtcaaggaaggcggtggctgcagcgacaagaggagaacggcacgttgccaggctctcgagctcacccctcatcagtgatccgttcttcgctcaacctcgctgttgtcgcaggctccaaacctagatgacggtacaaatccagtggagctcttgctgctcgtcacctctcaggtcggtcccctctccctcaggtaactgatgtacttaaggatactaaattttacattaaaaaatgcattacctttcttgaaaaccaaaaggacacatatttttaaccagagtgaatattattttcttttgtacatatgatttaattggaattgatatcactccaactcttcaagtccatacttaatatgagtacatttcaggcggcccaaacgggggacacaatcctcctatgtcgccgggacatgcataactcaaatggagaaaggccatggaaggatttaagcagaggcaggaacaactagaatgtgcactgcttattcatgttcttccttctgtttcatattactcatcgtcgtcgttctaggatttaattttatattaaattatttgtcgttttctcgatccaaagaaattttaaaggtgatcgatattattccctccctacctacagtaatgcagcaatacatattgatgcggtcataattggctcatctactttgaaaagataattaagatgtatctgacaagggcaaccatgtaatctttcacatcttcatggtttgcacggtatttgcctggataacaagtaaattggaacagagagagtacagttttagactttcagtgtgttccttccaatataagaaggggtaattgctcatttcaccttgtagtctaaccactaatttgacttttcaagtttatgtatttaacatcgctttttaaaatcggagtactcgaggttgatcctattccatgaaggtaagataatggtgctaactaagagacgaattatcttttttcctttcctcatttgaccatgttgtataaacgtttttttttgtttgctcgaaattttttgacatactttaacacattgagcatattttgatatatttgagacaagtctaatagatttctcttctttttaataaatttggcttcaatttgatagaattttgacaaaattaaactttttttttgcaaaattttgagagcatgtcgtctcaattttgttcatccaaacttacatacggtgaagaaaaacacggatatagctccagaaaggagatgctcggccggcaaacagaggttgatccattgtcgccgcccagccggcagccgcccttgaatcaccctttgctgatggccgccccgctgaccttgccgccttggctgtgtgtcacgagggcccgactagatatggacagagcgagccagaggtggatgtcgagctcgatgcaggagcccacctaccgcgtcgttgctatcgtcgccactgtcacgtgatatcaccgtcatcaagcccattgatggctcgattttcttgcaccgccatcgcggcttgttgtgtagttggtcgccattgatagacccaaaaccaaaacctaaactgtgaatcatacacagtgacgaatccagaacaaaagttaccggagatccgatacatataattatttaattattaggtaatatattaattaatatggtacaaattagttagaattgaataatttacacgggtccggtgacctaggaaacactacgtagaaacacccctggccatggaactgcgtgagataagggagagaaatggtcaaatggagatatgacataagatttttttaaaaagtaatgaaatgggaacataaaatagagggaatatgagacaataaaaatgcatacttagagtggtattttcaagttcatttctaactaaagatcgaggaatggataaaaattagatgctagagcaagggaaaaaaagcgagagatgtgtgactcaattactggtcaaagacaaaatatgttttcgtggatgaaatagtcttccccttgacctttgactgcaggaatgacacggaaattctgggtgtgtctagcaaccaaaaaagcaaaagagtagacttatagttgatcaaagttgattacatcacattaatatgatagtactgaagtatatatagaccagcatactactggaatagtacataatttgttcacaagctgacaagcggcatatcgaagaccttttttttttcctgaacagtaacaaatagtataataagtgagccgataatataaatagcctatcatggccgtgagacaccagttaatttcagattatatatatggccgtcgatcgagctagctaagcaaacacaccatggctgcttctttcatggctcgcgtcgtgctaatcctagtgctgtccctctggctgctgccgtcgcttctgcccggttctctcgccgccggcgcttcatcagccggcaacgagcttttgccatgtgagtaatctgccattttttttttttgggaactaaacaagcaggagctctgtcaattatatttaaatcagtagagtaaaaacccagagacgacgatggttaattacaggaaaagaaaaaagaaggttgtcaatctctattaccagtactatagtcaatagttgttttttatttcctcaaacattttatgtcgagaagaattatatatttctcatgttcaagtgaaatctgtggtgcagactactactgcaaccccgtaagttaacgtactgatcacataatattacgaatctagataaacccatgtctaaatttattgtattggtgatgtcatattttatttattatttattttagagaagggtatgttttatccggcatatacatctaactgtatatatgcagtatttttaaatcaagaacttagcctattatatagctagggaacttagctatcaaataacccaaactgaaattcgttcctataaagatttgaactcagcatcttaaaatgctactctatttaatattctatttaatattagatttatattttgggacgaaagaaatagtaattaagcatcgttcgcgtgtgcatgccagtgagcggtggcagctccaggcggatggcgatggtgagaagcagggagaggaaagacggctatggtttaagtatcgcgaaatcagcacggcgatctctccggcttacacccggttatgaacacagtaagcagcgcttggaattgacaacaaattaagtggtttgataatttgatgctgccatggaaagtagatcatgttgaatgggagatatatatatatatatattaatatatacacgaaacatatacagagtttgggaaactatgtaggttatacatgtttgattcaattatgttttttaggttatgaagtagatcagttcttttttcctcattatataacttttcagggttattactagtatgcgaatattgattccagccgtctgtaaaaaccatttctatagtagcgactgtcttgtaatattttcctgctatattaatatgaaacctcatacccggttccttaaaaaaaattgccacttacaaactattccagttgttttgcactttaaaatcctatttagaacgttggaattttgcatgtttttcgcagggacttcacacaagcagtaattaaaaaaaatgttttttaaacagggacaaagatagctagcttttataaattactgattttatcaagtattccctctaaacataaaaatttgacgtttcaggttaagatttggtcaaattgaccatcaatcacttctcaaatgcatattttaaaaggtgccgtggatagatttttcatgtctatcataatatcgaactcatgtaatatgaaatcgatagttaaagtttttagaaatttgaccttctaaacgttgatatttatgtctcgagggagtattagtatgtacgtaaagtttaggcaaaatttgttacaggatactcaaagactgtggtctttgttgtgagacacccgaagatcgtgtatttgctcgtggacactgtaaaaaagtggtaattagctgctggacactcttcccattattttattatttccggtcaagatgaagagagaaagagttgtgtaagtaccaaaatgccactggacactgttcttcctctctctatcttttttcccttcttcttccttgcagcagagcagaggtgcgagtgtgcgacggcggctggcccgagcctggacggctcagccatggcgaggcggcggcggggcggtgtaggccccacatcctttctttttctcttctttctctcctctctcgagcaggcgtggtggcagacttgcgtgaggcggccggcggcggagcagggggcggcggcgctggagagagggagagagacggccgacgcgatggcgagctcggcggcggagagtagcggcgcgcggcacggcagcgggggagagggggcgcgcgcaccgcccgtcctccatcgcgatggcgtgcagcacgttcttgtcctccagcgacgccggcgtgccgacgtcggaccacgaccaggccacgttcttcttgtcccggaagtccagcaggatgatgaaggaggtgtctgtccgtgggaacatggtcgctgccatgagcgtgctcgtgccgtcgagtcactggagcttgtcggcgtcgccgagtgcacagcccggcggctcgtagaagaagtcggcctgctcgccggtggtgcagtcccagacgccaatgccacctatagctgactgaggtcttatgatcattgtgacaggatgcaccctgcatccttaaaccgtgacagcctctgcaaagccaacctcatacacactttgctgctcattgctgatcgatcacatgatgcatgatatggccattcatgtagagaagaatccggacaagaataactactagtggatcatggtgcagttgcagagattggggaggaagaagaacactcaatgaatgtcccttgttgcccgagacgcggccgattcgcgcctgccatctccagttgtacacgcgcgatgcggaagaggtggcgcaggtcgccgggaaggcagttatacacgcgcaggtcgccgccgctcctccatcgctcatttgtacacgcgcacagcgctgccgtgcgcgacgcagcagccgccgtcgggcgcggcgcggacagccgtcccgtcgcccgcggcgttccctgccatggacgccgccagatgcagctggtccccgtcgaacggcccccaccgtgcctcgcggaagaggtcgaggaggccgtaatagagcgaggtagagcgcctcgcgccccccggcaaaaccttcgcgttgctgtcgaagaagaacagagaaagagagattgacaagtgggcccatggacaaacttgtctttaacttaagtttctctctccgttttcatcgaaaataataaaataatggcaggagtgtccagtagctaataaccacttttttaccgtgtcaacgagcaaatacacgatcttcgggtgtctcacagcaaagaccacaatctttgagtatcctgtagcaaattttgcctaaagtttattacttacatcatttcagaccctggggatggaccgcgtgaaactcctgtcactcctatagaaagaaataagcagccaggcaactgatcagagaaggaacacctctgatggcacaacaagaacacttgaacgaggaaatgattcagctgtgatcaacagaggttgtaataaaaactgttaaaaactctaataagaagttactccttacggagtaataatacttgtcattttgaacaagtctattattaaactttaaaaactttaaacatatgaagaccatatgtatagattagtattaaaaagtcttttcataaaatcatatgtattgatatttctatatatattgtaaaagaaaaatagtggtcaaaaatatttttaaatatcatttttgtccaaaacgacacgtattatcaacccggagggagtaacagatatgatagccagttgaaggattgtttgtctgttcattataaattttgtttcaattactcatacatattataagattatttgtaatgatgatcttccttttttttcttccctgccacgcttcgtattggcatggtcagagtcttcttcatgattctctatgtgttatgtgttgacaaaaaaatccacgtttggctgataatgtcgggtctgtgttggcacgtactaggtcgacgaacacaacggcctgggagatctgcttagcttctgtgcagatccaccggttgataagatacgggcgtgccagtcagtttgatcatgcaactgacaagatatacaaatagcatatcaataagccaattggttgtcaagccgatggagtaattcagctgatgccgataccagccgatgtcaatagggttttgagcaatcggatatatgtccaatatagataacgatataaatacaattgattgatagcaatgtaataaaacaataataacatccagtagaaaccaatcggctaacaatgatataatagaataagcactgatccgaaggttaaaacatacatcggctgaatgtccgatgtcataaaatccacaagattagataaacaatgaaacctttgttgcaacgggctaaatccaacttgtatgcaatccttgtaagccgaagcaacgtccagataactcatttgctgaaacctcaatgaaatccttattagcaatcaagaagcgggctagagattatggttctaagcacgacttaatagatcagacttaactaatgcaatactaagtatgaaaagaaacataatatctagaaaatcaaacatttttgtgtgattttcagggtggtagataccttagctaatctaatctagtaaaatgatttagccgataccagcataaaccctaaagcgagaatcggccgatatatctaaattgatatactaagaccagattaactaagatatatgataaataggtaggtaaatatatcaattgaaccagagcaatccaagaggtcaaatacactgatgcagccttgaacgacgccgatgaagccaatacaattgccagggccggcggaacataggacttatcccttcgtcagagattgaaagccgatgcaacccccgtcaagtgccaagtttcgtcaatgataagtaaaaaccttggtaaagaggttggcaatgtgccaagagtagttgtattgatctaggatatagtttacaataaccctgggtgcacatatttatacccataagtagatactagtccttgttggataagaaataaactttcctaaagataaaaggaaaacataaagtccttattgacactaagcacatttttctaaagacaaaaggaaactaacagactcttcctaattaatagataacttgccatgcatgctgcatccttcttgaactcggtctcttctggataagcttccctgaatagattaatttccttaaccgaatatagcaagaatccaactattgccgccttgataattcccatcggccgattacaggactctgaagccgatactgattctagatcgatgatgacttcggggcttactaaatttcactgttaacactatgtcccttctttcgaaagcccaacaacattaattgtcaagaaatcttcagaatacatttgttatagtaggggcctattgatgagaatgagagggtttattcttacacaccgagttgaataatcatgttcttaaattcacatcatcacatcacataccaaaattatcgaatactataaatgtacaaacttattgaaatgccggtagaaatatatcaatatttgatattgtcttgtatcattaataatcgactaaattaaccagcaagttcgaatgtgcaaatattacaatataaagaatgcaaatacaaaagatcttagacaaacaaaaaaaataaaacaatgccactaccttactctgcgcttgctcttagacatgaaagttttattacgtcttaactttagagaagatatttcactcaataaatatgactaagaatgattcaataaatcatcacataaattgtttctcaacttgttttcactagactcagtgcagaaaaaacactctcaacacttacagcggttaccgccggtaaaatcaataccaatttaagaagcaaatacacaaaatcataaaaaaaacatggttgtttgtttcaaaaagcaaccaattgttccaaacgcatgaataggtactaaaacaattttgagtacttttgtttttgcaccacataaattttccggtgggctcaccgactcgtgtaaaaattatttttcacaatcaatggtgtcaagcatattcccatatgcctgaaaacacttttgagtggtttcgaatggtttcattttcgcaccacacaaactttccggcaggcccaccgactcaagtaaaaatttctcacagtttggatgtaaaccaaatctattactttggaggttttatcttcctgaaagatttcaatattctctttacataccttggacatgtcttgatggcttcatgttatttttagaactattcaccttaacaaccaccgtttgctaaggtgatgaacatcacactaacatctacccataatggcatccaatgcacaattctgcgacgcgtgagtcacatagaaatttttcacaatgaacgcatccaatccattggtatgaaatttatggtttggtgctttttgaaccattccgttccggtgataaacttcgcaaaaccataaacccagaatggcattcaatgcccaactttacgttgcgtgagtcaccaaaggtgagtattttgataactgagcagaagaatatgactatagagttcgaaaacccgtaaacacgtaatattgcttgaagttacacattgagcttttgttttttgcgggcttcctgacccatcaaaccttagcttcatccctaagggcggcttgcaaaatggcaccccctcgccgccctttcgcagcgccccccaaacccaaacaaaaaaaggggcattctagagggcggcaatgggtctgcctacaaaaaatcctaggccgccctcacagcccttctgtaggtggcccttagcgcgaaaaaaatgctctctgagaggactgaaagaaacctccgagaggatggcaaaggggctgcctgcaaaatattcatccctcggcgggcagtcgttaagggggttccaatggccgtctgctacgtaggataaaacttctttccggagagcgttttttaaaaaacgccttctccaagggcgtgaggcgactagtattgcaaaatattgaaacaaaaatcatttttcaatattttagtaaataaaataaaaaaatccaaatcgacagtagggagaattgactgataggttggaattttgtggatgcctacgaaatagcaaacacgataaacatgcatgcagagagcaagctagctaattcggaaaccacacggaaaatattgaacaatagtttgtcccaaaaaaaaaatacttcaagagatatcccgcctcttcaacttatatattatgtaccgtgataggaatgtggcatgcatggttatctcgcctcattctcagtcaacgatttcatcagcctggatataactaatttatcaccgactcagattgaatcagtcgtgttgaaaaattgacatattattcagcgggaaaattaataacccttcttaattcttatgtgcctaggtagcttaacttgtcaagggatttaaatactcctaccatgcaagtagctagcatagccaagctacacacactatctgcagcagcgaactgaagtgaatccggcgaaaaaatttctgatctctgaagcaccatggaagctactgctcgacttcgcgtggtggcaatcctactgatgtcgtcgctcttgctgtcgccgccgtttcttctcgccgacggctcatcaggaggaggtagcagaggccgggagatgaagcacgatgatggccatctggttattgctccaagaaaattgacatggcctcgtcgagttctaaactctggtaagttcaaataggacaaattaattatgtctctctagatctccctctcctttgatgcaaattacagagaaattcagctgccagttttaatagaaggttgaactgaatcctgagtgaggtgcatacaattcacgttttcatatatacatatggctcttttatttcctgggtacaacttacaagtgaaacccacaccatacttacacacctgctcggatgtgttctactccctccgtttcacaatgtaagactttctagcattgcccatatatatatagatgttaatgaatctaaacacatacatatgtctagattcattaacatctgaatgaatatgggcaatgctagaaagtcttatattataaaacggaggaagtaaataagacttttttttttcaggcgatcaaccgaaccacgacccgatacataactctcctatctccccaggaagaagcaaaaatgaagtcaggcctggcaattgatgagagagtatccataaacacaaccacataaaggattggcatttaaatttttgctggaaacagatactctgcatttctgctatctgactttgagtggttgaaatgtggatctcacaaccaatggccctatgtgtcaatgatccaagtaaaaaaaaaaaaagtactgtacagaggagactcatcattttcgttgacagcctaaaacagtccaggaagagttttttttttcttcttagtttttttcttgggtgtgtggtctaaaagaacaacggcagtagccctggttattcagttatgatgttgttattgaaattattttacggatgtctgttcattagaatttagtggtaaaaaaagatattttcataggcaccctcttacattgcacatacagtcagcaagagcaattgtgcctatggaagccaatttctcgttgagcgcaattcctattttagttatccaaaacccctaataaagcatgacaaaagatggacaattaagccattgatataacgtttttcacgacatgtaccacatcattcaccatgatgttgtcccgttctttgaccatgaagaggaatcgataacaaatgaaaaaaaattaatatcgacctctttaattatgagtgggataagcatatgaaaaggaatttcacctagccacctatggaaattgttcgaggtggcttgctggtccacctgtgaaaaccactttgaatcgtctataaaattaactcttacaatagtgatactttgtgctaacacttattatatgttctagcactaacagttaattaattagtaacaatgggcggatgcgacgtaagatattgggcaagaattagcattttgcatgttaaacataatcaacgctttagtagctgtttagctcgcacgacggccgggtattattttttggtgaccaataattttttagatatcttatagttgagggaaaaaataattatgccgacaatggagtcgcggccgcgcgcccaaccggtaggattgcatgcaaattaacaagttatttgcgatacatgaagaaacacgcttcgacagcttggttgttccaatgtccgcatatcgtgtttacttcttcatatgcatttcttgtaagccctaatacttgattgaccccttcatttttgaaataataaaatcttcagaaagttatgtatgtaggcaatgattaattaataaatactccctccgtcccaggtttaaagttaaaagttaattttttataggacggaggagtaatagctagaaaaacatctttgtatggtcaaaatgtacgaatatccccctaggtttaaataaaggatggaccacgcctgctcacccatgccaaatgcccttccaccgcgcaacatctcagccaaaggtagcatatctgcactcggcagcatgtgtatacacaagcctattgccatgttttcacggcctagcattctccacattgcaaagaatgctaacgataactacagatttatatctaagaaagagggagaacttcatacatggcacactacatgctacatagctacgtgacatgcctcacgaccttctcccaccactcactcataaccctcatagtaattttgttactctcaagacacgctctccacacacatccataatagtaatatttttactgcaacagcctaaagagtgggctagggatgggaaaaagtgggttttctgggcttagaaggatgggctggcggcgagattggtggtgggtgttgacgatgggcagaaggcgtggcggcggagctacgggaatggaagcactagcggtgggtagggctagcagtatggatgagggaggccatggcggtcagtggtggtgaatcatacccgatggcataggggaatggtacccacactggcttaggatggaagagaggtaggggtggaagggggaggaggccggtcaggtatagggattacaagcaccattgacgtcttctggtcaggtggcaaggttaggggcaccagtcgggcgaggaggaagaggtgctgaaagactgtgcgcgtgagtgcgtgaacgagcgaagcgaagaagagatataaggggatacaagaagagtatgcacgaatctcaatgcaatcctaaccattaaaaaaatacttcatccgtcccataatataacaatctagaattgaatattttatagtacaacaaatttggacatgcattatgaaatatcacatctggttctaggttgttatattatgagacggaaggagtaactgaattgaatggtatttttcagttgactagacggtccttaatttttcaccccatgttactatctacctattgtcataacgtgtttttcttcaccgttgatcaacccaaagcatttgaattgacttgttggacgtctcacgtttgattgggtgcagacttgacaaacgtaatcacttgctttcactgcccatcaatgtcaaaataaatacaatgatgaaatattttctagtgtatatatgaagacagagagcgcatttgtgcatgttaaattggcacgcatgcatgcaaagaagtggtcttcgctgttccttttgacagtttgactgccggaatcatcacacagattgtttatgtctgtcagagtgtcagcagaaacatatcataattatagttgagttgaataggtcacctggataagacattgaaccttacctatgaagtttacgtatacagcaaacacatttttctgaataatcacctagggtgtgtttagttcacattaaaattataacaatatgacgaaaaaattgaaagtttatgtgtagaaaagttttaatgtgatagaaaagttaaaaatttaaagaaaaaagttgggaactaaccaggccccagcagagagagtaagagagcgcgtcgataaatagccgtacaagggcaacaggtcaggcacttattcagttcagttcagacatcacctagtacaatggcttcaccggcaataataaccatcctcgccgtgtccctcctgctgctgctgccgccgttagcgcttggctccatcaccggcggcgatcaacgacgcaaggagccttggattactacgatatgtgagcagtcgatcgatctctgaactttcagaaaatggaactttctggtggtaactaatatttaactgagcattaattactcatgtgttcatggcagtgaacggtggcggcagtattgcgggcatggagctgcagcaacgacgacgaggaggccatggattgccggtgatggtgagatcagcagcacggcgatctctcggaggacgatcgacacccaacagtaaggccaacacaacacacgtaatgaaaataaacattaagtaaggatactgcatataacaggaaggtaaaactaattagagtaaatttcagaaaactacatgttgtatggttcaaattgcagaaaaccacacatattttgacagttgacacttaagtacatatattttggtagtttagtttcacaaaaccacactatcaatgaatggattcacccgtgagatgatgtggttgttccatctaggatgaggacgtggcatcctattaatttcgtgcaatggctggtaataggatgccatgtcctcgtcctaggtgaaacagtcacgtcatctcgcgggtgaatccattcattagtagtgtggttttgtgaaaatacactaccaaaatatatgcacttaagtgccaagtgtcaaagtgtgtgtgattttctacaacttgtactacaaaacgtgtagttttgtgaaatttactcaactaattaatactccctctatctcaaaatataacaatttctagcctttagaatttgttctaaaatataacaattttttattaacattcttttcctaatcaatcacaactctccaccattcagttttcttacatacttccacttcttgtctaatcataaccttcccccatccaattctacctacttttttaataattgtctccaattctaaaaatgcttatattatgggacagagagtatataattaattaagtttaaaaaacatgttaataaaaattgagatagaatttgtatcttaataaaaagaatgagatttcagtactacgagtatttggcagtctattaactggtaccctgatcggccagttaggtgacattaattgttttttttttgttttttagaccctggtgatggtggacgtaaccctccagtctcccctgcacgagacagaccagggacggaagcctgatgaaatgggcaactgtgccctctgtgcccgagagaaattggtcccttggcagaatatccatgatttggtctgtgtaattttgtgcgaaaattgatcagaggcgccacacctgatctcagtctaatgggctcagtttgcggtgatgttgtactacatgctgacacaataaacctatctgacaacaatctgcatgccacaaccgaggcaaattgatgatatatatacagtgcacaaaatttattcagatcagattacatatttggataattttaccatcctttaatttagacgataccgataaatactatatttttctaatatcaaattttaatatctacgtgtactttcttaagaactataaaatttctcaatatatttagttacacacaagctagcactgtgtacgtatcatagccacagtagtgagtagtacactgggacttcaccgaatcagtctttggatactcactaactaaggctgtcgggcagagggcggtgaccaaaagcaaccctcccgcgggcagaccgacggcatcggctgcgggcgccagcgcgcccgtggagctgcaaaaaaaaacaacaacattaaacacaaattagtttgttggttcgtcgcatttacgagcttaattggtgagatcagcctgagaatatcgatcatgactgctcacaaggaggggtcaccggagtatggccgccgtccaccaccagcttgcaccggtagccgctcgtcgccgccagccagagcgccacggcgagctgaacgacggcgagtagacggtgtcgccgtcgcagcggcagaagcgccatcgcgacgatgtgctcaattagctcaggacggacgctaattaaagctaggtaaagtagagctctcgatcgatgcggtgaacttggccggccgccggtcggtaggtatgtacgcattatggacgtgcatgcacacaggatttgacaacagctagcaggtgattcacatgtacaagtggcgctgattagtcttcacttatatcctctaggacctctgctgtgggtgtgggcgtgtgcctaatgggcgatcgatcatccctatcccctctattacgctctctccccccttcctcctcccattcttctcttcttactacaccataaatttttaaaaaataaaaaaacaaagttggaaaaaattatgtatagaaatactatatataaaaaaaatatttgaatttaaattcaaatttgaaacgggtatgtaaacgtttgacttataaacttttggtctataaactttaggtgtatagaaatactatatataaataatatttgaattcaaatttaaatttgaatcgaatatataaacttttaacttataaactttgtgtctctaaactttaaatgtgtaaaaggtgtacaaactttaggtgtataaatttattaaaataggaaaataatacggtgccaaaaaaggaaaccacgtggaggagagggggtatcggctaatccgatcgctaggggcgatcgatcgccccatagccttttcgtctgctgtgctactactagttctaaattatttaaaaacactcgttgtattattttaaaaaaaaagaaaaaaacattttttttattaaacactcgttattttataagcaaatactattattttgattctactcactcgcaatttatattctatatttaacgctttgaatgagcttaaatgaaaattttgtcaactacgaacctgtagacatagtttagatatgtatacgactttcatatacattttgtctccatccgagatcatttagaaatattaaatatacaaatagatatgacaataacacattttcgcacatccaaatgtactcaaataaaaaaggtgataaactacagattgtagatcttgtcaagttctacaaattcataaaaagttaggtaaacaacacatatatgagtgatgtcatcatgagtgtcgattttaattgacaaccaacatctagaatcataggtgccggtttttattgaaaatcagtacacatgtgatctccaatatgtgtcggttcacaataaaaatcagcacctgttgggcgcactcacaagtaccggtttattataaaaactagcaactatgtaatgttcataggtgccactttattataaaaactggcacatatgacttggagggattattggtccttttttatgaattgcaccaataataaggttatgagcaattttactgtccttgaggaggtaccataaagtaccattttttctattataaatttggtacctcttgatacctaggtactacgaggtaccatgtggtactaaattttacactaaatttttggtacctcatggtatctcctcaaggaccgtagaattgctctaaagttataggtatcggttttaatttatagacctatgaaaaaggcaacaaaagtctcacatatgtcggtttttacgtaccgacacatatagtactagaaaagtgtttttcctaacgaccaaaactggtttttgtcggcggtcagcagtgtctctagcaacctaaggctagcgaaaatatatgattttcgctcgcagttgcggtctgcatgtaaaaattgatttttgcttgcagacacctatgaggaccggcagcgaaatctttttttttttttttgcaaaggaaaaaatcaatcaacactcagaaacggtgctgcattttcaaattcacatttagagatccagattcgaatcaattcaaatccacatcagatttagattcaaatccacatcaagaaagcactacatcgatattttccactacattttcaacgtgcaaacatcaacacactgaaataaaatagcaccaacaaatgtcgatcgttgtggcaccgtcagctatcggcgtgctggtcatcgtcatcacaggtggagtgagagtgagagaagaacttagctcggctagatccggagctgtgccaaaccagccgtcgctgctgagcctcaccgccctctccttccttctccgagtttgagggcgcagccacctgcaagagaggccactgccaccactccgtggatttagttttgtgatgaatgttctgggatgatttgatttgttgccgttggatttgtgattcagttttttaatgaaatttttggttgcatcgagccctttttattattattcttgagacaataaatgtgcggtttcaaaatcggcacctttgatttttctctgacagttgtttagttatttagttttctttagtactgtctgcaaatcaactccttgatagtactgatattaatttggttgacagagttgtttttcagatcccggggacggcggacgtgatcctccggtctcacctgcagggacagaccagggacggcaggctgattaactgcgcccaagatcgagaaatttggtgacttggcgtaaaaaaagaaaaactcagcacggactgaatgaaacaggacaacaaaataatgtaccctaaaatataagaaactagcaccaagtagtactactgattatactgcattgtgcatagttttttattgactataaattaaagctgatgcaaattgttgatgtgtgcaaatctgatgcaccaagtttattcagaaaacacacgtatagtagtacagtgcgttaattggtactccatacttaattttctcaatctttgttgctcgatacgacgacacatactatatagctaaggctgtaggcgcaagtgctggccggagcaaccctccggcggcgacggtggcggagggcgatttgcctttggagctgcaaagcaaaagggagaaaaaaaaatacatttcgttcgtcacatgtccatgatgttaatttgtgcgtgcaccggtgaagaaggatccggccgggctcgccggggccggagaagaagagagaaaggtactcacgaggaggagtcgccggcgtacggccgccgtccaccagcacggtcggcggcggcggcggtggcgggacggcgtcgagcttgcactggtagctactcgtggccgccagccagatcgccacggcgagctgaacgattgcgagtaagcggagtcgccgcagccgcgccatctgatcacaatcagaagaaacaagattttggagtgtcttgtgtctactatagctactgtactaaaatagcggcccggctgttcaggatttgacgacagcagcttacgtactccctccgtttcacatgaatcctaatcctgaagattaatttggatacacgctatgtccaaattcattcaaagaattatttctttttacataggaagtaattattagctcatcaagtgtacacctatatgccaaagtactcccttatactctcaggcatgctaggtagatagaagtgataacttattttttctaaaaaaagggatcatcacgtgataataatacctctaatatacatccgtcccaaaataagcaccaacctcatattagaatgtaacacatcctcataaaatataaatgatgtatcacattctagcatgagattggctctatgtccagattcattgtaatatgatgtgtcgcacctatatatattagtctaactaggatgatagcccacgcattcgcgcgggcatgtgtattagtttgttctgaaaatagttctaacaaaataaagtgaaattaaggtaaggtgttttctatttttaacagggtgttcattgtatctctttttgaagaaatctcgataaacttttgctggcaataaatgtttttttccaccttgtcaatcctctttttaattgattcatatatatgtgtaattcgttatgcatgtgaatcaataatgataagttcttttaaaactattagttatattttgaatgtagtgattgagtgattataatttcgaatttgttttcaaatcaaattattgtgttattctaaattttcattttaaggattttaatttgtacttaatctcgtatcgtgttgtatttggactcatcttttaatatttattttattattattccaaattttagatatttataacttatacttttatatggactgttttatattatacatgggatcttgttatacattttttaatagttttaatggttttttttaaaaaaattgaatgtgtattttaatcaaattgcttattttttctgaatttaattctgaacacctcggtgatagaaacgtctctctctggccctcctctcggtcctttgtccttcacctaatcatctagcatgctattaggcttaggaagtcatggaaagtctatattggcgcttccgtcggtgtccacctcgctaaggttgtgttcttcccccctcctttcccaacttaactctctcgttttcggtgcacatgctttccaaactaataaacggtgttttttctaaaagttttctatagaaaaattgctttagaaacatattaatccattttataaaaaaattaactaatacttaattaataataatctaatgtaatgagtcgctttattttacgtgcgtgggagagattagctccaaaacctatctaatgaacacaacctaataatatattgcagctccgcctccgttgagttcaggcccagggtatccaccatggttccaaactctttgatggtggttgaatctagactttagactcacatatttgaattcatttgtcttttcacagtgcaaattttgctcaaatatttgtagtcataatggctacattatctaaattttatatagtaaatatgggtaaatggatcttgaattatgtatttaattataaataacatgacaaaatgcaaataaattgagaaaagtgcatgtaacttgagagtcatgatcatttaactatctgattattattttttatatattatatgttagctagaaaataggaaatgttggctcgaaaataggaaatgttggctcgaaaataggagaggagactgggatcccggaggagagagttgaagggttgagagactacgtatgtacatgtgtgcccacacacggcggggttgggggtaccatattttcgtgtattggggataccatattttttttttgagagatctaatggttaaaattagtgggtccgcctatttaaagaaatatcaatggttagtctttttcttttttatcaaaacttttaggatttttttctaatttattagatcgtcaaatggcatcttaagaacatttgtaaaatgccatgtgacagtttgagagcgtttgtagggagttcaatgaacttttagtatataatagatgtttaatggattttagtatataatatatagatagatgtgtaaagaatataatgcagtaaactttcttcaaacattatatacgtttatgatgatgcagtctaggtttgcaaagttataattgtttgtttttaataatgaatgttatttcaattatccttagaaattataaaaggaaaggagagaaatatggacgtgataagggtgagcggtttcgcacgtgcgtacgtacttacttcatatgtacggacttatgggagagctggggccgttgtacattaatacaagggtttataatatcggacccactaatttaagtgaatattttaagggttagatattttgcttttgtagaatttctattatttatttatcagagcgccacgtggtagcttaggagtatttgtaggggtggcatgtagcgacttaggaccgatttaagtgaatatcgatggacaaatatttttgttacaaaataatataaaataatgggtacataatataatataatggtgtaaactttattttcaaatattgtagagctaatttatttatgttcacttgtagagatttgtatgctggtatattctatatttgtaaagtgacttttattcaaaatttattatcacttattattattattagtattattattattattagtgctactattattattattattattattattattattattatctcaattatataccggaaaaaaagagaaagaatagtaacgtaccttggaaaaaaaaggttatgtacgtgcatgcaccccctttaacagatcgcatgcaagcagtaacgtacctatatatggaatggaacagaggagttattttgagataaatctaatctaacggtttataatattggacccaccgatttaagtgaaaatcgagagatagatatttttcttttttctcagattttttagaattttttctaatttattagagcgccacgtggcggtttgagagcgttttgaggaagcttcattgcttatgatttagggggaaaatattgtttgtgaaggatcaacttctgtaatttttaatagaaactaggaaggaagcccgcgcaaatgcttgggtaacttatttataaaaaattactaaaagaagtcatacttcaccatattaattataagaaacgcttatttattatttataaaaataatgctaaagaatcctatatcaccatattaattaattataaggaccatagatcaccttataattatataaaaataaatgtctagacacaacaaaaagatcatctctacttcataccaaattgttcatgtctcacttgtgttcaaatatatgcataaatattttgaaatattactcctaccaattcatgggataaaaccattaaatttatgagtaagtatactattttttatgctggtatattctatatttgtaaagtgacttttattcaaaatttattatcacttattattattattagtattattattattattagtgctactattattattattattattattattatctcaattatataccggaaaaaaagagaaagaatagtaacgtaccttggaaaaaaaaggttatgtacgtgcatgcaccccctttaggaatggaacagaggagttattttgagataaatctaatctaacggtttataatattggacccaccgatttaagtgaaaatcgagagatagatatttttcttttttctcagattttttagaattttctctaatttattagagcgccacgtggcggtttgagagcgttttgaggaagcttcatggacttttagtatataatagataatagatagatagatttgaaaaatctcaatcaggttgagcaatcttcatcttggcatgcagaaaaaggggacacaatatatgttggaataatgggctaggcccaatttattctcaattaattctattggtccacaattaatactatggggattaatatcagcttgaaaatttaagtgggaagatctcaacttaaataaggagctattagagagcccctgttaaccggttgaggtggtggtgggacagccacgcgcgcgcgcgccgggctgggccgaggccttggcaaggtaggcaggcggctggtctctctctctcgttttcattttgtaacagacggagattgattcagtaatcaattcggttttaacgagagcgaattcattcgatgttaatcatgtgattaattacgcagattgaatccgagtgttatccttgcgctacaattcctctcagcaacagacagaggagtaacatctctctatctcctagcggactgtctacttcctcctcgattccccttccttttcctgagctgcttctggcttccccggttctgttcacttgcgcgcacgggtgatcaggacgagcaggcctccggaactccgtccagttgcgtacctgcatgggtaggcgggcgatcaagtttttggggagcgctcttgggcgcgactgctcctgttcgacaacggttctacactgctacatcttcgccaacatgtcgacggacaacaccaacactcgcactggcactggaaagcctcaactagtacatgagcgttctcagggtatatgtccattcccttaccgttaattatgctgctagaagatttttctgttaatgcttatcgcaatgttacaattgcgttactatgtgaatgttatacttattttatgaaaagcatgctcatgctgagcaccatcactagatcaattctcattgcaaatgtcatgtttattatcttgttggtggacctgcagccaattttgggtcaagaagaagagaacgaggtagcggagaggtttgaggtgatgttgtgtggtggagaaatgcgtgagatgaggattgtgtccgatatttcacttcgcaccggttgctcgatctgaagcattttcggatttgtgattctattttgaacatttgtgttgtggtactgaaatttccgagatttcagaaaaactttttaaaataattcgaactaattttagccaaatctaaacaaatttggaccaaattcaaaaaaagagaaaaaatttgaaaattatgacgaaatattttggtgtccggtgagggtccgaaatttcgggaattccgaacgaaaattataaacattgtgcatgggagtttaattacggggatgggaatttatcctcatgactccctgcctttcaatacgctgggggaattgggaggaaattcatcttcacttaaaatataatttccttctatactacgtaagactatcggattgaatccaataaacttctaaactgcctaagatatctgtccaaaattagagataaattagcaacaccataccaaaccaaccaaaatgacaaattaattctcagtccaaaattacatgcatggacagtgcagcaacaaccggcatccatgaatccataaaccgagagtggccaaacagctgctacttcacctgcactgcaacttcttgcgaatccttaaccctctgaatctgataggttgtcaagataatcttgcatttgtggctttgacacgacgacgatgacgaacactgcctgattctgatggagcagaagctgccatttcccgatgggcacagcaagctattcgaccgaggaatctctaccttcgctgccgatgcaacctcttgcaccggcagcaagctggtcgtcggtgccgaggagaagcccttctcaatgttgatgttattccaatacactcctataatcgataatattgtaagctaatatattgacgtgcaattcttttacgtcttcgcgaaaaaccggtaatgtcgtaaggaaatgcccccaaaagctcccacgtgttcacccttccaacctcttacaggctagatgttgaagaagcatcctgggccgttggatatcaatccaacgcatagcagtagtcgaccgagtagacattgacttgggccgtgcccggcccggcccatcgtgcttcgtgccaaaacgggccgtgccggaacaaccccccaccacggcggcggcggcggcggcgccatggcgaacagcggcaagtcatcgccggcggcgacctccaccaccgcgccgccaccgggtcggccgaaggcgaaggcgccgcccctcaccgtcgagggctaccccgtggagggcatctccatcggcgggcaggagacctgcgtcatcttcccgacgctgagcgccgccttcgacatcggccggtgcccgcagcgcgccgtctcgcaggagttcctcttcatctcccacgcccacctcgaccacatcggcggcctccccatgtacgtcgccacccggggcctctaccggcagcgcccgcccaccatcttcatccccgcctgcctcagggaccccgtggagcgcctcttcgagctccaccgctccatggaccagtccgagctcagccacaacctcgtccccctcgagattggtcaggagcacgagctcaggagggacctcaaggtgaaggccttcaagacctaccacgccattcccagccaggtgaagggttcatcagttcttggttgttctggatgaattattcttgattgattgatttggtcggaaatgtgtggtgaatttggttgagatgtgatgtgattgtaggggtatgtgatatacacggtgaagcaaaagctcaagccagagtatcttggcctccctgggagcgagatcaagcagctgaagctgtcacgtgtggaggtctgttgttgtttttttttttttttgatattgaggatgtctggatgaaatggaatacaattcacaatttagttatgttgttgatgctgtgcgtggttctgtttttcagattacgaatacattgacggtgcctgagattgcttttaccggagatacgatggcagatttcattcttgatcctgataatgcggatgttttgaagacgaaaattcttgtagtggaggtattgcttcttatcgtctatatggttaatttgttgtcaattgtcattgttgctattcagcctgagaaaaaaaaaagagggaaactgtttcttcaagcacggatatcagtatattaccaagattaattttatcaacagaaggaaaagccacagcctttgcttttcaggagagattgattccaactccatattaactgataactgagtaccattttttcaaactgaaacctttgcggaaccaattggcagcaattagtgggaactatgttgcctgaagcatgtttcagtttccatactgaatatttattgtccttctcctgacgaaattttaattatctccaaatttaacttagtgaactgtgttctggaaattgcagagtacttttgttgatgactctgttacaattgagcatgcaagagaatatgggcacacccatctgtttgaggttattcccaaattttgcttatttcatatttctgtggaagaaaaacatttcacctagcattgctaattttgcccttatcttttttttttatgtatgcagatactgaatcagtgtgacaaacttgaaaacaaagctattctgctaatccacttttctgctcgttataccgcagaggtgagctatctctgttgtaatccaattttacttatatcattttatcctgattcaattagtaatctgtatgctttgtttcaactctgtggatttattttttgtttcaagcaagtttcaccaatattgttattttttaatgccatcattatgagcaggcaaaatgtgcccacttttcttgtagcatcctcctttcctcttaaaagtacacatgtttgtgtttcattctttacaaataaatacatttatcttcaatttttttctcaccatcattaaacatttcatcacatccttttcaggaaattgatatagcaatcaataagttgccaccctctttcagaagtagagttcatgcattgaaggaaggtttctgacaaagatgaagtgatcaatcagaaatgaagcattcaaccttactctcctctcgatgcactcatgtaccaagaactctttttttttttggggggggggggggg

SEQ ID NO: 27822 - DNA, 14336 bp, Oryza sativa
  unsure (1)..(14336): unsure at all n locations
gtagcaccccttcacacaccgaacattaacaatattttacatttttttggtcattggtgatcgcaaagagcaatcgttacatccatgctgtattacattatacatagagatagtacatgttgtggataatccctggcccctcttgaaaatacgaacataccaaaattcactcaatttcaagacaaaatggacaggaaatttaacctggctacccttccatttgtcacccttctatgtcgtccaaatgtttaattttctttccccattatattttttttcttgatgatgatgatctccgtggtcgctcatgctgcatgcctacgtgacgtcatctcgccggcggatcagcacggctcgccgggccggcaggagagcgcgccggcgaagcgtgtgagcctcctgacgtaggagcctggcttgggcttaaccatgtcggagcccttcaccttcctgttgatggcgccgttggacgcctggaagtaggcgccgttcatgaacaggtctccgtccgagcgccacgcccagttcttccactcccactccggcgcatagtgcctcgtgatctgctccatcacagcatcgactgtttagacgatgacacggtctctaaaatatggtcgatggtttctttttttaatatcaacatggtctttagaatacgacggtattgattttcgtgtatcgacacgatctacgaaacatgagactagtaggtgttacttcctccgtttcagcttatttgttattctagcaaatttcccataaacaagtggaaaattacatcgttacctcattaattacttcctaattgtttcccaaagcttatttataaaccgttgtgcacggttgtattgataaaggttagagatggaaagtactctctaaaatattttgcattccggaaaacggttattactattttgataaggaatttcaatgctagctagaatgataagtaatctaaaacgaaaggagctaatagtaccagttggcggcgatgttgggaggggcgatgtatcggttgccctggctgaggatggtagggctcatgccgccgccgatggcgtacatgagccagtgcgtgtagtcgttgttgacgacgtggaagaacccccaccggcatcgcggcatccgctgcacgagcccacggccgaagtggttgaacgccacggtgatctgcatcaccttatcctgcgggtagggggtgataatggatcaagatccatggtttttttcttttcacaactttacctaagctctcatatatttttaggtcaaatacaaattaaattttagcacaccctattttgaactcagccctcaaatttcgcaaattttaaaagttggaccatttattagcaaccttaattacctgcgggtacgagtcgctggcgcaaaacagcatgacgtcgttgtggttggtaaagtgcttgttgagatgtcacccccgtcgagccctgcangacgtcgatgagcccgtcctcgcacatgaacatgaagacgtggtccacccacacgtcggtggcggcgaagagcgagatgccgtcgccgtcggcccgcgtgcgggggccgatgtgcgtcggcgagtcacggaccgcgccgccgtcgctgtgcttcacgtcgtggacgtggaggctggtgatgatcacgttgcgggcgaactggacggtgatcccggcgccgccgcgcgcgatgtgcacctgcgcgccgcggccgtcgatggtcttgtcgctggcgacgaggagctcctgcgtgaggcggatcaccatggacttggcgaaggtgatccacagcggcgccgcctgcatggcgccccaccggagcgtgccgtagcgcgggttggcggcgtcgccgtcgccggggtcggtgacgacgtagatcttgccgcggacgccgccggtggcgccgcggccgaagcccatggcgcaccgggcgagccgcttccggtcggtggcccagtccttgcggcagcgccagcaccggtcgatcgggttcgtcgccaggcacggccccttgtacttgctgttcttcccactcaactctcgccggagaacgccgcgctccgtcgatctacatcgtcaaacacatgggggtaatggattctaatatctcgaggaaattaaatatcccctcgtgcatgcacatttttcaatcaaattcaatgcgaatggctgaagaaaattctaaaaaataagttgacaatgtagagtacggtgccaaaaggatatttactggagggattaaaatagttttattgaacgcatgcgcttttgtcatgcaacgataatggcaatctaggattccatcccccgatttcaaacgtaagtttgaaagaaagctagttcaaaattcgaacaaaaacttaaacataatacgaattccgacaaaatttgaacgaaaattgtgtgaatggcatgcctgatgacagcgtggttgaactcgttggtgacattgaaggggtccggtttgtacacctcctccgccgccgcctccgccgccgccctgcgcttctcccaatgctcgtcgaactcgcctatgccggcgttcgacacagcggccgccgccgccaggaacacgccggcgacgaggaggaaggagccgggcttcctccactggagcctctggtcatccatggatatatatcttcctatatattattctctttgtctataactatatactatttgtcatgaaactttgtttctctttttttcttttcttgattgtttaaataaaaaaaaaacttaatagggttggattttttttggggaaaatgaaagaaccctattgctaacgtgcgtggattgaggaaggagagggttatatatggaggatgagatggtataattagagaagaggtgtgaggcgaggaaataggcaagaaaaagctctgggttttttttttgtgtgtgtttgtgtgatttaattattggtggtgaagaagcttgtaagaacttgtgtgccatcaagtgacattactttgtttttttattgtgtaatatttggcgctctattctttgtagggagagacagggcaaagggttagttcaaattaataattcctgttgatcattttttttagattaattgatttttattaattcagcctctgtatccacgaaggatatacacagccattttttttaggaatacacatattattgtattataaacacctctcaaacaaagattgaaaaggagataaacacctctcaaaggtctaattggattcaattcgtcctccagtatatcccgggattggacactgtcatcgacgtcgtcctatttctctgaagctgaaagataaagaccacccagatgaatcacaaattcgtcgaaaccgatgaaccaaattaaatgggaaaattcttcatctaagttcatacagaaaaaggacctgggtcttttcatcacgagctttgaaaagattgtagacctccgagtgatcataacacttggccatcagctggtacagctagctttgggattctaggcgaaaacggaattaaatcacaaactgataaacaaaatgcaaaaatttgaatttcttttatgttgatttggataatcggaggagatcgttgaataggcgaactgaccgtgctgcatcacaaccggtcgtgtacacaatcatttttgcagaatgtgggtgacgtacggtgtgtgacaatcagaaaaatctgacttttttttaaagatgcggacatccctctaaatattttttcaagaaattgtgagcgtgttggggattaaacatagaacctcggagttgaaactacacaccacttaccgctacactatcaaatgcatctcctactcttatcgtatcaatgtgcttggtagagccaaaacattggataggcatgtacatgaaatgtgctttcaaatcataaatttgacacgagtgttcgtatttatagctaattattctttcaatggtaggcgatgtacccgtcgacagcgatacgcccgtggtgacttcgttaatctcaagatatactgacccagtctttcggatgtcctcatatgagtagggtgtgcattcataaacggatgagtgtgcgtgtgttatgagcgtctacatttgtactgtgtttatagaaaaaactttggataggcataaacatgaaaggagcccccatgtgatatttacgtctcgcgtgggagcaacacaccctagcaaggattgcgtggtgccaccaggacatccgtttctatctctttttgcatctcttttctcaactcaacgtacacgcgtaagagttggttttaactttttttcgtccaaattgctgaaattgccaaataggacattacatgtccaatgagtccctccaaactccgttggcaaattgcaacttttgcaaatcaacctgtacatcgtacaccacctgtatatatagacagaagcgcacataggacagatagctagaaagaaagaaataaagcatatacttttaagcaaaaacaaatgtaaagagcatgtcaccttgtcgattctctatggtgatagggtccagggcaatgccatgtcatgctatcttatccctgtgctttgcacacagctttttcaccaaatccctgcaagaatcctcctataaatacccacccaattgatccatcaatttcccatcacaaaacacataaaactatatcatcatcttccatagctgtacacatcctatattttcattcatggcgatgacaccgcagctagcattttctcgcatgcctccagggtttcggttccagccgacggacgagcagcttgtcgtcgactacttgcagaggcgtaccgctgcgcagccatgcgttactcccgacatcaccgatatcgacgtttacaacgtcgacccgtggcagcttccaggtgctatatatatgcgcactttaatttgcatgagcctcactacatacggtgctctctactggtagtagaaatcaatctaaaccgttaatcttatttgaccgaatggttcagagatctatttatattatggtagtaaaatcgtggatgggtgttatcgtcagaaaaaaaaataggggtgaagggtatagtcgtcatttagcagtggctaaactcttttttctccttttttggctttttcgatgaaatatgagcgatgccagcgcaatagatgatcatagatcaatttagctgagaaaaaacataaatgacaaaataatttctaatcattgtattagtaaattactaatttaccttaataatactgatactagtagtataatactaccagtagagagcaccagagcgtcgatttgcatacgaggcagggcggaggcaggcctaggacaggtagggcttaagccctaggcttgttgcctccaaaatcatggttaaactctcttaaatcatcatttaaatttgggaaaagaaatgaataactaattaataacaccctacctttgtcctactcttagagtccgtcactgcatacgccgaagttctattgatagagcagaaaaaaattacaaaattataaccctgaaatgtcgaaaccaggaaaaaggaaaaaatatatattgattgtgaccctgatagatgcgatactaatgcaacatatattgactgtgtttgtagccatggcgatgtatggatcggatcatgaccggtacttcttcacgatggcggcccgagaggcgcaggccagacgaacgacaccgtcgggtttctggaagcccaccggcacaaagaagacgatcttcgtcgtcgccggtgggcatgaggtgcccaccgccgtcaagaggaggttcgtcttctacctcggccaccaccaaccatcgggcagcaacaacaacaacaaaacatcatggatcatgcatgagtaccgtctcatgaactctccaagagcggcagtgccgtcgtcttcttcggtgaatcgtcttcccactgatgatctcacgaaagagatggtgctgtgtaggatctccaacaaggacctgcctaaaccacccttcatccacaacagcttgttgcagttctcttcagtggggttgaatggtgatgggtataattacttgatccttgatcaccttgagcctccagcaatggagtatcctaatgttggcattggtaatgttgatgatgctgctgctggtactgatgatccgggtgaccttgatgaggagattgatgatagcatgcaaagaaaccatggtggctagaattaaccagtagcatcatgagtgaatggttttgcgggagatttgagttaaatatcagataataaaataataatacaaagaataaaaagaaaaacaaacctgtatagttagcaggttttgattcatttcgttgaactttgtgtgcttgttagctagcctatataccaaacatgccttggcgaggctttctatttgtatatagctttttttcttttttctattgtaaggttcgaactctattgagttgattgaataaacattatgcaatttatgtaacatattgtctataaagttctattggcatgcatattcatatatagttacagtcctttagttttaaattgaaatttcattttaaaagttcattatttgtcattgacaataatgacaaaatgctctagtatgttgtttccatttacaaatggaaagtccgtttggtttggctgttactgtaacaccccaggtaaccacgtacatagaatgccacaccaaaatacactcaaaaactaagtcctaaaattattagaaatttcggcagagtctcccttaaaaatacggacatcacgacaggcagttataagaaaggtcaataccgatataaaccacacaatccaaaccatcctagctccataaatcccacgtgaaaaataagaatcagaaccttaaatgacctttacaagttctatgcaaaacttatgctgagcaaaaattatagtctaaaactaatttcaattgtgtgcaataataatgtgtagtccaagggtgctactcccaccccatgccgatcgatgtcattaggtacctaaaaaccaaattaaacataagagtgagtaaagaatactcagcaagtacaatcttgaactagtaaaacatacgcatgatttatgcattaagaaaccaacatgaagggttggatttactttatttttaaaccaaagaagtcaaaagatagtagttccctcccgggcaggtgtgaatatcctcttagcattaccggtaagccgagcaagcgtgatcagcgcttcacaaggatcatgaataaagatccaaattgcactcccatagctacgcatggttcttgaataatgtaaacagaacattcggaataatgaaacatgaataacgtcatgaatttgaatatgggtcgaaacacgaataaatagcataacgtcatagccatacaatcagtaataacaagcaattgaataataattatgcaagtaaagccaaacaaaacaactcagttttgtccatcacataagtccgtcttgtacttactttaactcattcgatactccgactcaactcctccaacgttggaaccctccacacctgtggagcaaaactacgcataaaccactatattcaactaacgatggttacaagggatatttactaaaatcgaaacctagaacatataaaccttttaccgatttatattaaataacctatagctgttccattactgttttatgagtaactcacaaaccgtctaacggaaactagcaaataatacaacttcggacatctagacaaaattgtctacaactttcatgttgagcacaaaatcagattatgcctctgaaaatcccagattaaggaaaaacgaactgctgtcctgatttccggacccggtcagcagtactgtttttgctgtttctcctaaaccgtttatcggaatcgagtgaaactagcaccgttggaaagatattgacaatgactacaaactttatttaggacaactaacctgattcctgatggtttaataccagatttgaaaatacggtttcagcctagcgttcgatataaaataaattcgaaaaaaccggaaacagatcgtcttgaatataaattagaaacaactatagactaaaacggattacctagcagtactaatgtataagaaaaacgaagaatttggaaatattcaccaaattccccaaatttcccttcttctatcaaatttccccttctttccctccttcctgttcttttctgccttctctccctccttcctgttcgttgcaggccaacagcagcagcagcagaaacgaatatcggcagcaacagcaagccgtgcaccaccagcaaggaagagatcagatcggcaacagcagggttcggcagcagcagggaaattaacagaaacaacagtagctcacaaacgaccggctgcggacgacgacggctgtggcgaccggcgacggctgcaccagcggcggcaccggcgaagagaggaacagcagcggcggcggcagagtgcaggaggtgcggcggctagggctacaggagaatcgctcctgtttcttttttttcgtttgttttttttggttggttatataaagagactaaataagatctaacggctcacatctattcaatcctcgggacttcgttcggactccgattactataaatttatagtctattttgcactactcggcgagctctacgcatccacggttcccgatcgcctatacgaacaatggtttaaaagttgaacttttgcgcgtttgctctaatattccgcgagatatattaatttaaaactcggggtattacattcttccccccttcgatcgaattcgccctcgaattcgcccaatcatactctagaacacgggatattacattcctccctccttcaatcgaattcgccctcgaattcgtccagttatacctcggacaagtatagaaaggaactcataggtaggacttatataactcaccagacgtgaataactctggatacttctcccgcatctgtgactcaagttcccatgtggcctctcgctcggtctggtgcgtccagagaaccttgacatacttgatagttctatgcctgagcaccctctcagattcctccaatattcttacaggatgagactcaaatgtcaaatcttgctcaatggtcatcggctctacggtaatatgatgttcagggtctctcaaatattttctcaacatggaaatatggaatacataatgtacacctttcatggactctggtaactcaaggcgatacgctaggattccaactctttccactatcgagaatggaccaatatacctagggctgagtttgcctttcgttccaaatctcacaacacctttggttggagatacctttagaagtacttgatcgcccacttcaaactctaattctcgtcttctgacatcggcgtagctcttctgcctactttgagctgcaagcatgtgttgtcgtatttctgctatccgttctgtggtctgttgtacccaaccgggtcctaaaatagctctctcccctatggaatcccaacacaatggggatcgacactttcttccataaagtgcctcatatggtgccatttgaatgctagcatggaaactattgttgtaagaaaattctacaagcggcaaatgatcctcccaactgcctttccatgaaaggatacatgatctcaacatatcctctaaagtttgaatagtccgctcagattgaccatcagtctgagggtgaaaagccgtactgaatttcaattgagtatcaaatgcctcttgcacagattcccagaacttagaagaaaacttagcatccctatcagaaacaatcgagcgaggcacaccatgtaacctcactacctcgcgtgtatagatcggtgccaagtcactcgcagaataagtggtgcggatagaaatgaaatgtgccaccttactcagacgatctacaaccacccagatggcgtcctttcctcgtggagttcgaggtagcccaaccacgaaatccatagcaatatcatcccaaggccatacaggaacttccaatgattgcaactttccagcaggactcttatgttcagcctttactcgctgacataccccacatgacgccacgtacttggccacatccactttcatcctcttccaccaatagatcttcttcagatcatgatacatcttgttctccccaggatgcacagtatatggtgttcggtgtgcttctcgcaaaatctcttccttgactttagctttttgtggaacacataaacgcccatggaatcgcacagctcccgaggaatccaaagtgaaatctccagtttttccttcctttacacgtttcttaacttgttgcagcaaccgatcgtgttgttgggcctctagcactcgttggggtatggcggactcaagaatgactcgtgactcggtacttgccactccaacataacaataggagatatccatccgttcaaaatcagttatcaaacaactcatagttggaggaacgaccttacggcttagagcatctgcaaccacattcgccttacccggtgtgtattgaacgttaagatcatagtctttaatcaactctagccacctcctctgccttaagttcaaatccttctgagtgaagatatatttcagactcttatgatcagtgaaaatatcacaagattctccatacaggtagtgcctccaaattttgagagcaaagaccactgctgcaagctcaagatcatgagtggggtaattctgctcatgcttctttaactgcctagatgcataagctataacattgccctcttgcataagaacacaaccaaggcctactcgtgaagcatcggaatagacagtgaaacgtttaccaggttggggcaaagtaagcaccggagcagttactagcctctgcttcaattgttggaaactacactcgcattggtccgtccactgaaacttcacatccttatgtgtgagcatcgtcataggtttagtgataatcgagaaatccttcacaaagcgtcggtagtaccccgccatacccaaaaaactcctcacatccttaacattagtcggcctttcccatccgacaacacttaaaactttgcttggatcaaccgagatatcttgctgattaattacatgccctaggaaagccacttcaggaagccagaactcacacttcttcagtttagcatagaacttgttttctcgtagggtctctagtaccatcctcagatgacgctcatgctcctctacatctttggagtaaatcagaatatcatcaataaacaccaccacgaaattatctagaaaactatgcaacatgctattcatcgcctccataaaataggccggagcattggtcagcccaaaggacattactctatactcataatgcccatacctcgtggaaaatgcagtcttctcaatatcctcttctcgcactcgaatttggttataaccagattgcaagtcaattttagagaacaccttcgctccctttaactgatcaaacaaatcttcactacgaggcaatgggtacttgttcttgattgtcgcagcatttaaggcccgatagtccacacacatacgccaacttccatccttcttctcagtaaaaataacaggtgcgccccatggcgacacactccgtcggattaacttcttagataatagatcatctaattgtttcttcaactcttcttggaaaggacgagctaaccggtacggggctctggagataggttgtgttccaggaacaagatcaatacggaactctacatcacgctcaggtggcatccctggcaattctgcgggaaaaacatcaggataatctcgcactacaggaacatcttcaatcactaaaggcttggatgacttctcggctaaggcccataataaccccgtctttacagcacgctgcccaggaaataaccttgacatcacgaaaagagaatgcggaggcgcgctcccttggaaaaccatctcctcgcctgatggagcttccaaggtaatagtcttccagaaacaagagattacagcatgatatcggttcaaccaatccatgcccaagatcacatcaaagagcggtaagggaatcacaattagatttgccacaaattcctccccatcaatagagattgcacaacctggacatactactgaactagagattataccccctggagagctgacttggacagatcgagagacctcttgactaaatagattagctcttttcgcaaactcgattgaaacaaagcaaaatgtagcaccagaatcaaacagaactagggcatcatgcgaatcaactgaaagtgtacctgtaacgacatccgggcgaccaagggatgaagctacaggcatgttgtagactccagccatagctggggtagtagaggctgagacctgctggtgaggtggagctgaagcagaaggatgcgccataggcggtgcaggcaactggagtggagcacgtggagcaaaagattgaggcatgggccaatactgtcctggtaatggtggtggtgggtaattatgtgtgaactgctggtaaggaagtggataagttgtcatcatctgaacggcaccacggggagtactagtggatgaacctgaacctcgaggatagctagctgtcgaagaggttgctgaataggagctcggcttttgccacttgatgatagaatttgggttacgcttacataccaactccatgtgtccagctttgccacacccacgacatgccccagtaaacccacactctgctgaatggtgattctttccacacttaaagcaaattagtccttgccctggcacagggcgaatcaactgagactccgttggacgtgaagctgcattaggctgagaaccccactgcctaggtttagatgatggttgagtgacctgattttgtttgtacttcttgaaatgtggtcgctgcgagttctcacccccttcctaatgagctctcttctgctcattaccagtgacattaccagaacgattcttctgcgcagtagtaatttggagctcaacctccatccctcgagcctcctcaactgcattgaggtatatggtaggcaggtttcttcccatcacttctctataccgagcattgagccctcgaaagaacttcctagccttctcacgctcatcacttgccacgctaggcacaaagcgtacaatactgctgaactcccgttcatactcatcaacggtcttgcttccctgttggatattgtttaactcatcactcatcttgtccctaaatgattatggataatacttagctctgaactgctgaagaaaaacttcccaagtaatagcaccacgatcagggttccacgcttcaacaactccatcccaccaaatgtccgcctgaccagtcaactaaaaaggcatgaaagtaaccttctcctcaggagtcattctagatcccctcatatacttctccatcttgcgtaaccagtctgcagcattaacgggagtaccagacccatcaaatgtgtctaagcgcatggatgtccatctagtgagtgtcatcccctgagcagctcgaggagcatcatcagagacagcagctgagtggctaccaccctcctcctcttccatgtgctcatcctccatctggttcgaggatgctgcctcattatggcgacctctaccacgacctcttccacggcctccagcacggcccctaccacgacctccacgattaggaataggggattcagcaaccgagttgttcccaacctcttcattatcctgagtattttcaacttcttcattatggtggcccctaccacgacctctacctccgcctctcccgcggcctctgttagccaaccgaacactcactctaggtggcatagctatatcaaacacaagcatttatacgtcattagtttaacaataggttagacaatggcatgcaaggaaacacaatcatacacatatatatgcagcagaaacataaatgctaggaatgacccatgctcccattcctattgtgcaccagtgtgtcaagttcttttagatgtttatatataacccaagttctactcttattatttcctaccctaagagaaagtattttttttaattggttaggaactctagttcaaaattttatgttgatttatatatctcattacccagtcacttcccatggacctaccgcccgctctgataccaactgtaacaccccaggtaaccacgtacatagaatgccacaccaaaatacactcaaaaactaagtcctaaaattattagaaatttcggcagagtcacccctaaaaatacggacatcacgacaggcagttataagaaaggtcaataccgatataaaccacacaatccaaaccatcctagctccacaaatcccatgt

SEQ ID NO: 27823 - DNA, 12322 bp, Oryza sativa
aatctttagtcccgattcttattagaaccgggactattgtggaaatcgctcgaccctcgaaagatcatttctccagtagtgtttcctccgcctcgccgtcgcccgagtggccgccggcaaagccgcgaggctgcaaggacggcggcagggggcttctcgctccccaaagttcaggcggtcaggggacctgccctggcggcggcggcggtgaccgccagatccatgccgctcgaccggatctggtgggatggcgatggcggcggcgacggggacggcgacggcggcggggttggtgacgacgaagatcggggtgagcggcgctgggcggggatgtgggcgatggcatcagggatggcgacggtgttagagcggcggcggtggagtccacgaatccggcggccagcgacctgccccacatctcgcgcttggccagcaatggtggtgaggaggacggccggttctggctaggtctagatccggtacgtcctcggtcgggtcgggggtggcatggaatccggtcgttgtgcaggtggtgtgcatagtgcatataccttcggtgtgtaggtgcaggtgatatttggtggcttccactgtaggtgctatggttgagggggactccgaggcgaaagccttgctccgcttctggtgctagcaacggcgatgccctcgggtgccgttcaccttcttgaaggcgttgctattggagccctcgttcaacgccactaaaggatatcctctgggtgaaaaccttagattcgttaggatcggacgatgtcgccattctttcggcgtaaccttcttaaaggcttcgttttaggagttttctcccttgttggactgctgttcttaggatcagtacgtcaatgtcagggttttcgccggttttcctttaattaaccatgttgttgtaaggtttttagccccggttttccttataaactggatcaactctcttcttctatagtaaattgcaggaactccctgcatgtcccctgaaaaaaaaaaacatggctgactagctagctgtgtatgtgtacctttacatgtgtaatctgtgctaaccccactatcgcaagcctgtttgagaatactaatttcgatctgcagaacagcagcatcaaagagatgatgagaccggtgaattcgatgagataagctgggtttcgcgtcaggttgcaggcattcctactgatgtccctcttgctaatgcagatgccatttgattctgccttgtacgcttgccatcggcagctttggagacagggagacgcatcatggaggccatcatcatctcttagctccaagcaaatcaacactgtctcgtcgaatcctatcaattgtttgcattacaagtgtcattaccagagctagagatcgagaggcaacctctgacgagcatacatatcgatcactgtcgttttcttttgcttgcacgatttcattaatttgatttggagtttcgtacgttttcaggcggcccgggcgggtacacaacgaccctccttgttgctaggaatttgagagcagagagccaaggaacaaaggatgcaattgttattgcatggagcaatattggatgtaaaggattagcgcagaattggatgcctatgtgatcgagatcatgtggaaattagtatcagttgggtccatgtattttggttttatttgaagtttgtcaagtgtggatcctttggacgattgtgcgtgttttacttgtattgactaacataagttaggtcatgaaaatctaagcatgtaaggtggttatttagggcttgtttatttttttcttttttgtcgctttcaaacctaccaaattttggtagatcaacggtgtcaaaaaaaaaatggtagatcaacaaaccaagcatatattatcaatgctgtcctacttaattttggtaattctagaagtttctactcttaacaattatgatgaaatcccttctttcaataaagttaaggccaaaagctcaaacctcgtgcttccacgtcatcatcaaattgtgaaccgttggatgaatgcattagatcgcttttcaaacgttggatagaatgcagcatagagcccaatccattagtcaccgggtgagtctcttcgcctccttagtgccaaatgtagcccatataaacacaatggcccatctccacacacatctatatgtatccagcccatcaatccgtataaaagagctttatggctgaacaccccttcagttgacatgtgctacctaaattatctacaaaattttggatagggctactaaaaagaatttctccaagaaagctatttgtttttctgtttctccttgagattatacctcctatctaataaattaatgttaaccaaatcccgcagcaacacgcggggcatcctctagtttggtaaggcttaaaaccaaacatatctaacactatcaaaatttaatactaacacaaaatatgtcaaaattttggtagtgttaaaagtggttatgaagtgaacgctctgtttctgttgatgtacatgatggttggaactatgacgaagattgagactatgcccattgaaaatgcaaagatagaagcttcaaactagaagataaaaacaggggctttccaatcttcaaatcattttgattggttgaatttgtgccaaggagtagaggaggagcgaagttatagtgaatgtagtaacaatttatgatttaagctctttgtcaacaataacgactctgccagagtttgttcagtcaattcaattgaatttacaccgaacaaatataactgtactagcatgactttcaaacaagaagacattattttaaaaaaacgaaccatcagaactaatttatttttaagataatggataaaaattcgccaacgaaaaaccaaattagctccaaaaattatctacaagagttacccacggtcgccggctcgccgccgagcagtgcagtccgcccgacgccatgatttccatcctgtccacgtcgagaagctccaccgtgtttgcgcgttgcctcgcctcgccggcggcagcggcggcggcggcggcggtgatggccgctggataaagcgggcccaaaaaggatcgcggtgtacggtgcggcttgggccggaacgggattgcagcctacgtgagtcctataagtgttgggccggaacggcgttgcgtttattaataagtctatttagcccctctcaactcttgccccgattcagtcagtgggtatgagttgagggacaaataatagacttatttcttatccatgcggcccatacatttgggccgggacgggattattgccgcctccgtgaggcccgtgggccctggtgatttgacaggtgggctgggctacaacgagcctgcgctgcaggccgcctcggcgtcttcttctccggctctctccgccgccgtctcgtctccggcgcgcatacggcggcgagtcgccctggctggcggcgatggtgggggcatcggtgatcgtctccgccgcccgcacgcctcatgctccgccaccacgaggcatatatcgagcgcgcattgcgatttttcctttacccttctgggtttttgttctagctaggcaaggcagccggctaatcacgccgccgagatcgccggagcccggaggccgccgcccgcgtaggcccgtctccacccagcgtctcaactggtcgactcggtggtgatgctccaccccccgcctctgctttctcctcccccgctttcatcgaaggggtaaacgcggaaactttttttttttccttttgtgaatacactgatactctcttgtttgcttgggatgatgtcgatgcatttgagtttgcaacttctcaaccaaatggggaaacataaaacattatactttgtggtaatggatcttggtaaatgtccattcctttaggttagtttagtgcagttgcagtactgaaccattggaattgggatttttcaggagaggagctgtttgctgtgagtctctgaacttgcgtgctatcgaatgcttccatcaaaacagtttgtaggttacaagcgaaaaaacaaaaacaaaaaaaactgtatgtgcagttagtcgatttacatattcttcctgcaaatgctaaatggttcatggttcttatattttgttcagtaacagcaccctgcatttggctgtgtacaccccacaaaggtgtagaggccgggtttgataatcctttatctaaaaaaaaacagcaccctgcatgtgtgaacatcatgaagctactcatacaacctgaacctatgctgataaggcttcggttgctcggctgtaaatatctattatagcctggggattattatgccaaattattcagagatttgatgcttcaacgcagggacacgctaaacttgtcttttgttctctgcaactctttcaaagcatctccgatatgcatgcgatctgctggagattcctttgagcaggaaactccaatctgcagaattgatatgatgcaggctattctcgtgtctctttcttttgccatctgagtttctttcttctccatcattgttctctgatagtaagtgttggtctgcaatatcgatcacattgtctggaagtgccatctttacataattatgaaggctgagagcttctttaaattcagtgccagttggtctttttccggtaaacatctccagcaacagtataccatagctgtagatatcacccagaattgaaacctcattgcccaaaccgtactctgtaatcataagaaaatgttacataaaggaaattgttgcaagtttaagcatttatatttaaatttatatgtaggcttcagtctaataatatataatttacactgctgcataattatcatttgcaagaatttgagttttttcataacaaattgcacacatctgaatagcaaaacgatctacttaagtatggatcaatggaaaggtttctgaataaattagaaagaaaaccgtggattgtagctgttagaagcatacctggagcagcatatccattcctctcattgtagcccagccacttgatttctctaacatgtcactatggtcttgatgcaggactcttgcaagcccaaaatcaccaacgtgagcaaccatttcactatctaggaaaatattgcttggcttgagatcacagtgaataattggcaatggcctatgttggtgaagataatcaagtgcagaaaccacatcaatggcaaatgtcgagccttttgatgatatttaaaaccttgtcttccccatttgttttgacagcgcaaacgaaggaagccttagccacttctactagtggttgggaaccttcccctttagcacacaaagcgaaacaacggtttagggcataataattaagtattagctaaaaaatcttgaaaaatatattaatactaaaagcaattttcttataattttttttcaaaaacactgtttagtagtttgggaaacgtgtgtacgaaaaacgaggaaatagaggttcggtaagtgtagggaagaacacaaccttaataattatatcctaaattatgcatatagacccctatttggatagcaaaattttcaaattagccttcctcatctcattcccttgctcggtcggtgatctgaaccaaaactctgggtcgcaaccaaccatcaaaataaaggacgattttgcaaaatgtattaaaatgagagcgtgtgtgtgagagagagataatcaccgccgttggatcaagcaggaatggttcagatgccactgccccaatccttcctggccagtcgccgccttacgcggccttgccggaagtccagccaggagcaccgccacattgtcggagccaccacctccccctccttcccgtcgttcgtagcacccctgcatcttctcccggatccatcatcctatcttcatctccttcccgaacctctccttgacaatggaagcaggtgtcgagtacatatccttatatatttacattgttcaacattatctaaaaaaaaactatttacattgttcaaatcctttatattatgagacaaacaaagtactcagttaagcggagatggctgcttgttcaaatcctcaacgggaggtggctgcttgcaccttaagcggtaatccttgagcatttgttgccttcttctcagttactacttgtttgcttttgatttgtgtcgattaataaatggagaattaatcaggtaatgataattaaaataaccttcttatattttttttgcaaaaaaaataattgtttaataattcaagaaacgtgtgtgtgaaaaatgagggaaatgagggagtaaaaattaggaagataaagagccgaacacatcctaaacattgataacaactacgctaattatggttccactgataagccggaaaaaaatactatactagtaaatctgttatgaacacaacacaatgtagagaacacacaaggcacggggttttcgcctgaaattccatatctccatctaacagtctaacagactgtacattttaacttgcttcacgttacatgttttgttttgtactacattggtcagtcagactaatgcctccacgtccagtattgcctgaacattatggacttcttcaacaaaagaaacaatggtaaactcctacagaagaaacaatcaaacagtgtttgctcttgatttgtgtcgatttttaagtttgaaatgtcaagatgcagtatacagatcaactccagtttctgccaacttaagagcatgcaggaaaccttgacagagagctcgtgtcctgaaggtagctaaatcatggtcttctggtgcatagctgctggtgggttcggtcatttgggtgagcttcccggttcattcctggcgttgcctggcgcgttgacggccaccgcatttgcatccgcagtctatcgtcgacaagcaatgtgaagatgaaaaatacttgttagagcagattaaccatggtgttagataattcgatatccatataggcattaggcaacgcagagcttttgctatggatttgcagatggatagagaagacgacgacttcccccgcaaaaaaaaaaaagagaagacgacgacttacaggagcttgcttggaggaaccaagatcctctgccatcggttctggtcctttatgttcggttgttaatctcttaccatgctgcagaatgtgtaaatcagaaagtgttagttcaacaaaagatcacacaaagataccacaaagtccaagctgcaagaatttcaaagggctccgaaggatgaacacgacgaccgaggttcgagaatttatcctgctctggcacttgatacaacaggtacaactggatgaaaacagggaggacaacctaatgtggaaatggaatgcgaatggaatctactcagccaactcggcctacaaaattcaattcactggaagcattcaggacaatcgtgttaacttcatttggcgagcaaaaacagaaaacaaatgcaagttctttggatggctcatggtccaaaagaaagttctcacgtctgacaaactccaaatccgaggttgggacaacagtccaacttgctccctctgtgggacagaaccagaaacagcgacacatctcttcatggattgccccttcgcgaaacaggtatggacaaacatttggttgaaactaggactcaacatgcctaggtcttcttccttcaatggaaacatgatggattggtgggaagcttgccggagagaaatgatcaaagagcagagaaagaattttgatggcctacacgacatgggggatttggctacaaagaaatgctagaatttttaacaatgactatggtacagtgttacatgtggttgactccatcatcaacatgtgcaaagccttcgatgaagcgcaaatcgtttagatgaaaaaacgcctacttttgttgttagtggctttgcactttctcaaagtgctgtaacctcctccaatgtaaaaatctgaagacacctcttggaggtgtccatgtacgtgaaactgcttctttctcctttaatgaataggcagagctcctgccattatcccctcaaaaaaaaaaagaatttcaaagggctcgtttcgcataaatgcaaggtatagattctaaataatttgtatgagactatgcacaaccaaaaaaaaatcctgtgagataaggaaaaggtacaaccaatgctgccttaaatttcattcagatgaaaaggtcaatacatctatggtaagcaaaataatttcatcagcaccacagtctttctccacaactcaacagcacaagagaatttcgctatgtttctagcaccgatatggataaagattataattcacatatagcagcaagccagcaagaacagaactctacaatgaaaacctcattgttactccatcaatttcatacttttatattataagtcgtttgacctttttctagtcaaacttggttaagtttgaccaaatttatagaaaatttggcaacatctaaaataccaaactagtttcattaaatataacattgaatacattttgataatatgtttgttttgtattgaaaatactaatataatttttctataaatttgtacaaactcaaaaaattttgactagaaaaaaaatcaaacgacttataatacgaaacgaagggagtacataaataagcacaaaaggggaatgccacttctttaaacaaaagggcgcatgttaataaaagaatggagtaagtatactgttagttctaatgattcaggctcagctagttctaaggattcaggctcagctaaaaaggagacatctcaaattaaaatggtggacgtcgtgtcttgaattttataaatgagacaggacagaaccgctcattggaatgaactgagaggagaaagtacctgatctttggtctctgtttcagtaatttctctctttactccgatgttgtgaataaggcttctaaaatgaaaatataacatgaggcagggcacataattatacaaaatttaatacagcttttaaaaaaaggaaaaatagataccttgctgagtgtcccgtaggtttgtgatcatccaacaccatatcagagtcagggtcgtgcctttcatctggatcctcttgatcttcatctggctgaataatgagcacatatgcacaggacacaaatacattcagtcagcccttgagttatcacttccaagacatcatttgcatgcttatattaggaagcctggagactcacctcaggtagctttgtttcaggaattcgctcttgaaattggacgctaggtgcatgttgaagttttgaaagattgtccagaatattgcattttatttcctccagttgcttgtttgtatttctgttctccatgttacttgctgcaacgtaaagactgtattctggaccaaaatattcataatactcattgtaaggcaacttctcctgtagctcttcaccaagtgcaactcctgtctggccaaataaaaaaccaaataaacaatcagaggataaaaccatagctgtagcaacagatgttcctgatataagactccagcaagcataaggcactgccattcgcacttgttcgccatgtttagcctgctgtgtgttcagatttataaattcacaaaaggaaacgaaagcaggcttgcaaggtccaaagagccaccagattttgggttgctaatttattaaacacacctttgatgaaagctaacaactgaggaacaggtggtggcctgaagcatataattttgcaagggttaacagttagctagtagcgttttccgggattcatcggaagtaataatgttaagcttgtctatgaaagctctattgtgccttgcctgatactatatctgttttaaaataaccaccctttaatgctttgagaaacacaggatgatttgttactgcacaagttctcacaaattaatgcatttgaatgaaacagagtagaaaataaatagattaagcattacatgtaaatgggcgataggtgttctgtgcatttcagtcatctgctcagcagaaaccaaaatcttagtttcgtgattgtaaaattacagcagcatggatcaataaacaaagccaggtagaaggtacagaccactatagaagacaagttcttgatgctgagcatcgaacacagttgaaacacaaagcaaattaggttctaacacattaccgagctcatggctttgctttatcatccataaacaatagaattaattgtatgttaaaggcacaaaggaaaaaaaaagcggggggaaagatatatatcagttttgtcttctgatcagattacatacctcgtaacaccagcagcgtgcaacatttcttatggtatatccaccaccaccaagaagaagcaacggaacattgaaagacctcatgaacttaacacattcagcatgacctttccctgagagattgaaacagcccaacctatcaccggacaacgaatcagcgccgcactgaagcacgactgcaccaggacgatacatctccatgactttgctgatgatcggcttgaagatggactggtagctgtcatcatcaattccatcatccagcgggacattcaggcagtaatacttcccttctgaatacccaatgtcgcggatatcccctgttcccgggaaataatccccaaacttgtgaaatgagactgtcataaccctgtttgttgtgtagaatgcctcctcaactccatctccatgatggatatcaatatcaatatacagaactcgctgtaaatatgaagacagcatattagtggtttagcacaagaagacaactagaccaaataggggaaaaaaacatctgatctgttttcaaactttcaactgttcatgataatctaggattgtctttacgcaacatccattcttcagatctgtgtaatcagtcacctcttgttctgaatacgtttcaatcaaatcaatctcttatcatgaatcgtccaatgaaaattctgtatgttgtactccctccgtcccataatgtaagcgattttgagatttttcttgcaacgtttgaccactcgccttattcaaaaatttttgaaattattatttattttatttgtgacttactttattatcttaagtacaacttttcgttttttatatttgcaaaaaaaaaaatttgaataagacgagtggtcaaacattgcaaacaaaaactcaaaattccttatatcggagggagtatatagctttaacagtatacatcatgggcaaatttaataacaaacacagcaagttcgtcgtcatatcattctctctctttggaacatcattatatcaactagaaatacatatacacattcagaatgattcatcaacgtacatgagcttttatccaggaaaacaaaaatctgaataaaattgttaatacataattctgcacgtgccaatatgccatactattcagacaatgtgtaatcgcgtaacgaatagtatagtatgagatttaagttgagcaaaaagttaatccaatttctgtctacagatagccatttcatttacatttacagatgattaatatttcctaccgatccaaaatttagcggaagatcgatcgaactgtacacaacaaaatcagagcaactggagagaaagaagtcaagatgatttttgcttccgtcttcattgacccacccaacttacacatcaagtaatctatctattcgaaaaattaaacaaaccacccatccaaatagtactactcctaatctattcgaaacattaaacgaaccaaaaaaaaacaagaaaagcagaaaaaaattgaaaaaaaaaaggaacacaggtacgagcggaataggatgacgtcacctcatggagcttgaggagctcgaggatggcgaggacgatgtcgttgacgtagcagaagccggaggcctcggacttcttggcgtggtgcaacccgccggaccagttgatggcgatgtcgtgggtgccgtggttgagcttgacggcggcgccgacggaggcccccgcgtaggtctggcagtaggcgtagaggccgtcgaagacggggcagtccgggccgatgttgaagcggcggagggcgcggacctggccgagctgggtctccggggtgacggcgcggaggaaggcgacgtagtcgtcggagtggaagcggcagaggtcgatgccgcgggcggggagcgggcggagcaccttcatcttggccggtgcgaggaggccgtagtgggcgagcagcgcgtgggtcatcctcaccccgtggggcttcatcgggtggccctgaccgtagtagtagttgcccaccttccggtcgtagaagtagcacacccgtcggttttgcgcgtccgcgcacgacgccgactccagtgagttgacgccgcgcccgccg

SEQ ID NO: 27824 - DNA, 35557 bp, Oryza sativa
aatggaagggtctacaagtatataagccgcatacagagggcagggaagacggctgtgtcaaacaatgggctctcggcgcctcgccgttttccctgtacaaaatcaccgattattaaaatttaaaatttaaatttaaattttaataattttatgaattttcaatgtatttgtttatatttgttttaagtttttaataacgcacatataaaaattttgctcataaattattttttaaatcgttaataagttgttttaacttgcaatcagctcacgatcaatcagtggggccctagatattccatgaattaccagggtcaaggctaatactccctccgttaataaatgtttgacaccgttgactttttagcatatgtttgaccgttcttattattcaaaatttttgtgaaatatgtaaaactatatgtatatatgaaagtatatttaacaatgaatcaaataataggaaaagaattaataattctttttttaataagacgaatggttaaacatgtttaaaaaaagataacgacgttaaatatttagaaacggaggaagaattgtttagtccaaagctaattataagtctaaagtgatagtttttttatatgtgtgctcttagtaaagtcatttctaaaatataaactataatgaagacaaaatcaaccctaaacttaagtgatattcgaattttggttgtgacacaagttgcaacacaaacgatggagcttaatttaatttcttagatagtttttttttgtttctgcagtggtggttaacatattttttatttgatattgcgcaaggtaaatacggcgcgcatgatggtattggaactataggtttaagaaatattttgcaactataatttcctatacactataataaaatcacacaatttctagcgcaaatcaataactttgtagcccatatttttggctgacaggtagacgtagagtcatagactaaggctgggttcggaacccctcctccccgacatgcacaacgaagtacgtattattggatggttaattaagtattaattttttttttgaaaaatggaataatttgattttttttaaaataactttcatatagaattttttttgctaaaaaacacaccgtttagcagtttgtaaagcgtgcacgcagaaaacgagagagatgagttgggaaaagtgggataagaactcagcctaaggctgtgttcgctgctacctcttcacaactcctctccctcgttttccgcacgcacgcttttcaaaccgttaaactgtgcgtcttttgcaaaaaaaatttctacacgaaagttgcttaaaaaatcatattgatctatttttgaaaaaaaaaaagctacttatcactttccttttctctctccctcccccctctctcttcccctcttttctctcgagacacccataggccagccatgccacgccctccaccatcagcctgatagtcttatcggacatgaccgtgccacttgtcgtgttgaaggcaccctacatgaggtagagcgctggggggatggcccgttgagacagcggcgctgctgagtcgcgataggatgcgcaaggaacacatccatatttgtcatcgttgccgtgatccatgcacctcggagacgcggctagtgggaggatgggggtggtcaaagaagaggagtgctatgcgagggcgaggcgggcggcggtgtagaggagtaggagtgggtggtggccgccaccgccgtagccatggcggcgaggagatatgtgtaaacggtcgttaagtactattataataaataaatagagaattaacatttcttacacatatatcaataataaataatatagttgtactaaatttgaagagctaacatggatatagagattatacaccaaagtaaaacaaaaatgaagccgtcatgcacacctccgatgaatcacgtacgagaccgtgatggttagaccaatcgactattcctaccatcagaaagtcatgaaccaaaatcaaattaaatttctgtacatagtatatgcatgtcagtgtaatgccttgtttagttgacaaaattttttgtccctgcgtgtcatgtcagatatacgaacacacgttttaagtattaaacgcagtctaataataaaacaaattataaattccgccagaaaactacgagacaaatttattatgcctaattaatccgtcattagtaaatgtttttattgtcgcaccacattgtcaaatcatggcgcaattagggcttaaaagatttgtctcataatttacacacagtttgtgcaattggtttttttcgtctacatttaacactttatatatgtgactttatatatgtgttcaaatattcaatatgacagtgaaaaattttgttttgagaactaaaccgggcccgacagatatgcatagttgaaattggagatcgatttagacagcgaacgcggagtgagttgaatgcaagatatatagaaatgcgagacgcgactggagtttatggaagacacagcaggagacttcacttccaatgtttgaaatggtacactttattgcctaaggccctgtttagttcccaaaacaataacttttcacccatcacatcaaatgtttagacacacatatatagagtattgaatggtacactttatactcaaactgaaaatcaacagtactgaaatttcagacaggtatatatggctcttcctaccatgtgccttgtatttatagacatcaggctgcagtcataataagtaaagactacatgataagaacactactacaaatatagtactactctggaaaacctctatattaaataacaagaattgagcatttctgatagtgctacattctatgggggcgctttttaactagcagcctctgggtattgggacagcttacagatacaacagtgccacaaatctgcattccccgttaccttctgtttgtgaccaaaggggtacacatggacaaggcacaaggccggaacaagggctctccgtgaactgtgtgaatggggaaattgggaaaaaggagccaggcagcagcagtacattccgagccgcagaattgcaacgaagcaaaactgattccgaagcaaaactgatggccaaaccatgcctagagtatcctgaccatcgagagaggccattggaggcttcttgtcgaggatcactcgccatctccgttgccaaaaactccgacgcgctgcctcctcttatcgaaaactgccctgaaggattcaccttcgtcacgaagttgttcgctgaatcgcttctttgtatcggtgttgattaccccctttgcctgcttggaattatcttcagccaaggggttggaaacctgcaagcaatgggaaaataaattgaactgcccaactgtcaagggaggggcttcctgcatgcattatctatgggtcttcctgtaccatgtggctaaagcaggaaaaacaaccatctaataaacctttcagaatcctaaccaaatatgagcatgaggatcttctaacttgcaaactaagaaagatgagtctgaggctatgttcgaattagatgttagggcttgtgcagcataaaaaacgagacaagtcattaggatatgtttagttaagtattaaatattataaaattgaaaaatatatttatttacagaaacttttgcacaaatcacaccatttagcagtttcaaaagcgtgccctctataagcaagtgccagtgcccagtagacgaaaagaatttgcttaagccttgttatttactagcatgggttctacttctacagcagcttcaaccgcgcacaaaaaggcctctgctacatcatctatgcttacaggtttttaagagccaacgtgctgccccaagccctcaactgtaagcactgacaagaatcaattttcataacattagcacttggagaatgaatgtaatttttttattgagtatgcagatgaagaagtttctaaagttaaaagtgttaaaatcaaagcatataattgttttctctacatcgcagagccttttagaacattgtctgatccattattaatgactctcatgacccacgttttctgcaagaactaggataagatggcaaagagatacaaggatagaggatcaagttatgaaactacgtagggcatgcagaaagattaaagactgcgaaagtaccaaactttagtaataagtcaattagaccactgaccaaattgtaccctgatccgggtcctatgattaatgaagaagtgagtcttcttttagctgcaccaatagaaaaaccacccttttctagctgcaaggaaagaacagaaaatatgggaggctagttaaatgatgcataccaataagaagttgcagaaggacaataagggcatcacttgtcctcttctttttataagtatcatcaaatatgtgtttgtaatactaagtgagcaatcaaatacgattagttatgtactccatcccataaaaattgtatttctactaatgcaggaccaagcaaattaattacatcaaaatatatttccttgtaatatccattccttccatcacatctctaacttgttgtttcaactctcaacattccttttaattaagtttatatatggaatgtgtgtatgtattgtgttcattaaataaggttattgtggtcatttgtctatcctactaatctgtccttaattccctagaaatacaaggtagttgtttaatagtgattggtttattgcaatgacagaaatataggccgctaatatttgatattaacaaaatgcaagaaaacaatgcattttttcccttgaagcaaaaaggcatacccgatctccccaggtaactgtttttcgatgcgtgctgtaggtttgagccaatccagaaagagcatgcgtacttccttctgcatggtcagacttctcggtatcctcatcaaaatcttttgaccatttactctgtcctagctctttgtagccatccaggtcgtcttcttctgacgagtcccacttcttccctgctcctgagatgtctaaacagaattttacaggtctgacttaacatgtccttaatactttcactaagaatccgttatagtgtttcttataattttaatgcttaaggataacttccaaatcaaactaacagtctgctactgctgatgcatgcactacaatatcagaacagtgggtccacattcatggtacagtgaatagtacaagtttactattattgatattcacaatggcagggtgtctgttgcacttatttaaccatctatttcaaacccacagtgcttgttttgcaggggatttgatctctccacatttcatcagtattgccaaataagtatttggttgtattataagtactaactaacacaacagaacaagaaaaaggctttctacatttatgtgtaaagtaacttacagtatttcctcatagttttgaaggtttaaatgttacaataaattgtggcaaaggaatgccaacactaatcactgaagaataataggaatctgtaccttgatcatgtccattatctagtgattcagacacagccttctgtgtgttttcagcttcagtactagttgctgtgttactggccccatcagtgtcttctgtctccatatccacctatttgaagtacaatagattttgagcacatagatctctttaagtgactggtagggtagggatatactgatatgggatacctcttgaatggaatgctcgcgtagattgtcatcgttgaataatgactaaaaatattaatacaaaacatgaaaaacacgattaatcatgtatctaatagcatgtcttaagtcttaaccgccaatcatatgaatactatcagaaaacatacatggatgtctagtcgaagatatagtggtggagcctcttcccagtctgctgccatcttgttcacatcatctactgtaaacccatgcacattcctagcagcacagccctgttgttcacaagatatcacatcatctactgtaaacccatgtacttactggaactgaaatacattctcagatgtttataatatatggtgtaaatattggtaatataactaatgggagtgcaaacaagattttttacagcctgatacatatatgaatcaaataaattcaatatgattttcccaggactgcctagatagcttatagttaagaaaacttactgttggatccttgtatggtgcctccagcaggtacacttcatagcctgatttctacaaaaggaatagaacagtgaacttactttcaaatgactaccaacaagataaaatgattcagagaataaaattccaaagaacaaggtataggaacagagtgcctcctgaaatggcaaggtataatccaacaaaatttgcacagattagtctagaagttacaatcatatgaaacggtcacttgtcatatgggcatatcatctaaattctaagaagtcaatagtgccattaaagtggaagtcaaagatgctttggaccaactgaagcatcaagaaccacacggatacacaaataccgaattcattttagcaactcgacagttgattcagggcatgtaaaacaagcagataaccaaaaacccttgaaaataaacgagcaaaaggtttatattattgggcaaaccatgtaatattgaaagaaagcacatatatgcagttaattgcatacagaaaccagaaatacagctagcgataagtctgcactaagaaacaaccaaataacccctctggtgtataggtacattcaattgcagcaaagaagggagagaagggtccaataaactggactgccttagtgtcttagtggtaataaatgcacagtgctattaattaaggctttgggacgcgaattcttgtaggaattatcaattccagcaggaataaagaaaaaaatggtttccaaacagggcattaatttatgacagttacttaatgctatgcctctcatactatccactacacatatgtcaagggggtgctagcaggataactataatattccctccttttcaaaatataaggcatgttttgtttcgttaggacaaggctgtgacccacaattgctctattaggatattatttatgtgatacagaagcataatcataattaagtgcttttgaatacgaatctaacaaattcaatttcgtgtcacaaaaattatatcctaatagagtaattgttggtcaaagtcttgtgctagcaaaaaaaatataccttatattttgaaacaaagggagtagtattaagagaccattaataaaaaaggaaagagaaaatagaagattcgtagtgtatccaagataagttaatagtgttttccagccttataatttgcactaaagtatgcttttcaagtgcaggccacctcttgttctaaggggagaaaaagcagaacccctcttaaggattcaaaaccttaacaaaaagctccaacaagcaatgtaaattctcacagttgacgcaacagagactgagagtttaccttcgcacttgcccaaaattgagcaaaatcagctacccgcagattgcggtcatccactaaaaacgggcagggataccagcaataaacaagtcagttaccacaaatccagcatcagccattgctaagaatgaaggcatcacccggtacaatgccattgtaggcctgttgcttaattgaatgtttcaaacagtacaaaacataaaccactagtacaaatggatgtcctgtcatcctcccaatgtctaggaacccattgcctatgtcctaatcccagaaaatggccaccaaacattgaacttaataagacaaagatccaatcatgaagaaaagccaatagattgaaataatatgatgtcaatgaatatatgataaagtttgcatagggctttttccgtactcaatgaaatttatgataaataatgaggcagaacataatcataaccaccaaagtaattaccaccaccatgaattaaatcattaaatcattaattcatcctaaagcaacaatatttaaaataactcataccaatcacaaatgtaaaattcccttcatcaagggtcttcttaaatgcgttcaacatgcttgatctgtacgtctgtccaataaagaagaaatttagcaaaattactacatcaaatgataaatagtgaaatacatgaaaaaaacaattactcatgctgcaattatcgaaaatgtgaatgatggacaatactcccatgtacagtatacagattccacaacagaaacacatctatgtgggttatgaagtatactgcagtctgggagatcatatcctttcaacatcaaaatgcccagtgctgcaacttctaggcgatgtgctctgatattgttatttaaagtaaacctggggaatgtgacatttctaaaggtttacattagttctaatgagtaaagactaatttttcaggcaaatgaaacagtttgccataacatagctccaataattggcaatagcattcataataaatgagataaaggaatgaagtcaaacaaaaactatttcatcacctcctccatctcaggctcataacagtactcgatcactttcttggtcagctgctttcttcctttggatgtactagaagattttgacccttcattgtcttcaactttctaagagcattaaaccaagttacaagacagaatacccatcaaataaaacagaaatgtaataagcaattctgagtatagtgtgacaaattagtgtacagggttcatgataggttctgctattcttcaactgaccttctcaacctcaatcatgaaatagtcatccatcgaatgaattctaggtgcatttccaccattctcaacttcaaggtcacgcaatgcctttgcaagatagctctttccactacctataaattgtaacagtggtaacacagatatatatatgaataaattcccagagtaaaaaatattgacagtcttgcagactattaaatcatgatcataatgcttgcgtgcaataagaggaaaaaaagttatgtatcaaaatcagataaaaaaatgttacgagcactctggacagtagacaatgtctacaatcttcatggtccaatttgaccacaagtttctgatcgtctactatgatatgcttgtaaaatgttacaagaataatagcactatgaaagtatttcaaccattggtttattattgatgttattttagtagtttgatcaatataaatgcctctattaagatcatgattgaagtcagatgaagcagtgtgcatttctagaaacaacatatatttatgaatggaagagtagtaaaagagcttatcatgtgtattgttttgtgaactgaaaaaataggcatttgataagtataaaagaaacatcagcaactcccaggtgttatatgcagagaaggtcagatcaatctcaacaaacaacaggtacagtaaagctaccacacaaaagatgaacgctttttgaggcatagtataacaaaattagtctaaccaagcgctgtggccactggctagcatacaaaactgtcaacagtgtcggcaatgttctttggaatgcttaatcagccatatgggacataaaagtggttgtgagaaaacctggcagcccacggaggatgataacaatatgatcaggccgtgacccacgaagtggctgcttgaacaagtcacaggcactaattacactgattttagcattgttgatggaatgctgagcttgggtttgccttccacctcctaaatgttgctctaagtgtggttgatatgccaaacctggtacctgaaacattcgtacaacaacaagtactgctttctgagtgcccgggaaagtattgaatcataaccagtgaacacaagttcacagagagaagaagataaacctcattgtggataggtccattgtaacgatttgcattaggcatcaggtgagcttgatgcaaagtatgagaactaggtgggcgcgcagttgcggctggagaaccggaatgaataggaaacaaagatgatttcacagcctgcaaaggtggcttggcatggtaatctgaggaagacggtacaggaggctccagtggtggtggtggtggtggaacatccgcctcaggatgccaaccgtgggaatcataacggcttctcgcctcagggtatcgagccggtggagggagcggcggcgcaacaggcgattccgagcgttggaagcgattgtagcggtgatcatggttgaaatacccctcctgaggtcctccaggcacaaaacttgaacctaaggcggcaagcctttcatgcgcaggtggaaacctcccggcgtgctcgtaatcgggaaaactgccttcatgcgcatagggattgtcataatttggaggaggaggatagcctctccctcctccatagccgaaccgatcaggaggtgggtacggttcgccgtgcaacatcccaggcggcggcggaaacggagggcggccgtgatcccggatcaagccgagcagccggtcgccctccacgggaaccatccccggcggcggcggcgggggcagcgggggaggcatcccgtcgccgtacggatcgcccacgcgcatccgcttgtggggggcctccatgtcgaggacctcgtaggggtgcggccccgggggggcccacatcggcggcggagggtggaaggggacgtgatactccggcgggggaggaggaggaggaggagggtggaagggggcgttgtactccggcggaggagggggcggaggcgggtggagatcgtaggggaaggggtggggcggaggcgggcagaaagggaagtgcggcgcggcgcagaccgggcagagctcgtcgccggcggggaaccgccatggatggtccatgggggagatggtggcggtggtggtggccgaatggggttagggatctagggttttgggggaggaggaaggatcagggagcttcgagaagattcgagaagcttccttcctgggcttggggtccgcgggggtggacggctgcggcgccgcccgcctcgtctgggtagccagaaaaagcctatggaaccagaagggctatattggaaattgacgtcgtgcggtgccatggttattccgttttggttgttttgcacgtataaccctcccaggttcttaatttgtaaaagagggctgctcgagaggacaagcccttgtgaaatgataccgtgaaaacaaagaagttgttcaatagtactggtagaaaatgtacgagcatagacatcaattgcgatgttttaggtgtgcaatgtgtgaaaatgttactgtaggagacaacgatttcatattgattggctatagctgttgtggctagtataattgtgctaccgcctgccgccaacatatgaacaatctaaagaagaaaaagtcgtaatagcgttgtaacgttcaaaattagttctttttgccgaagtatctttgctactatgatgcaatgcttatatttttgaggaaacccacttagaattcatggttttttacttgtttaagctagtttgaattagtatattctgtaatattctacaaaatttgagcgaaagcaatatatttggacaaattgtgatgatttgatgaagatcacattctaaaacaaacaatcaaatatacatggttgttttgttaatattataaattctagtgttaccaaacaaatttcaatacttcctctgtaccgtaaagcatgacgttttaaggtttattacccagattaatgtctactaaaaatgaccaatttaccctcattaattcaatttagctctgatgtgcatgcactctagaaggccccacagaataatagatattgcagttaaatagtaaacgaagcacaccttgactaccacgtgggatttgcataaacacattagagccatggccataaaaattacacatgagaaaacaaccattaccatagtttaaacatttgaattagcctatgtagtatgtgctttggtgcctaggaatgcccgtctatttctgaaagtgggccacttctttgattatggccaggacgatatttttcctgggacattagttggacgggccgggggaacgtccaaacttttgggataacatactttctccgtcccataatataagtgactttgaggttttgcttgcactgtttgatcactcgtcttattcaaaaattttagaattattatttattttttttgacttactttattacccaaagtattttaagcacaacttttcgttttttatatttgcataaattttttgaataagacgagcggtcaaacactacgagcaaaaactcaaaatcccttatattatgggacggagggagtagtaacaatattcaacttgcttcaaatcaaatactcctcttatacttatatgtaaattgaatatattcactgacaagatgcaaaagtatctagtatatgaaatttataacttctgcagccccataactgcaaatttatctccccgttcgaagttcccacgcgaaccgttgccgtgccgccgccgccgccattgacgccatgggagcagcatctccgcgagctcgctcgcgtttccaatggcagacgccccgcggccaccatcgcctcctcctcgtggaaagaaatcatcagagctcgtctccgacaagaaaccctcaccgcctactcctccagcctccgtcccgccttcacctaaccctgcttgctcaaggccttcacctagtcgagctccggcccgggacgaagcctccacgatccaggtccacgcccgcctcgccaattcgggctttctcctcctgcgcctacgctacgagctggcgccgaactcgcgagctcctccgcctcggggtcgcgcgcagggtgttcgacgaaatgccgaagcggaccgtcgcccgcttcaacgccctcttcgctgggctcgcgcagcgcggggaagctgatgaggcgaggcgcgagtcttaagcccctccgggaagaagggttgccagccaccgagctctgtcatggctgcctgccttacttatgcggtggtcaagcacggggagcagttgcattggcttggcttgtttgaattgctagcgttacaatgcgatggattctgggttattgaggaatgatgagcacaccatgcccttggatactgttggagaaatgatatttgggttcagtgaagaacctaatgggaatgatttcgctggtgttctcagcatgcacaagtttgtcagcattgtcacttggtaaacacctgttgtcatgtatgcaaggtgcagttagtgcttatcggcttttatcagccgtggaggaacaaagcttggtgtcttggaataccatgatctcgggttttctggcacacagggttgttcatgataaacagaaggtttcaagcctgagtgccggacagttttacatggaacctgatgattaatgggtctgcagactgtgcacaccacgggagattgtccaggtcttttcatcttttagtaagatgcaaatggagggtttttcttttcctcgagaaactggcaggagatctgccttgatttatattaagaagaatatcaactgagtaggttcaaattacgtgtcctgatacaagaaccgaaagaaaacaactgttaggatctaattgatgtacataaatttctgcaggttaattctcgtcggcagagattggcaactccatctgtgtgatgttctgaattgccatgaaggcgatttgcagttgtctttctgttgctgctgaaagattcttctgttcctctccagccaaatattctgaaaaaaaacaatgacaagtgtgccgaatgcttgttcagccttatcaattttttcggcaatgctgggagttcaagtatgatgttttccaaacaacagcaattgacatgtttgttgctaatcatttactttcttctacctagtttgatcattaatggataatttttttatatatttattggtttacatttctttgtattttcttggcaggaaagttgtttccaggttgcaacactcaagagtaggaatgtgcatgaaagcctggtcattgcggggtgacatttgatttgaatttgcaccatccttattccctcgcaagtaaagatggtgccatggtaccaaacattacagttccacaatatcaagaacctgatattaggttgatatgctgcgtacctgtgttaaactctcgtagtgaccttgtgccatctcagcagaattagttttgagcttgcattttgccgcaaagccatgatcaagattgaccctgtggtcgacacgtgtcaagtggtgggagcaaagaaccacatgcactgtggaggcctagaggttcgcactgtgagtgccgctttaggcatcactgagaatgcaagctggagatggagaagttaaaatcaaatttgtcatcttttgcgagctgatggtcccttgtatcagtggaggatgagcccactggttttgctgggaatgttctttttgcagaatattttagtctgcgccgtagcgtgtgatctgctgagtagaatatactgcttgtactacttttcttagccacagtaatgatagaactgtaaggatttggtggatttacctgtagaatttcatagtaatcgacaaatgatataatcggtaattaaatggccttcaaaatcgatagtgttgtctattgtcgcatataacattataaaatgtacgttttataatgtacaagatgagtgtactgtatcttttacacgccagccatcggtgctaactcattttgatctgtgaacttaaggcaaacgaatactcgtaaaccttttctatataagattaaacctagaataaggttaacaaaaattgtagttagttatgctgcaactttagcatgatattttagttaatgcaaccatctttacatggttttttttatatagaattgtaacttaaaacgcaacgttttgcccgtgacaggtatggcatattcgtcaaactttatcatggaattgtaaccttggaacgttgggtcaagcttcaacacacatatgacatactcacggtttcacgcagacatagagtagctgtgttcttttgttggtgttggtaactaatcccttgcttttgttggtgttaggaactaatctctgatctctggtgcatgtaaaacggagttattaaacacatgactaattgcgtattagctatttttaaaaaatagattaatataagtttttaaagcaacattcgtgtgtgtatgtgtgtgtctatatatatatatatatatatatatatatatatatatatatatatatatattaaaaaaacacaccgttcggcggttgtttgagaagcgtctgcatgaaaaaggagaaatgtgaggtgggaaatgaggggaggaacacaaccttaggccatatttagttcctacacaagaatttttaaccctgtcacatcgaacgtttaaacacctgcatgaagtattaaatataggctaaaaaataactaattgcacagattgcgactactttgcaaaacgaatcttttaagcctaattgctcaatgatttgacaacacggtgctacagtaaacatgtgctaatgacagattaattaagcttaataaatttgtcccgcggtttactgacggatactgtaattagttttttttattagttcccgaacaccccatgcgacaccctatatacccgatgtgacacgccaaaactttacaccactggatctaaacacccccttagtctaaatctacctatcagccaaaaacatgggctacaaagttgttgatttgtgctagaaattgtgtgatttattgtagtgtgtagaaatttatagttgtaaaatatctcttgaatgccaataccatcatgatcgccgtatataccttgcggaatatcaaagaaaaaaaataaagctatgtgagccacccctgcagaaacaaaaaggaaactacctaagaaattaaagctccatcgtttgtttttcaacttatgccacaaccaaaattcgaataacacttagagttgattttttctgcattatagttatattttagaaatgattttactaagaacacatatataaaaaaattatatcattttagacttatgattaactttagactaaattatattagccttgaccctgataattcatggaatatctagggccccactgaattgatcgtgagctgattgcaagttaaaacaatctatcaacgatttaaaaaataatttatgagtaaattttttatacacgtgttctaaaaaacttaaaacaaatataaaaagaaaaattgcattgaaaatatcataaaattacctttaaatttaaattttaaattttaatgatcggtgattttgtgcagggaaaacgacgaggcgccgagaggcgagagcccattgtttgacacagccgtctcctctccatctctccgccccctgtatataaacccccccttcccctcctcgcccatcgcggcatcgctcgcctcctctgcttcgcttccttctccagcaagcacccgaccacaacacacacgcgagctcctcgacctcgagagagagagaaaacccaaccccgaattcggcggcggaggcggaggcagcggcgatggacccctcgtcggcgggcgccggcggcaactcgctggcgtcggcgtcgtgcggcgacgcgcagaagcggcgggtgtgctacttctacgatccggaggtgggcaactactactacgggcagggtcacccgatgaagccccaccgcgtgaggatgacccacgcgctgctcgcccactacggcctcctcgccccggccaagatgcaggtgctccgcccgctccccgcccgcgaccgcgacctctgccgcttccactccgacgactacgtcgccttcctccgcgccgtcaccccggagacccagttcgaccagatccgctccctccgccgcttcaacgtcggcgaggactgccccgtcttcgacggcctctacgcctactgccagacctacgcgggggcctccgtcggcgccgccgtcaagctcaaccacggcacccacgacatcgccatcaactggtccggcgggttgcaccacgccaagaagtccgaggcctccggcttctgctacgtcaacgacatcgtcctcgccatcctcgagctcctcaagctccatgaggtgacgtcatcctattccgctcgtacttgtgtttgttcgtttttttttttgggttcgtttaatgtttcgaatagattaggagtagtactatttggatgggtggtttgtttaatttttcgaatagatagattacttgatgtgtaagttgggtgggtcaatgaagacggaagcaaaaatcatcttgacttctttctcttcagttgctctgattttgtcgtgtacagttcgatcgatcttccgctaaattttgatcggtaggaaatattaatcatgtgtaagtgtaaatgaaatggctatctgtagacagaaattggattaactttttgctcaacttaatctcatatatattcgttacgcgattacacattgtctgaatagtatgtcatattggcacgtgcagaattatgtattaacaaatttattcagatttttgttttcctggataaaagctcatgtacgttgatgaatcatgctgaatgtatgtatgtatttctagttgatataatgatgttccaaagagagagaatgatatgacgacgaacttgctgcgtttgttattaaatttgcccatgatgtacactgttaaagctatgtactccctccgtccaaaaaaaaaaagtgaatctaggactggatgtgatatattatagtacaatgtctagattcgttgtactaggatgtgtcacatccagtactaggttggttttttatgggacgatggagtacgacgtacacaattagaatgttcattggacggttcatgataagagattgatttgattgaaacgtattcagaacaagaggtgattaatcagacagatctgaagaatgtatgttgcgtaaagacaatcctagattatcatgaacagttgaaagtttgaaaacagatcagatgttttttcccctatttggtctagttgtcttcttgtgctaaaccactaatatgctgtcttcatatttacagcgagttctgtatattgatattgatatccatcatggagatggagttgaggaggcattctacacaacaaacagggttatgacagtctcatttcacaagtttggggattatttcccgggaacaggggacatccgcgatattgggtattcagaagggaagtattactgcctgaatgtcccgctggatgatggaattgatgatgacagctaccagtccatcttcaagccgatcatcagcaaagtcatggagatgtatcgtcctggtgcagtcgtgcttcagtgcggcgctgattcgttgtccggtgataggttgggctgtttcaatctctcaggcaaaggtcatgctgaatgtgttaagttcatgaggtctttcaatgttccgttgcttcttcttggtggtggtggatataccataagaaatgttgcacgctgctggtgttacgaggtatctatactttcccccgtttttttttccttatgcctttaacaaacaattaattaattctattaattatggatgacaaagcaaagccatgagctcggtaatgtgttagaacctaatttgcttttgtgtttccactttgttccttgctcagcatcaagaacttgtcttctagtagttggtacctactgcctggctttgtttattgatccatgttgctgtaattttacaatcaccaaactaagattttggtttgtactgagcagatgactgaaatgcacagaacacctatctcccatttacatgtaatgcttaatgtatttattttctactctgtttcattcaaatgcattaatttgtgagaacttgtgcagtaacaaatcatccggtgtttctcaaagcattaaagtgtggttatttttaaacagataagtatcaggcaaggcactgctagctaactgttaacccttgcaaaatcatatgcttcaggccaccacctgttcctcagttgttagctttcatcagagatgtctttaataaattagcaacccaaaatctggtctctttggaccttgcaagcctggtttcgttgccttttgtgaatttataaatctgaacacacaacaggctaaacatggcgaacaagtgtgaatggctgcacttatgcttgcttgagtaaattatctcttatatcaggaacacctgttgctacagctatggttttatcctctgactgtttatttggttttttatttggccagacaggagttgcacttggtgaagagctacgggagaagttgccttataacgagtattatgaatattttggtccagaatacagtctttacgttgcagcaagtaacatggagaacagaaatacaaacaagcaattggaggaaataaaatgcaacattctggacaatctctcaaaacttcaacatgctcctagtgtccaatttgaagagcgaattcctgaaacaaagctacctgaggtgagtctccaggcttcctaatattataagcatgaaaaaaaaagatgtcttggaagtgataactcaagggctgactgaatgtattcgtgtcctgtacatatgtgctcattattcagccagatgaagatcaagatgatccagatgaaaggcacgaccctgactctgatatgctgttggatgatcacaaacctatgggacactcagcaaggtatctatttttcctttttctaaaagctgtattaaattttgtttaattctgtgccctgcctcatgttatattttcatttagaagccttattcacaacatcggagttaagagagaaattactgaaacagagaccaaagatcaggtaccttttcctcagttcattccaatgagcggtgctgtcctttctcattcataaatttcaacacacgacgtccaccattttattttgagatgtctcctttttagctaaatccttagaactaacagtatacttactccattcttttattaacatgtgcccttttgtttaaggggctattgcttatttgacccctttttgaatcctaactaccaatttgaccctactttttagagtttacttatttgaccctccttttcagaaacgaagctcccgtctgaccctgtttccattagtccgttaagttttaatttaaaacaaaaaaaaagaaatacaactaatattcataatacccagaataccgttagaaaaccctatgcatccaccaaaccctatccacatttctctccttgcggcgacggcggcgacttgcggcgagacggcgagccggtgccgccaccccctcagatcggcgccgccctggtgacgacgacgatgagccggcaccggccctagtgacgacgacgatgagctggcaccggccctagtgacgatgacgacgacgaggagtggcggcggcggctcatcgacgacgaagagccgaagccggcgccctgctgacgaggacgaggacgacgacgaagagccggagccggcgccgccaccccctcagatctggcgccaccgccgctgcgtcctccctccttccgcacgcttgcgccagcgccggccccctcccccgcctcctccctccttccgggcgcttgcgccgctgccgccgtcgccacctcctccctccttccgctcgcctgcgccgccgtcgttcctccctccctccacgagccaggacggccgctcgccccctccgtgcgcccccgccgcaactcaccccctccgtcagccgccgctgcctccctccgccccctctccctcagccccctcaaagcgccgccgccgccggcccatcagtcgccgccccgtggaggagaggagaagagaagagaagagagaagagaggagaggagaagaaggaactgcgggtgggtcccacatgtaatagagtcaaatgagtaaggacaaaagagacattttgtgcttcagttaacaccgttagatgcccttaacagaacagggtcatacgggagcttcgtttttgaaaaggagggtcaaataagcaaactttaaaaagtagggtcaaattggtagttagggctcaaaacggggtcaaataagcaattgtcccgtttaaagaaggtggcattccccttttgggtttatttatatacttgctccgtttcatattataagtcgtttgacttttttcctagtcaattttttttagtttgtccaaatttataaaaaaatatattagtattttcagcataaaacaaacatgttatcaaaatgtattcagtgtaagatttaataaaactagtatggtattttagattttgctatttttttctataaatttggtcaaacttagttaagtttgattaggaaaaaggttaaatgacttataatatgaaagtatggaacgtagggagtaacaatgaggttttctttatagaattctgttcttgctggcttgctgctatatgtgaattataatcttatccatatcggtgctagaaacatagtgaaattctcttgtgctgttgagttgtggaggaagactggtgtgctgatgaaaacatgtgctcatcatgtattgacattttcatctaaatgaaatttaaggccgcattggttgtacctttttttatctcacaggatttttttttgggttgtgcataatctcatccagattatttagaatctaccttgcatttatgcgaaacgagccctttgaaattcttgcagcacggacttgcatctttgtgtgatcttttgttgaactaacactttctgatttacacattctgcagcatggtaagagattaacaactgaacataaagtaccagaaccgatggcagacgatcttggttcctccaagcaagttcctgtaagtcgtcgtcttctctatccatctgcaaatccatagcacaaactctgcattgcataatgcctatatggatatagaattatccaacaccatggtttaatctgctctaacaaatcttttcatcttcacattgcttatcaacgatagactgcggatgcaaattcgatggccatcaacgcgccaggcaacgccaagaatgaaccgggaagctcactatgaactaacccacttcaggccaccagctcttatgccacggattcctgcatgctattagttacttactccgaggtgttgtatgactgtttcttctgtaggagtttacaaattacaactgtttcttttgttgaagaattccaaagtgtccaggcaatactggacgtggagacattagtctgatcaatgtactgcagagtacagaacatgtaacatgaaccaagttacagtgtatagtcttttagactgttagatggaactttcaggcgaaatgcctgtgcctacttgtgtgtgctctctgttggttgtttttcgttaaaatattttgttccggtttatcatgtacttcctacgtttttatgtatgagttgttttaaagagacaaataaatctattttttaatttataatagttaatacttaattaattatgtgctagtaaattttctcgttttgcgtgcgctgaaaatatcattttatactattgaatagaacggagctttagattgtgtcaatttgattgaatatagtcaactatttagaagcataatcagtggagacggaggtgcggttcagagattactgttaaaccaaccaattaatggggttcagagttagatctacacttgcaatgatgagaaagggaattgcttctatattattaatgtagactctgataatctagagagaatgaatgacttctatatgattaatgttgactcggataatctatctagaagatggggacttcagcagtataataagtgcaggttcagcgatggaaaaacaatatatatacaaaaaaaggttcagcgatggtgaagcaaaataaagatattccgatcgagtagaagaactagatggtaactaaaattacttttgatgtggtcatgagagcatatgtaagattttacttgtattatgcatgcaccagggaccaagattcatactgataaaggaaactatccctttagaaaatatattatataaattattttttgcggggaaatatattcatattattgataaacgaaactgttaggaaacgataaccgaacaaacgataaaaaacaatagatcaatcacagaagacacgagatttaacgtggaaaaccctctcaaaacaggagagaaaaaaaccacgggcgccaaccagcaaaatatcttcactatatctaaggtgaggttacatcgccgcacggcgacttacaagaggtatatatatagtggaaccttaaaagggatgacgatccatatcgctccgctacggcagaagctggcctttattaagtgcaaatgaatttggatcacaactcaacaaactccaccttgagacaaattccttcttgtagcatgaatcaatccttcaccctgaacacaacaaagacaaaaaacactttcggcgccaaatagcctctcgggctaaaccactataccaactaagcttgagcaaagctcaaacttagcaacaggaacatgctttgtcattatatcagcaggattatcatgagtacttatcttgcatacctttagcttaccttgcgcgactacatcacgaacataatggtacttgatatcaatgtgctttgtcctctcatgaaacatctgatctttggtgaggcatatagcactttgactatcacaaaacaagttaatgcaagaatcaactccacaaagctcagcaaacaatcctttcaaccaaactgattctttacatgcttcagcaatagccatgtattctgcttcagtggtagactaggcaacaacaggctgcaatgttgccttccaactcacagcacaactactaatggtaaacacataacctgtgagtgaccttctcttatccaaatctgcagcaaaatcagaatccacatatccaacaagccccttatcagtcctgccaaacttcaagcaagcatcagctgtacctctgagcctgaaaatccactgaacagctttccagtgttctttactaggattcgccatgtatctactaaccaaactcatagcatgagataaatctggacgggaacaaaccatggcataaatcaaagaaccaacagcactagaatatggaactctagacatgtattatacatcctcatcagtactagcacattgtaaagctgataatttaaaatgaggtgcaataggagtactaacaggctttgcatcatgcatgttaaaacgctgaagaaccttcttaatgtagctttgctgactaataaataacaaaccagaatttctgtctctagtgatttccatacctagaattttcttagcagcaccaagatccttcatatcaaactcactactcaactgtttcttcaatgtagtgatttgttccttgctcttggcagcaatcggcatatcatcaacatataacagcaagtatataggtgatccattaacaaatttaatatacacacagctatcaaattcagatctcttaaagccatgtaacaacataaatgaatcaaacctttcataccattgacgaggagactgtttcaaaccatacaaagatcttttcaacttgcaaacataatcttccttaccaggtactatgaacccttctggctggtccatgtatatctcctcctcaagctctccatgtaaaaatgctgtcttcacatctaactgctcaagctcaagatcatgcatagcaacaatactgaagaatgtgcgaattgaactatgctttacaactggagagaacacatcattataatcaacaccagcaatttgactgaaaccttttgctactaaccttgccttaaacctcggaggctcgctaggagataaaccctcctttctcttgaagatccatttacaacgaacatgcttcttctattttggcaagtgcacaagctcccatgtgccattcttctcaagagactgcatctcctcctgcatagctgagatccacttctcacagtctccagtaacaacagcttcagtgtatgtggctggctcaagagtattctccacctgttcagcacaactaaaagcataataaaccatatcacattcctcaataagacggactggagctccacaactcctctttgttctgcgatgggcaataggttcatcttgtggctgcaaaacaggaggtgagtgttgaacagtatcattaacatcattaccaacaatttcagtttcctgatcatccacgtgctccacctgcacgctaacatattgctactcctcatctgaaccacctggtatgacatctgtgggcaagctgtcattaaacataacagattcattgaaaacaacactcctgctcatgaaggtcttgttagtttcaggattccataacttatatccttttactcctgaaccataaccaagaaatagacacttaatagctctaggctctaattttccattatcaacatgagcataagcagtgcatccaaaaattctcaactgtgaataatcagcaggcttaccagaccatacctcaatgggcataccagaccatacctcaatgggagttttcttattaagtgggatagaaggcgacctgttgatcaagtagcaggcggtgttagcagcctctgcccaaaaacgcttgttcatgcgagccttggagatgatggttctgttcatgcgctcagctacaccattctgctgtggagtgtacgggatggtgtgatgcctaacgatgccttccttcctgcagtaatcatcaaaagcatccgaacaaaattcaccaccattgtcagtgcgaagtacttttacctccttttcagtttgcctttctatcataactttccactccttaaaagcagcaaatgtatcatctttatgtttcaggaaataaggccacacttttctagagtaatcatcaataatggtaagcatataatgagcaccaccaagagagggcttacgagaaggcccccacaaatcagcatgtacataatcaagtatacctttggtgcgatgaactgaggtattgaattttaccctcttgtgcttaccaaaaacacagtactcacagaacttcatgttaccctgagtgcagccatccagcaggttcctcttcatcaattctgccataccaagttcactcatatgtccaagacgcatatgccacaggttagtcttactaggttcatctttagaaacaacagcagcggtaacagaaccatgtaatgtacttcctctaaggacatataagtttgcagaattcatatcaccaatcatgtaaacaagagaacctttcgatacctttacaactccacctgaaccggagtatttgtatccttctgcatcaagtgtgctgagagagatgagatttctcgccatccctggtatgtgtctcacatctttcagcgtacgtgtcatgccatcatgagtcttgatctgaacggagccaatgcccacgatctcacgtgggttatcatctcccatgcgcacaacatctccattctgcacagacttgtaagaactaaaccaatctctgttaatgcagatatgaaacgaacatgcagtatcaagtatccattcatcatgactagcaacacaaccagcaaaaacaacaagacaatctcctgaatcagagttttcagcactagtaacaacagaggccttaccatcagatttccttttctccttattctgcagcttccaacattcttcaatgaagtgatttttctttttgcaatacttacagaactttttacctctggatttagaacggcctctactctgactcttgtcacgatcattgctgacgttgtaggttttctgctcagatctgcctctgacctgcaatgcttcgcccttagaggacgacgcatcagactaaaccatacctttcatcttctccctgttttggagcgcctcataaacttccgctagggttagttcatcacggcttaaaagtatggtgtcacgaaaatttgcatatgaactaggcagtgagcataacagtaaaagacctaaatcttcatcatcaaactgtacctccatcgacactaggtcggcaacgatctccttgaagaccacagaaccactctcctgcaacttgtgcgagaacaacttcatcttgatatgcatcttactggttagatctttagacatgtagatcgattccagtttgagccaaagttctgcaacagtcttttcctgcaacacttcttacaaaatatcattagatatatgaagttggatcagcgacagagccttacgatctttccgcttctcctcagcggtccattcagtcgatttcttcttcccgaagctttccagcgcctcatcaagatccgaagtttgcgccagaacagcctgcatcttgacttgccacagcgagaatctcgtcttgtagtctagcagcggtagatcatacttcatcgacgccatcgcgaaaccctaatgtgggaacaagctctaataccacttgttaggaaacgataagcgaacaaacgataaagaacaatagatcaatcacagaagacacgagatttaacgtggaaaaccctcccaaaacaggagagaaaaaaaccacgggcgccagccagcaaaatatcttcactatatctgaggtgaggttacatcgccgcatggcggcttacaagaggtatatatatggtggaaccctaaaagggatgacgatccatatcgttccgctacggcagaagctggcctttattaagtgcaaatgaatttggatcacaactcaacagaaactatcccttttaaaaaataaggttcatacagagaaacgaaactatcccttttgaaaaaaggaatgctagtaggtgaaatgaagaaggttgtacggtcttgtgaattagattatcagtctcttcctcggtacagcacggcccaacaatcagaagaagggagcgaaaataggcttattccagccattagacacggtccaaagagatgagataggtaaaataggcttatttcagctatataagacacaactcaagagaagcaaaatagactttgtcagtgatatgggcccgggggtatcatgtttagagggaggaggctgccccccaatgccacgtggccctcccccgaggggagtcaggcccgaggtggggtggcggccactcctacatagactagtcggaggaggctgccccccaatgccacgtggccctcccccaaggggagtcaggcccgaggtggggtggtggccactcctacatagactagtcggaggaggctgccctccaatgccatgtggctctcccccgagggggatcgggcccgaggtagggcggcggccactccttggccgagactagagggagaaggctgccccaggcaccacgtgatccttccccgaggggggatcgggcccgaggtcgggcggcgaccgccccctcccgtgactaggggtcgggctcccccgaccccctctttaggtcaccacgtacggtgggttaggtgtccgcctccaggtgcccacctacccgcattaatggtgacccgagcggtcgcgccacgcacgcatttaatgcggtgtgcagtgcactcaacaggtctgtgaccggtcgaatgactgatgggatccagaatgtcaggcgcaccatcgcgtgtgtcaggcgacgtgcagcccgacatatcccatcaaataataatggtgagaggttctcatcctcttattccagtcggagtcggtcctcctgctctggtcaaagcaaggctcccgtttcctggtgtaataggagcccagaagtcttcacccattaaatggtgactgacaggggcaccccccgtgtcaggcggcaagatttgacaggccccatcatcaagacgacgtgcgcttggcttcccaagtcaagagacaagacatgcatttaatgcaaagattataatacttctccaccggagctaggttgggttgttgggcctatgtggtatccccttgagctataaaagaaggaccctgcccactgagatagggggacgactcccagaaaacccgaactcgagaagagaaggagcaggtgcgctctctggggaagaaacccttataaaactcatccataatcccaaacacaggagtagggtgttacgctcgatagcggcccgaacctgtataaaccccttttgtctcatcgtctttgggggattgaaccccctcaagatcacacagcttcgctcaccgaatcctcgaatctcacccgctgctcctggccgaactcacaaaggggggcctcacgattccctggtggagaagttcattctccgacagacttatttaaggacgagcacgtgaaccgattatgcattcagaccagcacggcatgacctgagccttattggactgtaggtgtagcttgtggaccggcacgacatgacaagtcggaccgactactctcgggtggttccggcccgactactcttgggtcataccttggtcatggtgggcggcctatttaatttggccatctataggatgcccatttccaacacaaggccgcgcgcaccaccacctgtgtcatctcctgcgtcatcgccgccaccacctaggagcccatcctcgcgtcaatcgctcatttccggtcgcgacctcgatcaatctccgatgcgtgatgaactgatgatgaacgatgatgggaggcagctaggatgtcaacgtgcttgcctcactcctgatcgagcggctcatcatgctcttctcatgtggcttctccatgctaataaagattgagctcgatatagatagccataaggtctgaggtccgacggcccggcccaaggcacgatcatttggcccggcccaagcacggcaccgtccgattggtgtcgggcccgtaccggtatgacccaacagttgggccatgcctgggccgatgccttggcacggtgggctggcccggcatggaacgatcgaagaaaaatagtagaggatccaaaatagacttaatcagccatataaaacaacatccaaagagaagaggaatacaaaatagacttattttctagccatatggacacagcccaaatagttgagggagaaaaaatatacttattctgtggagagtacgataggctgtctgacctttgggtcggctcggcacggccccaacttattgggccgtgcgtatagcccgtgggctggcacggtatggcactacgtgtagatcgggccgtgccggcccaactgccctcggcctaggcccggcgatgccggcggcccatttggccatctgtagagctcgagggcattggatcaaggggaagagagaagataacttagagagagaggggaagtgaaaagtaaatgaaggaagaatacaatgataattttgttaaaaatttctaaaatgaattgcagtcatatctttaatatttattaaattgtaatggtacggtttgaatttcacgagttgtaatactttgttttcaaaacggataaatttatattggtatgaatctagttaactcgactagatatgggtatttcaactttcggagttaagtagttttttcaacatttaacaagtacatttctacaacttgttttcaacatttgacagcaacaaaaatataagatattttgtgttatctcctgccgctgctgtttcgaacttcggcaagttgcagtacaaagtcaaccttggcgcgcagcgcgctggtggtttgtgaccaaaccgtgatttgttcctttttactacattcccatagtccttaattttttaataaaataaataatcaaataaacgttcaaaaatgaataataccgtatatttaaaaataaaatgagtattacattctagcgtctctcgtcggtttcagtggtgctagagtctattcttcaagaagaccatctctagtcatttgctggcggcctggcgctgctgcttttaggggtttgctgggagtttagtggggttccgcctcctccaccctccctcgatataggagttttttttctctcttttaagtagtggagtagttccttaactttcggtggtctttttttttcagttttttcttttttttcctatgctccattaatagccttttattcatttatgttgtataactattcttttaatcacgtgtaatatttttgcatgttcaataaaagaaattacatagtagcgtcattgatcagctaaaactgctacgtagtcgattttggctttggaccagtggaaaaaaaactaaaagctaataattgagttactaatgtcactgtctgataaaattaactctgcatgctgaaggtcttgtgagcttctgttctctactttattcaattacagggtctcctgaaataaaaataaaaagataaagaagatcgaggtggggacatctctaatcagggagcatgaaacctaaaagtcttggccttatcttttcggtatatttatacttatcagtcaaatttaaatttttaatcttaaatttaaagttgattttaaggtttttccatcgaaatttattttttagcttttacttttagatcgctacgaacacgtatatcaaaaattttgttcacaaattacttttggttataaatatgctgcatgaataagccaaacaatgggaccgactgaagctgacccgttgaatttttttttatgtggtcagcaacgagccaacgactcaacattggtagtaaatcagctcatcatcgctggtgagtcaattattaagaaactggcattgcagcggagataaccggaaacaacaatacggaatgtggacaaattcagcggcgtatttccacaagaagggaccactggaattgaattggaagcaacggtctgtgctgaattcttcgatatgatcaactctcgcgtcagtgtaccaatttcggcaagtaggggccgactcaggattagcccaaagcacagacctcacctatggtaggccttgcacggtaattactcacttaataaggcgtacatgaatattcaactatttaaacatctgacaactaattattttattataggttaaatttatttgataaaaaataatatcattggagtgacatttgaatttactttcatatgataaaatttttttagcgtaaacgttgtaatatatgagaaatttaaagagaaacataatttttgaataccatgccaagttcaacagctccttattcagtgggacggagggagtacgtcgtaggctaagttcagcattcaactttcccaacttatatataataccttgttttccttgcacatgttttccatactgttaaataatatatatttttttaaaaaaagtttctataggaaagttattttaaaaaaacatattaatctatttttaaatttattttaattaatatttaattaatcatgtgctaatgaattatctcgtttcacgtgtggggaggtggacttcccaacctccacctccaaacatagccctaataggtctccaataaatccaaggcctcgggccacgtcctgggtggcccgaggcttgggtctacccctgtcggcaaatgtatattgctcactatggcatgtcccctcatgtggcaagcgaccactgctgccacaaccgacgatgacaacctcgagctgatggcgttcgtgacacgtgcgttaatgttaatggctcaccgccaccgccggtggctttggagtagacgtggggaaccgatttgttcccgtgtgctagtggcgccacgtgatgtatgggcccctggttctctgccggctgtcatgtcgcctctgcttgccttaaagcacggataatagtggactataagttagttataagcttatgtggaggagagataaaaaaataaggagtattggctcttatgtaagaactaactctagacatgtcctaaaataaatgcattaaggctgtgttcccaacctccctctctcgcttaccactcgcacgcttttcaaactgttaaactgtgcatgttttgtaaaaattttctatacaaaagttgctttaaaaaaattatattaatctatttttaaagtttttttaagctaataattaattaatcacgtattaatctattgcttcgtttttcgtgtaggaggcacctagctaagaacacagcctaaatacataagtgaaaaaaagatagagggaaaaaaataaacacaaccttatagccactcaattgtacttgttagttctaatataagcttatagtcagtagttcgtgacttcgttctactatttaaacttgatcatatatcctgtagttatggttagacctctcgatacgttaattcagtaaaaaaaaatcgaatcaactgagactgaattactctatcttaaccaagactaaattcggatttgctagttatcaggtgactgagattttctccaaatctaacttaccttcttcttgggagccacaacctccagcaaggactactatggaaagaaagaaaaggacgagaggtgtaacctgactaacttcagagggatggtggctttgagtggcagctggacagatgatggtggttcgcggcagggcgaaaccaacaggtggttaagaatttaggggacggatccgacggcgagcggagacgaggaagcattccctgtgaactttgattcgaagtcgtgatttgacccttaccggacttgttgtcattgacaaaggaagaatggaagcaaagacaatgttaccgcctcgctggaaaggcgcccttgaccgtgaaatgcctccgcgcaagccttgttttcaaagaaagatctcgtgattgtacacacgaaattttcatggcgcaatacatctgtgattcttgagaactatccctgttcgtgaatcctttatagtatttatatttgtcaccgttaactattacggttgcaactttaaccactaatattttgttttcaataattagattatgatgaacaaaaatatagtttaatacttttgtttaagtaaataatacactttgatagcatggctattaaagtatttagaatctttttttaaaaagaaaaattatcaaagtttaaatacgaatagtgcttggtgacagatacaaaggaatagatggaatagtatttaacttgttcaacaagatgttgaagtgtttgatgaaatttcgtaccaaaaattcatagaaaaatcattggggattaattttacgtgccaataacatttgcaacccttatttacaaaatacatttgagggacggctttatgataggcgagcccaaaaattccaaatgtcgcgatggtccgaatatattcaatattggacttgtcattttatatttcaaataaaaaataatggttcaaacggatttgaaatacaatacatgattccaaatttctaggctgttctagcggtagtccttgttgatggctgctaattagtactctgattggattgattatctctagcaactgtgggcacacgaccaatacatgcatcttgacaatttaaattaacgcgtgattagcggcggggtttgctgacacggttgagagcatgttgaatagcatactataaaccagctatacacattttttaagcagataaaagatgagagataaaaatagcggactacagatttgtagccagctatagcacggactccaagacacattttatatatgatagatgagatcatatattaattgtgtagtatatatttatagataattattatatgaattagctattaagttaactataaacgatttggaccaaaagttagctatactattaaacttgctctgagagtcatgtggcatgtgctggtcacggtgaatattatgtcgcgcgtacagacaaatattgggaggaatcgggagaaggctttatagctagtgatggcgcatagcggcactgtgcagaactgcagatgcgcagccctgcactgcacacatgtacatccagatcaatatagttgccaaagtaatcgtcaaaaggagtatgcttcatcgtcgctggtgcaacaccgaactaatcattcgtcttccgtcgagtcgcgcttcatcaacatgatttctccgtcaacctatttatcatcaacaacacaacagcatcacggtgctgtgcgcatatttgcatatatagcccggtattatcagagggatcaaatatacgctatagtgctgtgaggtcgcgaaacctgaccgacagaaaagtaaagtagagcacatatgaatatatcatggatacgttgtgaacttgttgtcatggatacgttgtgaacttgttgtcatggatttaagtatcccagcgacagtaaacacatgcacacgtcatctttattaatcgattaacatgagctaaaaataaatacaaggctagtatgaccctcacgagcgttggaccgtctaacttatcaaatatcagagctggatatttatttgtataaatttgggaggagtttgagccttattgacaatagaccaaccatgatttatgcatatttatattcttgttcgtgatacaatatcgatgtgaatatctatttgtataaacttgggaggagtttaaggtggtgtttggattcaaggactaaattttaggacctgtc

SEQ ID NO: 27825 - DNA, 19601 bp, Oryza sativa
tggactaattcgcgagacaaatctattgtgcataattaatccatgattagcccatataatgctacagcaagcatgttctaattatggattaatcaggcttaaaaaatttgtcacgtaaattagctctcatttaatacttctaattaatgtccaaacatccaatatgatagggactaaaatttagtacctgaatccaaacaccacctaagccttattggcgtcagattgttgacagaaaacacgtggcctgggagatctgcttaactccagtgcaggtccaaaactcgccttcggatgtattagcgtgacagttgatttgatcctgtaatcaacaagaaatagaaacaaagaaaccgtagttaaatctataaatgatagccgatcggctagatgccgatgacatatcatttatctttgggccgatgtcatccatgtatcgatcggcagtcataaataagtaaagaagaactaaatctactcgatcggctatagatattaacgatatatactccttatatcgatgtatacttaaatcaagtgattgggatagattggtcatcatgccgagacagtataaatcacttagatcgaaatatatgtcaataataagactatatatgtttatagcatagacgatcagatagatctagcatgtatcggctaatactccgatactactctatatcaagatattaaagcaagtataatatattgagcaaaagcctaacatacttagatacaacaatatcttaacataaagggcagatttaacatgtcaataaggcatatagaacaaatgaagttaaatcagatacgatcggctgaaactccgatgctattctaatcggcaactagaaggcaggctagagatcgatattctaagcacgacttaatagatcaaactcaactgatgcagcattaagtatgaaaagaagaacaatttctagacaatcaagccgctagaagtttcatagaatggtagatatctcatataatctagatcaatatcaaaatctaacctaatcggctgccctctgcatacagatgttagccgatagtagattaggtggcgatattgctagagattatgtaaggtatatgataactcgatgaattatataaataagatgagagtatcataaagatggaagcactaatcctaagaacacaatccgtcataacgaattttacctcttgttgatgatcgaaatcgatgcagctcaacccgaaagcaagaactcgtcgaaactaaagcaaaaagggtggcgatgcgccgagattgtattgaacgtgtgtgttaaaaattacatagggctcggggtctatttatacccgaggattacaagatatgcctataccggacatgaccactatctctaacaaactctaagataccacaagtctttgcggcagacttttgcccacacttatctataagaaatttacataaaatatcctaattaatagatacaattgccttcccaggactccatccatacgtgacaatcatcttgaagtacattaacttgaacccgatgtcgcgtacaagtcatattgtcggaatcggctatatcggcttatttagctcgactcagactcagccgatcccaaccgtagccgatccgggcatcagccgattcctgctttgtttccgaactcgatcttctcttccgactttgcttcgatctaatcttctctccgaggctgatgttaccaaatttggttgttaacacagaccaacaaggctcaaactgaatttattaaaaaaatgcagtttgttgagaatgatgaccgaaattaacttaaagaaatagggactgtctagtattgtcaactaaaaaaatcatttaattttttgaactgattgtacaagattcatgcggaaacacgcaacaaccttaacctcaccctttttttcccttttccttttcccgtgttcacttaggctccgttcataagtcctagttcctaacttcctccgcctcattttccgcgcgtacgtttcccaaactgctaatggtaccttttttttaaaaaaaaatttatacgaaagttgtataaaaaatcatattaattatttttgaaaaaaaaaactaatacgtaattaatcacattctaatgcattgctccgttttcccattccagcgaacacagccggagctagtcctgcgcatccgcatcttggaagaagaaacgagcaaaatacaacacgcaaaagagtgtttccctatgctgacggctcacgtcttctttttcttttttcgaacgactcacattggatggtgcgaagttctattgataaaacaggaaaaaattaaaagattacaatctgtaaggtcgtaaccaggaaaaacaaggcttaaagtcttcaagataagtttttaaaacgagtccaagccgccgggcagactgcgaatttgcaaacccgtcgaatgccagccagtgcacccacaacttgttacttggcttgaatcaaactacacagtggcaagtgctccttccagctatatattaatcacatcataaccttcaatttgccttaagagatatagcagaaaagaaaggaccaaccaacagcggcagcaatggtgttgatccaccatacccatgaccatgagcttctcttgctcgccatcatcatcttcctttcgtgctctaacaatggccatgcctcccggcctcaccttcttcatccaccaccaccaacgtcaccgaccgccttgcgctcatgtcattcaggtcgctcataaggagtgacccaacccaggcactcgcatcctggggcaaccaatccatcccgatgtgccaatggcgtggtgtggcgtgtgggctgagtggacgccgcacaggccgtgtggtggcgctggacctcaccaagctcaaccttgtaggcgccatctcacctttgctcggcaacctcacatacctgaggcggctccatctccacaagaatcgcctccatggcgagataccgtcggagctcggccatctccgagacctgagacacctcaaccgcagctacaactccatccaagggccgatcccagcgacgctttcaacctgcagaggaatggagaacatttggctctacagcaacaagctgcagggccaaataccaagtgagtttggatccctgcaaaatcttcaggcacttgttcttggggaaaatagacttactggaagcatcccttcattcattggaagcctcgcgaatctgaaatttctaatcctagaagaaaacaactttacaggagaaattccatcagacataggcagactggccaatctcactgttctaggactaggttctaatcaactctcaggaccaattcctgcctcaataggaaatctctcggcactacaatttcttagtgtcttctctaataacctggtaggaagcatcccaccgatgcaacgcttgtcctctctcgaattctttgaactagggaagaacaatatcgaaggaagcatcccaacttggctgggaaacctctcatcattacttactgtgaaacttggaggcaatagactagatgggaacatccctgaatcactggggaaactgaagttgcttacatctcttgatctatcaagtaataatctagtgggcccagtacctgatactattggaaacctatattccattaagcagtttcatgtagaaaataatgagctagaaggttctttaccttcttcaatattcaatctttcctctcttgaagaactcaacttacaaaccaacaacctaaatgggaccattccacttgacttaggcaaccgcctgccaaagctccagttattcctaatatctgaaaaccagtttcatggctcaattccaccctccctgtgcaatatttctacgcttagatggatccaaacagtaaacaattctttgtcaggaaccatcccccaatgcataggaatcaaccaaaagagcttatattccgtaacttttgcagtgaatcagtttgaaacgagtaataaatatggttggagcttcatgtctagtttaactaactgcagcaatttgcgactacttgatgtgggtgacaacaagcttacaggtgagctaccaaattcaattggcaatctttccacacgtcttgagtattttgtcaccaactacaacagtatgactggcaaaatacctgaagggctagggaatctggtcagcttgaagttcatcgagatgaacaataacttctacgagggcacaataccagactctcttggcaaactcaagaacctgaatagactatatctcactaacaacaacctttcaggatccattccatcaagtatcggcaaccttcgtatgctaacattattatctgttgcaggcaatgcacttagtggagaaataccccccagtctcagcaattgccctttggaacagttgaaactctcatacaataatcttactgggttgattccaaaagaacttttcgccatctctgtcttgtctacttctttgattttggatcataattttataactgggcctctgccctctgaagtgggtaatctaacaaaccttgcattacttgatttctctagcaatttgatttctggagagatcccgtcctccattggtgagtgccagagtctacaatatctcaatacatctggaaacttactccaagggcaaattccaccatcactagatcaaccaaagggcctcctgttgcttgatctttctcataataatttatccggaagcatccctaagttccttgggaccatgacagggcttgctagtttgaatctttcattcaacaactttgagggtgatgtcccaaaagatggaatctttagcaatgcgactcctgctttaattgagggaaataatggcctatgtaatggaatccctcaactgaagttgccaccctgctctcatcagacaacaaaacacaagaagcaaacatggaaaattgccatggcaatttctatatgcagcacagttctatttatggcagtagtagccacatctttcgtgttccacaaacgggccaagaagacaaatgcaaaccgacaaacatcacttattaaagagcagcatatgagagtttcttacactgaattggctgaagcaacaaaaggttttacttctgagaacctcattggagcagggagcttcggctctgtgtacaagggaagaatgaaaatcaatgaccaacaagtagctgttgctgtgaaagtgttcaacctcaagcagcgtggttcatctaagagttttgcagcagaatgtgagactttaagatgtgttcgacatcggaaccttgtaaaggtactgaccgtatgctcaagtatcgattttcagggccgtgatttcaaggccattgtatacaagttcctaccgaatagaaatttagatcaatggctacaccaaaatatcatggaagatggtgaacacaaggcattagatctcatcacgcgactagaaatcgcaattgatgtggcatcctcacttgaatatcttcaccaatataaggcatcgccaatcattcactgtgatcttaagccaagcaatgttctcctcgacgatgagatggttgcacatgttggtgattttggccttgcaagatttcttcaccaggacccagagcaatcaagtggttgggcatcaatgagaggcacaactggttatgctgctccaggtaagctcctaattgttgtagcttttttttatcatatttcatattatatgtatcctactatgctggattcagccaaaatggagtaagacttattggtacttcattttactacatagacaagttttgatgaaactcttatttccctaggaatttgaaaggggaaaaatgaacaagtatatggtagcaaaatgttgtatcctgtaaatggatttcgcacaaacataaataggcttgtggagttattttctcataagccatttcttatttttagagtatggactgggcaacgaagtctcaatccatggcgatgtatatagctatggtatattgttgctggagatgtttagcgggaagagaccaacagacagcgaatttggagaatcccttggcctccataattatgtcaatatggcattgccagacaggacggctagtgtcatagaccttagcttactagaagagacagtggatggcgaagcaaagacatcaaaatctaaccagacaagagaaatgagaattgcttgcattacctcaattctgcatgttggagtttcctgttcagtggagacaccaacagatcgcatgccaatcggagatgccctgaaagagctgcagagaataagagacaagttccacagggagttgcaaggagcaggagcgacaaaccatcaagacattcaaatctgttgatgcgcagcaaccaaccggatcaataaaggcgtaaagagctgcaagatttctgctactccttgccatctaggctagccaaaataaaatcataatgttgcaaattacaaagtttggcattctgtttgatccttgccatgaagatcttgtacatactatgaaccaaccacatcttggcaaatcacattattatatgcttttcctttgttgatatttcttcctcacaaaaccatatatgcctttctattccccttttgtaagtgacacagtaaacctagtcgcagtgaatctctaaaaaaaaaaaaacactatacgcttgcatcttagtttaactacccgcaggattccatccatccaggtgagttccccttcctttgtttccattaggtaatcacagaatcacagtagatcactacatatatatgaacgaaagtggggaagagggcgttccttcacctccggggtagcgaacgcgtcacgctagaaggagaagaggcgtgtcgcgggcgcgggccgggagctccgctgccggcgccggggttgcggcttcacggcgagcttcgcctggatgcggggccagtggcgctcgccgccgacggcgtcggatctccggtgggccgtggggcgccgcgtggcggagagagaaatgggagtgagggagagaacccaccgaagcaaaaggggagagtagatttgggctttgggctttgcttaatgggctattccccctaaggccgacacgcatgtggatccatgaattttggagggtttttggaaaaagtacaccgaaggtccctcaacttgtcatcgaattacaaaatcgtactccaaccacaaaaccagatacaatacaggagatccttaacccttaacttacaaaaccatttacttcagttccttcggtggttttaacttaggtggcggctgagtcagcgtgggacccacgtgggccccacatgtcagtgtgtacagtcagcacctctctccttccactgttttctcaccctcctctctctcactcgggcagggcagcggcaggtggggaggaggccggcgggtcggcggggcgaggcaggagaggaggtgcggcagctggcggcggcagcgggagcatggggaggcccagctgcccgtctgccccgacgccgccgcggcgcgccgtcgtggttgcgggagaggctgtcgacgatgaggaagagctgggcagcgacggtggggaggtgggcgtgggcggttgccggcggaggaagagatgggcggcggcgacagtgggcgaggagctgggccgtagaggcgatgtgtccggcctgtactttgatcgtctcaggggcagtactatcacaatttcaagttcacctgtctcttttgttcttgagagaagttcagttgtttccaacgaaagtcaacgctttgctcctctctcaaggcctcgatacaggattttttgtttgaaaaggaggattttcggtattgattccaagtcaatggtactagttttgctcaagtaaacaaaagcacaaaacacacatacatgtcgagttctaacatgttgctagtggatgaaaaacgcctcagcttttacagttagtgtcatgaagatctgctagatttttttcttatgtcctgatgcacttgtttcctgtcaaatttctatgaaaatcacgcagaattcatacgattttagacagccccaacattacacacacaaacacaaatgcatataccatgctcaatgtcctgcttgaatctcttgtattcctacaaaacaatacacatccaatttctctttacaatttacaaatcactttactgatcattctgaaagatgatcagttgagaaatttgaggtagtccttgaggtccgtggggaagcaagggtactactgcctccagaacgcgccgtgcgctcgcagcatcttcaccgccttgtccttggtcgacggcgagctctccacctgcatcagcgccagcagcttcgccacggcgccgcccaccaccatgtcctccagcaccctctcggcgggggtgggggcgcacgccaccagccacagcacgttgacggccagcctcgtggcgagcccggacacccggagcacggcgcgcgccacggcggccaccgccagcccgtgctaggcgaaggccagccgcccctcggggcacttacacaggcgcttcaggaggaggagcgaccgctcggcgacgtggcggttggcgtcgaggaggagcacgtcgtcttgccgtacctgaagaaccaccgctccatgctgcggcggtcgtaggtgacgccggtggccaccgtgacggggtcctccattagctccatcgagatggggcactggaacaggggaggaggctccatggccgtcgtcctggtcgcccggcggccgccgccctcctcctcccaccaccgcgctcgcctccggccccgtgccgttcctcgtcgtcgacagcctctcccgcaaccacgacggcgcgccgcggcggcatcggggcagacggggcagctgggcctccccatgatcccgccgccgccgccgccgccggctgccgcacctcctctcctgcctcgccccgccggcccgccggcctcctccccacctgccgccgccctgcctcgagtgagagagaggagggcaggaggcgagaaaacaggggaaggagagaggtgatggcgtggacagtccgacaggtgggccccacgtgggtcccacgctgactcagccgccacatcagagaaaactgggttcaaaaccattaaaggacataaaataaacggttttgtaagttgagggatgtcgtatatctggttttacggttggaggacgattttgtatttcgatgacaagttgagggacctttggtgtactttttccgagggtttttcatgattggttttagtggattttatcattctttgggctccttgcaatgaaagaaaaatcaaggaattttaaaagatttgaatcatacaatgaaattttctatgagactcttttgggataaaatattgggtctctaaaatttatactccttataaaagggagtaatggcccaccaccaactttcaactttctttaagagaaaaagggacatagtctcacttgttaactactcataccaactctctattttttctgggaatgaaaaatgaaagttttacagagctcgccaacctttatcgccgctactgcctcccacgacaggctcactaggtatgccgcccacctcgagcccactcgtcacttttatcgccgctactgcctcccacgacaggctcactaggtatgccgcccacctcgagcccactcgtcactgacctcccactgccattgctgtctctcacagatgggcctgccgatcgtcaaccttctccctgctggcaagttgttggggaagagaagagaggtgaaagtttacttacatgtggcatccataattttttttctgattagaatgccatgtcagttaaaacaaacatccatactgttttagaagtaacttgaacagtttttgttaagaggaggggtgaaaaattccggttatatggttagggatatcacataaactcgtcgtaaagataaaggacagaaagtggacttattccacctctgtgcactgaccgttgaaggtttgaagaagcccaagagagcccaaagcaaggcccgtttcttcttctgcggcgcccggcgctcggcgctcggatcaatcccgccgacgagcgcctccggccgccgcctcccttcccccgccgcgggaagctcatggcccttccagcgcagccgctcccgtgtcctgaacgaccaaccgccgccgccgcccggccatcgcgtcatcttcatccaccctcgaggcgacctccccggaggtaaaccgctcccccccccccctcctaatgcctgcacgattactaccgattccttctacataactagcaaagtgatccgtaggaacatttcttgcaaaatggttgtagattcagttctaggtcgtcaactcgtccgccttggagaagggaatagatctcatagatcgaatggggtttctactttcttctgaacaattttttttttcgaacaaatgccctagtattcaattttttttagccgcacagcacttacaaatttgcaatcatgtataatatagagcctctctgtaattgatgctagctttacataaacaaaaagctgcagaatccgcagcttccggcaccttatttgtgtgttcaatgacatggagcataatatcatgccatgcgcaaaaatgatcttggaatgcttcattgtcttcattggcttgatgttccttcattggacacatgtttctcaaacttgtctcttattgcttgcaactccttcagagcgtctccgatttgcacgcggtccgttggtgcctcctctgagcaggagattccaatgcgcataaccgaagtgacacaagtaattcttagatccttgccgttgtaagagtttgacttgattgctccgccatcttctgtctctggtagtaactgttgatccagaacattagccgcattgtctggcaatgccatttggacatacttgcgaagcccaaccgcttccccgaattcatcgtctgtgggtctttttctggtgaacatctctagcaacagtatgccatagctatagacatcaccttgaattgagacttcattgccaattccatactctgaaaccaacaaaaggaactgtgaagaagaagaaaaaaatgggtacatttccccattctacataaaagggacttctgtcgaaatatactcatataattaagtgagtcagataacaagaaatcctactttagaaagcagatttcttgagttatatacacagaagagaatacagaattatagcaattagagacttagaggtgcacctggtgcagcataaccgactgttcctctcattgatgcccaaccacttgatttctccgactcctgatgcagaaaccttgcaagcccgaaatcgctaacatgagcaaccatgtcactgtcgaggagaacattgcttggcttaagatcacagtgaatgattggcgatggcttatattggtgaagatattcaagtgaagatgccacatcgattgcaatgcgtagtcttgcagtgagatctaatgccttgtgttcactttgtcccatgatattagggtgtagccattggtctaaatttccatttggtaggtactcatatacaatggccttgaactcattgccctgaaaatcaatactcgagcatacagtcaatatcttcacaaggttccggtgtcgaacacatctcagtgtctcacattctgccatgaaactttgagatgcaccacgttgtgtgaggttgagcaccttcacagcaactacttgttggtcattgtttgtcattcttcccttatagaccgagccaaagcttcctgctcctatgaggttatcagaggcaaaaccatttgttgcattgactaattcagcataagaaaccctcgtatattgctcactaatgagtgatatttgtgggtttggttttgccttcttgttcctatagtagaatgcaaacagcataaatattaatgtgattaatggcattattctgcatatggagattatgatgataagtttcctggatgccttcttggtggtttggttgaagcagggtggcaatttcatctctgggataccgccacacaggtcatcatttccagcgaggaaggtagctgttgcatttagaaaaacgccatctctgggaacttcaccttcaaatttgttgtatgagaggttcaaaatagatagacctctcatgcccccaagaaatgcagggatgcctccagataaattattgtcagaaaggtcaagcaccaggaggccctttagttgcccaagcgacgatggaattatcccttggagggaatttccagatatattgagctgctgcaagctcttacattcaccaatagatgtaggaatctctccagaaatgttgtttgaagaaaaatcaaactctccaagattttttagattacccatttcagctggtaaagcccccgataaaaattatgtcccaaaaacatgttactggacaaagtagaaatgagaaaaagttgtttaggtatcaagccagtgaggctgttatatgaaagatccaatagttctagaggacaactgctaagattggaaggaatggacccattgagtgcatttccttggagttgtagtagatttagtcctgtaagattgccaagagttggtggaatggatccagacaggttattatatggtatagataatttattcagcatcttgagtttgccaagagaagctggaataattccctctaaacggttaatatccatatagagcaattttaagttgatcaagttccctattccttcaggtatttttccttctatattgttgttcgctatgataagatagctcaaatgcgaagaaagattcccaattgaactcggtagctcaccttgaagcttgttgtaacccaaatctaatgcattcaaattgctgcaattcgccaagctggataagaaaacccaatcagcatcatttgttgcttcaagctgattttttgaaagggccacaactgataagctcttctgttgaattccaagacactgaggaattcttcctgacaaaaagttgtatactgtttgcagaacttgaagcatggtggcattacacaaggatggtgggattgttccatgaaattgattgatgtctacaacaaacctttgtagattcggaagcttattgccaatatcaggtggaagagccccgctgaggcgattgctttgtaaaccaagatcatcaagggaggaaaggttgagcagtgaaggaggaaacgaaccttctagtttattataatccagacgaaggctactcaaggcaccaaggtttccaagagaatctggtatggagcctgaaataagattattttgtgaaagatcaaggctagtaagcatctgaagtctacctaatgattcagggatgtgtcctgagagccgattttgctggagactaacaaacactagagatgagaggttccccaaccatgcaggcacagttccttcgagattgttctctcccaattcaaggacaagaagtgatgaaaggttttgcagcgatggtatgctccctgtcaactttgcagaagggatgctaaggtacttgagtgctgaaaggtttccaagtgaggcaggaatggagcctgccagctgattagaaccaagacctagtccaacaaggccagcaagatcacctatctcctctgggattcccccagtgaggttgctgaattgcaggttcagagtcatgaggtttgcaaggtttccaatctctgatgggatgcttccggtgagggtgttcatgccaaggctgagtaccctgaggccgcgcaacgagcagagctccggcggtatctcgccgtggaacctgttgttgtacagagcgaggatctcgaggccggtgcagttggcgagcgacgccgggatctgcccctggaaggcgttgtcactgaggttgaggtgtctgagctcagcgaggccgccgagctccggcgggaggacgccgtgcagccggttgccggcgaggtggagccgcctcaggtatgtgaggttgccgaggtccggtggcaccgtgccacggaggccaagccccggcagctccagcgccacgacgcggccgcggcgccggcctctcgcgccgcacgccacgccgcgccaccggcacacggggacggaccggttcccccacgtcggcggcggcggcgagccactgcccgtcgacatgcgcgccatgaacgccgtcagcgcgaggccgtcgtcgacgtcgaccgccgccgcggcggcggctgctgctagccacgccagtggccataccgcggcgagcaagagacgcttgccggcgagtgccattggtgtcactgtcacgtaagaacggtgtgcaaactgcatggaaattgctatactgatgcgagagttgatcatatctgtgcatataaagcctttttatatgattataggtacccattttatatcggtttctgtttctgtttatattagtatgattttcaaattgctaaatgataaagtctgcgcaaaattctctatagaaattattttacaatattctattttttaagtttgtaataattaaagttcaattaattatgtgttaatggttttgttgttttttttggctaatttcatcttcattttcgatgcatagacagttgctttcaatccaattccagtagtccattcttgtggaaatacatcactgaatttgtccacggtccacatttttggtttctggttatttctgccgcattgccagtttgttatggagttgctacttgctagtcttctgcagagaccatggaccagcttgattgattaaccagcgattgcgaggtaatttactaccatgctgaatcgctggacatacgaaaaaaaatcaagggctacaattatctgaacatgcaaagggaaattcaatgagtcagctctattttttttttttgaaggaagatgagtcagctctataggaaagcaaagcaatggctttcagggttgttgtctgatagtgggataactactggagcttatcctgttgatgcttattgaccagcgcaccaaggttgaccaattgtgctgcaacttgctgatgggcaaagcagcagcggcgcgagataactgaacatttcggcatttttgttgctgttaaatgtcgagagcattatttgtccattgtacgtgttggtgtaggcgagaaggcccccattcttatgtaaaaaggaaaccattatttttcaagtgatctgtctcaaaataatttgattctcaattcatcttagagagaatgaactaagtatagagaacatattttcctttggagcgcacgattatcaaaatacaggcataggaaaaatgcatgagtaaaatgtcatcgcactttaaatcctaaatcctaagtaaataaaacacagaaaaccatttggatggagcacacgaaaaatacacgattttgacaaagagaaaaattccaagaacttggagctcatattaggaatccttcaaaattccaataaaacatttcattccaaaggaatttttttttaaaaaaaactagcatactgcccgtgtatttgcaacgtgattttagttaaagaaaattattattaacatattgtcactatcccttaattgttatacatatttgttactaacatattattgatcatttgaccccccccccactatatctttttgaggcaattgcttattttaaccctgttacgaagtctaactactaattcgaccttatttttttaggtttgcttatttgacctcgtttttcaaaattgaagatgaagactgaccctattttgtgtaggcaagataacggtgttaactgagtgatgatttgtccttttaaccctggctcatttgactctattatatgaaagcatcttgtgtttggacattcttaacatatttataacgaatttgatatagccttgatagatttgtgacaattttgacagatttggtctcaatttattaaatttagtttcagtttgacaattttgactttaatttttttttaaaaaatgacaaaacggttgatatacaaaattatttctcctattttgtccatcccaaattagatacaataataaagcaaaagctcagcagcagtcaaagagattgaactcgatcacagctagggtcaacgtttcgagattgaactcaagaatgtgatgcccagacacagatagcaaccagtagagggcgttggcaacaagtatggcaggtgaaccaaaatggtagatggtggatacaggccctgtgaagatggcatcgccccattcgccggtcgccgatgagtaaacggataccaagatgaggtggggattgggatgggatagggttgattagtattgagggtattttggtcacttcagggttgtaaatttattattttcttttttctaaatgaagtactaacagtggattgaaaacagggtcaaacggaaactttcattttgaaaaacaaggttaaataaacaaacctaaaaaaaaggtcaaattggtatttaggctttaaaacagggtcaaataagcaattatctctacacataaactatcttaaaacttatttccaaatctgtctcgagcttctcgccaaaggttggcgcggccgcaaagatgacagtggcggggcttctcgccaaccggctcgagcagccaggggagtcaccctgggtggtggtggcagcaaccaccagatccataccgcctcggccggatctggcggggtggcggccggcagcgaggaaggcatcgtcaacagcggtggggatggcgacgacgacggcaatgtctcggcggcaagaggcggcggggatggcgacagcgatggggatggtggcagtggcggagaccgtagatccggcggcagggcgcttggatttggcacccccacgccggatccgaccggtggcggcacgagcgtgccggcgcaacctggcaagaggatggcgcagccgtgggtgacggtggcgacgggccggcgcgacgcggcaacgcggccagggagactcgtggcgatggccgcgacagtcggcagccgacgggaggagcggcgcggcccggctggccggccggcgccggcggaggcagtgcgcacacggaggcggcggcgcggcccgagagactcgcggtgacagtgggcagccagcggaaggaggagcggcagatggctggcctactggtggcggtagaggtagcacgcgtggaggtagcgcgcgtggtggcgcagctggcgacggcggaggtcggtgaggtgcggccagtggtggccgcggtgcgtggaggtgaggccgaggtgctggtgcagcacaacgaggcttgttggtgtggagacggtggtcggcgcaacgagtggaggccagctcggtgagacgtgaccagtggcagcgcgtggagactggctggcggggggcactggtgcagtggtgcccacgcgccggcggaggttcagatggcggtggagcaatggtgcatcagtggtagatcggcaggcggtggacgtcgggtgaaaacccagggcgacgatgatgttcgagcgtcattcccatcttgagggcgttgtcgtgttgttccacccctcaagtgtggttgccgagcgaaagcgtagtctcggttctctttgagaccttgatggacggcagcggcggcggtgttttcgtcgcttctttccttggagatgtcgtctaggcaccctcttgccgaaacccccaaagcaattggtgcaagcctggtctagattcatatcctcttgtgtcggcgtcctagcttctgcaagttggccacgttggaggtcctaggggagagaggtgttccattcttctctctgaccctctccctaaatcccaacgacttggatagagtggggttttgcactggttgtaagggtcgggttttgggcgatctcaactgtgttccattgttggcctagcggtggtcggtcacgctaagcggcggccagtcggatgctagccttctcctaggtctgtgattggcgctgtcggtgtgcggatggtggtatacttttttcgttttccttattacaaccttacagagttgtaatcttatatttttttctgctttatcaatagaacttcacgctgtctatcgttaaactttttttccaaatctgcctgcagctattggtgcgacagtgttgtttcagcctgcgagactgggtgacgtgtcacgtgtccaaaagattcaaatttagaaatgacttttggatttatttttaaaatttaaagtttgtaaattcgctggtggtgttcaaaagcagggacgatatgcataatgcatgatgtgtgttgggggtgggggagggggtgatctccctcttctttgtcggagaaagcttacccgagaaagaggagggctcatcggagagacaggagagagctcgcaagaaagccatcgtcgcttgcggtgaagaagacgaagagaggtggagagagagcgccgctagtctagacctgtgggagcagctgggaacgctactccaagggacaaattgtttttatttatttttgaacattttattttttaaaacttttaacaacatttattttcaaatctacactttttttttgtcacattagacatgataaaacaagactattacatcactctgactgatatgataacgttattttgctacgccactctagatgacgtaacagtgctgttttactaaaataagataaaatatcacgtcaactattggtgacgtgacaatattatttcgtcatatcagatgggatggcgtagtaaaaaaaagattcaaattcacaaataagtattgagataatctattattaaaatccaaaaattaaaaagttaaaaaagtaataaaaattcccggtagaccccccttgcttcccaccgtttctgctcttcaggcagctagctaagttcgtcccagttttgttcctactgaattttggagtagaacaaatctgcacgaatttttttttacactcgtcagtcgtcacacaatagaatggaacttaattatccgatcttaaactgatcgatactacttttttttccctctgaaagtgaccaatgcaataattaattaccaaaaggtgattagcacataatatagacgatcgatggacgcctgatcttcaatcgttatcgtgcgggctacctgcataaaataccttacacattggctgtttatctgatcaaatattcaaccacactagagaccttatctgtgagcaattcgagggcctgataattgtcaaagctttacagagtcaaaaagttcaggcgccaattttcctcgtggcgcgtagtgcctagcaacaaccaggctagcatgcgttcctccatgtcagccaaattatcagagcaaatttgataggattactattagcttcaaatcatatattcatatatagctaatctaatagctaattgatacaatagttaactataaatatatattacaccattaatacatgattctacctcttatacacataatatatattacacatcgttttccttctctctcctctcttacctcctttacacgtgttcatagctggcttatagcctgttattatatttcggcaactttgcaaaccattgaccgctagtctcaacagaatctgcaggaacaaatcgacaatctcttcgtcaggttga

SEQ ID NO: 27826 - DNA, 1036 bp, Oryza sativa
gtgcttcttgctcgccgtcgccgtcgtcctcgtcgctcatgcgacggcgccggcgccggcggcgtcgtctcggctgcctctgcctcctcctcctgctgctgctgctggtgatgtctccggctccgactccgaccgccgcgcgctcatggcgttcaagaagctcgtgagcggcgacccgtcgcaagccctggagtcatggggcgacggatcgacaccactgtgccggtggcacggcgtgtcgtgcggcgtcgcggcggggcgccgccgcggccgcgtcgtggcgctggacctcgccggggccggcatcgccggcgaggtgagcccggcgctcggcaacctcacccacctgaggcggctccacctcccggagaaccgcctccacggcgcgctgccgtggcagctcggccgcctcggcgagctccggcatctcaacctcagccacaactccatcgccggccgcatcccgccgccgctgatctccggctgccggcgcctcaagaacgtcctcctccacggcaacaggctgcacggcgagctccccggcgagctcctctcctcgctgcgccgcctcgaggtactcgatcttggcaagaacacactgacaggaagcatccctcccgacattggcaaccttgtaagtctcaaacagctcgtcctagaattcaacaacctgacaggacagatcccatcacagataggcaaacttggcaacctcaccatgctaagcctcagctcaaatcagctgtcaggctccatccctgaatcgatcggaaacctctcggcattgaccgccattgccgccttttcgaacaacttgacagggagaattccgccattggagaggttgtcatctcttagttaccttggtttggcaagcaacaaccttggaggcaccattccttcttggttagggaacctctcgtcactgacagctctggatcttcagagcaatggctttgttgaatgcatccctgaatctttaggtgaccttcagtttcttgaggcaatttcactggcagataataagcttgagtat

SEQ ID NO: 27827 - DNA, 38354 bp, Oryza sativa
ttgccatgatcaaagattcaaaggtagcttcagtattcaagtaacggttttgctatgatccatcgtttaggcatcccctagctaaaaccacccaaccaattagtacaaactcactctagattacatcctcttgtggcggcatcctaactagtctctacaagctggccatgtcggagggcctaaggggagaggagttccattcttctctctcaccctctctccttaactcctgaatacttggatagagcggggctttgtgttgattgtaagagttgggttttgggcgatcccgaccgtgttttctttgttggcctagcggaggtcggccacggttagtggtggccggtccggtgctagccttctccttgttcagtgttttggcgttgtcggtgtgtgggtggtggtatatttttccctttttcctagttacaacttccagggttgtaatcttataatttttcttctgctctatcaatagaacttcgcaccgtcttatgcgagtcgttcaaaaaatattataacttgtatgtaattataatataatatgtatgtaactttttatgtatttttaatctggtatatttactttaagactctgcaagcgggaaaggaaaaaatcatagcgcaaccacgggtgatgcaatttggtcacgtgtactcctttagtggaaataatgtgttaaacaaattatattatagttatgtgtaagttacactataattatattacaattttaatatttacattggtaatccctttcaataatactttgctatacctggatgagttaacgtttttatgtaatcaattaatttaagtgttaagcagcaggacatgcctaacgcatttcttggctcttaccaacaacatgagaagggttgcgttctgctatagcattctgttagcgtttgcaatgatcaaagccagcttcagtatttcatcaacgctgtttgattacatttccaaacagttgtagtactgatcacttttgctacagatcacactctctatatttcagttactaccttagttttttaaatacttgataccattaactttctgacaaatgtttgaccatttgtcttagttaaattttttatgtaaatataaaaaaatatgccacacttaaaaaacattttagcataaatcaagtcgcaataaaatgaataataattacataaactttttaatatgacaaatgattatacgtatctaaaacaacaacaacattacatattaaaaaagggaggaaatatgtgactagataaattcagtagattcagaaaaccttttgctgcaacgaaaaaaaaaaaagctaggtgcgaattgtggtgggcctatgcccctcgagtcggcttcgggtggcccggccggccggagatagcgaagctggcctgctcgttagcccgcccccaatgcggcccacgtaaatcctgacaatcgcgacagataaccgttttcacgttaactaggtcaaaagttaaacaaaccgttgacaaaccatactttacaataatgtcaaaatgttcaatacaaactcatgattatctgtagtacgctgtacacattagtcgttgttaccttgcgagatcaaccgtcttccaagagttgcctgtgcaaatttgacgtgctcgctagtcgctagttgcccgtccatgtgctaataaaaagagaaaattccctatatacccctgaaaatttactcaatcccttcaatacccctgaatttgacattatcccttatatacccctgagttttcattttgatctcctctatacccatctccgttagttgaccattagttgaccgttaaatattttaaaatgactatattacccatcctatacatatgtgtggtacctacccaataaattttcatatgaaaaataaacttatacaaaatacaagcaatataatcatttaatgcccaacttaaaaaataaaacttattattttttattttttaaaaattatgattaaatccatacattagtttcaccagaaaattaagagcaaaaactaaatgttatttaggtttaaatttttgggaagatatacgaaattcatcaaatttgatctgaaatttatttaaaaattttaaatttgttttctaatttgtgataaactaattatatcccctttgttttttcacaacgaatcttttttcactaaatatttgttgaaaagtaattttcaaatcttatgcagaacttttttttacaataaatctttttttattttaatgaaataatgttttattttcaaaaattcataacaaatatttagtaatttattccttattggttttcacaactcaaaaaatttacacataaaacatttctagcttttaacaatataacaaggacaataaagtaatttctacaataactaacggtcaaactaatggtcaactaacggaatgggtatgtaagggatccaaataaaaactcaggggtatataagatatcaaacaaatttcaggggcgtagaagggattgggtgaaattatatgggcatatagggaattggccctaataaaaaagaaattggtgcggtctttggcacgttagctagttagcccgtcccatactgtatacatatgaatatgtacatggattcgtgtatgaatctatcgacaatctaaaacgtcgtataatgtgaaacagatgaagtatttaacagagcttattaataatacttttgttatcgttttccttttagataattttattttcattttatttttttaggaaacacaattttattttctagtgtaacttacagcacatagtatttacctcaagatttacaatatccacatattgtggtgagatttattgtatttgaaaaaaaatgataatagtttccactctaaatttttatttaaaagtataaatgaagcacacaagtaaattggtgtatgattagattaacatgttaaatgtatatgagactgtttagtagaattccaacacataaatttagctttaggagttagatctaaagcagagttgtggaacagcttaaatccagctccacctctatagttcagccttgtttggcaccgtttcagctctggagcccagccaaacaatttaaactctagctaaaatgggagcggagctgggtggagcactctcacaaaatgaactgagaagtggagctaggtttcgactgctccacaactccactctaaacccacattataaagctaaatttaggggttagagctctaccacatacctactccctccgtctaaaaaaaaagacaaaccctgagtttccgtgcccaacgtttgaccatcagtcttatttgaaaaaaattatgaaaaaattaaaaagacaagtcacgcataaagaattaatcatgctttatcttctaacaacaataaaaatattaattataaaaaaattcatataatacagacagtcaaacgttacatgaaaagtcatggtttattttttttcgatggatggagtaaaatactgtattccgctccggttcggcgacactccacgttccagtcgtcgcagtcccggtgcgcggcgcccaaccggccaacccaccgacgcggcaggcagcgagtcagtgtgcgtgcggctgtgcggggggagtgcgagtgcccatccgcccactccactccactccactcccctctcccgcacttccatccccaaccccgcccccgccgcggcgccaccttccccctctcctcttctctctctctctctctcatatggtctcccgcggcgcgccccgctactgtccatcctagcgcggagccgcagcttccccacacgtccatggccgccgccgccgccgccccccggttcttgcccgtccgcccgctctttctcctcctcctcctcctcgtcctggccggcgtcgcaagcggcaagacggtcaagagggacggtacgtagctggctgctccgctcatccttctctgcacttcttttttttttctttcccccccgtgaattgagcgagtgatactggtctcgtgatgcgcgattccgcgacatggaatttgggaaagatttggtttctttggccgttccctgctggagatctgaccatctggtgccttgcattcttttatgctcatggctgtgaattgggcacctgctcgatcggttagctgcctcatttggggtgtgtagcattgggatctgttgttggcttgtgtcttagatgtctaaattactctgtgattgtatacatgtgactatctagttttgccatttcctagctgtatactaattaggctccacactgactgacactgcatcaggtggagaggtttatctcttcatagagacatggatattagtctgacttaacaatgtttggcggccattgagtaatttcatggttcgtagaatgttggaaccgactgaaagaaaacaattttttatgctgcagtgaaagcattgaatgagatcaaatcttcgttaggatggagagttgtctactcatgggttggtgatgacccttgcgggcatggtgatctgcccccctggtctggtgtgacctgttctcagcaaggagattacagagttgtcaccgaactgtaagaaacacgtcttcaatttcttgatcttaaaattttctgctgacatacataaggatctgtaaggatttttagattgttatgtattgccttttctatgtgaaagaatacaaatctgctcgtagattgattgtttccgagtggggaaaaacatttgtcacttatggtctccaaggtcaaaacttttgtcttgcttggctgctccaacatccgaaacactcttttactccctagttaattaaaagtgcaatgatatttcttgcttgctgatttgatgtggaaactagctgattaagtcctttatcttcatgctgtagctgtctgaggaatcttagtaaaaggctcaaagctacacaaaattcataattttaatagtttcttgctgagtcttaaatatgcaacctcaacctgaagaactgtacctgaccacgctttcttgtgtatgccagatataaagctttggtgtatgaggccataaaatggattagaaaatcctcttacatgatgccatttcgttccttaaatttcttttctgtaaatgctttgaaatagttggcaagaataattcttaactgttctaataccaatggctgctgcatatggatctcaactctattaaccgcaaaatcatgcaacttatgttaagctatattatatgtttgttgatgtacaaatctgagtaactatattgcttatcttatttcagtgaagtctatgctgtatcaatagtcggtcctttccctacagcagttacaaaccttttggatttaaaaagattgtaagtatgttttccttgtcaccactgctttgttcccgtattatgtacaattatcttgaggtgcatgtgttggtactttgtaattatttggtgcaacctgagtggagttaatgttattgtctaattagttaccttctttgcaacgataataaattatacgtttctggtcttttagagttttagtacaaccatcagcgaaattacaatagaacacatctgtgcagatgtatgcgctcttgtaaatttatgtttccatgtaataggctgtgtcatgaaaaatggatttagagagaacattagccataatagaagaattaatttattctttaaatcacttcagcttataaaatatggagcttttatattgcttgagttgcagaattctatgtacaaacagtttcttccatttgcatattgcagcggatatatttgagtagtattttattttcccaaaaaaactatacaggaccaattcttctataaaacaagtaccttaaagggtgtaagtatctttgtaatttgaccatatcttgcatatttaagcaatcctttaaaccatgtgaataatgactactccaactacagggatctacacaataacaagttgacagggcccattcccccacagattggacggctgaaacacctcaggatattgtaagtatggattgtctttgtgtatgcagagctagattaagatatgcttgtcatcctgagaatagatactggctctggaaaacattttaatttgtgatgcataaaccatacttgtttatgctctttattcctcagcctcagataatactttattgaatcaatattactatgttggttattggctagatagctgcctgttcttgagtacagattctattcagctaatcaaattgtctcatgttcttaggaacctgaggtggaacaagcttcaggatgtgctcccacctgaaattggtgaactgaagaaactgacacatttgtaagttctttttctttttggaattcttgagtttatatggaaataatacttcattttttgtgcctctaattgccattgaaaatatgcagatatttgagcttcaataacttcaaaggtgaaattcctgtggagcttgcaaacctaccagaactgcgctatctgtatcttcatgagaaccgctttactgggaggatccctcctgaacttggaactctcaagaaccttcgtcacctgtaaacatccatcccagatccttttactgccccccaactattgacatgcttgtctattgagttgtcttactgaatgctgaattccatttttgcagggatgttggtaacaaccacttgataggcaccctcagggatttaattggcaatgggaatggtttcccctccctcagaaatctgtaagcagattttttacaagctaccatatccattccttctctcctgaatggcaaatgctgtcttcctaagcttactgtaaactgtgttctacaggtatcttaacaataatgatttgactggcgttctgccagaccagattgcaaatttgacaaacctcgagatactgtaagttttcttaaactttgctgtcaacactgtatcaagaccctgtaaccatcacgtcattcttttacatatgtatactctgcaggcacttgtctaataataggctgattggatcgatatcaccaaagctagttcatattccaagattgacctatttgtgagctttactgcttcgatttctatatttatgtaaagtgaaatatttgatcagcttgggtctgatatgtcatatgtctcattttacaatggttttacagatacttggacaataacaacttcattgggaggattcctgaaggattatacaaacatccatttttgaaggagctgtaagctggctttagaatttctactctcacgacattattatttcatacttgaatctgctctgttttaggtttacttaggcgcacacttttttttttttttgatgcaggtacattgaaggaaaccaatttagaccaggaagcaaatcaaaaggaacgcacaaggtgcttgaattacctgatgctgacatcttagtttaacaactgtttattctgtgacgatagcagagcggctaccgttctacatctcctcagcatgcaccaacaaaaatgtatgcatgtttttaggatatatacgatatatgtatcagtagtacagacactgtttctcacagcactgttcgaggacaagttcacacacacaaaaggccacttgcaaaccagaaaaagaaaaaaaaattgtaaagtccagagcactgctgctatcctgtcatccaagagtatgttttcattagatgagtgtacaggttgtattgcatttcttgtaacttagtactactgtgtaatggagatgcagttcagctgtattgccagcacatttgcatggcaccgacagtcctggtgtaatgtaaccagtgtgctcaatgatattttttcttataccactggacatgatctggccttttgcaagcaaatttagggccatgactaatcgaaatcataggcatgtggggaggagaatatgccaataataacaggctggatctgcctatacgagggagcactcttattatgagctaatgctcttgaaccctttcaatttcatatctacagaaaaaaaagccagaaaataaatgtttttttaaaaacaattttacaagagattaattatatataaaaaagaattgggccatgcactcatgatgaggaaaaaaaactgaagtgaaatctaggaaaaattgtgtggtgtaggagtacaaactagcagtctagtaccatgtcatctccaggcgcctccagtgcagaaaaaaaaaactgacatgtttataagctcagtttgattggatgagtgttgcagtaaggaatactgtcaagggcacatgcatttcttacaccatttagcatgacacctctgctgggatgagtggtccatactgcatctggtacctctgctccctttcaagctcatactatgatgctttttcaagggttatgtttgttgctagtaaataaaggatatgaaataggtttgatgaaatgtaaaatacttgtcctgattgatgtcaccaatgtagcatggttagattgtgctgccaccctatccaataccttggtacatgatgccaaatatttgctgcattgctggaaccaatgtactgccaatgtaaatctaacactgttattttgtaccctatgaaaagttcctgtcctgttctctgaattgctgtgtgtttagccccggcactcttgatctgtttgccacaagcaaagtttttcttttcttttctcttcagttcttctccccacatgaagtgtcactgtccagtgtccacccccaaaatggtccttgtttgtgctattttgctgttcccatgtaagcaaagcctgtgctatattttgctggatcatatgagctactcccatggagtagtatatttcagacttggagatgtcctagtctcccatgcttccaagcacatctgcacatggagaaacattcaccacctatgattaaaaagggcaagaactcactgaagacaaatgcttcatgagcaaagtgaaattttctgtttcaaaatatgaacaaatagctaagccatgttcataccacagtgccagaggcttgtgacacatcctgcattcttcagatgctgccctcaggcatgtggcccatctaatgactagcggctcaatcatactttgcaggatagtcaattgtgcaggcttttacactggttttgcaagatgttcagtacttgcaaaatgaacagttacttgatgttgcatgattgaatcttgaaagagaaaaatatgtgattatatgattatgtatccatggatcatatctaattgcaaggttcaggaaaatctcttttacataaaatagaaatttagaaaattagggcagtgttgaggtgttaggttcaccgacaccgttagggggtgatgtctgctaagatttttgtgtggttatgttccttccattatagctgtcaattgtcaccttattaaaatctgaagaaacactcccctttctcctcctttgcattttctgaagaagctgagatatgaacaaacatgccgactgaatttcactgaatttctctgctgctacctgcccatctttcatccataaaaaaaatgtaaacagttaaaaatacagtagcactgtacctgttcttgggtgtatgatactaaattactaatatagtataatgattcccattcctgtagcctgaggagcctgtcatttttgccacttgtttttcttttgccctctctgcaaagaatcaatcagagaacacacacatgagtacatggcacaagccaagctgtgcctctgcatgcatgggtcacctggggtgctggagcatgcagatgcagcagctttgccactgtttgtttatttcaccaaaacacaaaccaaaaggcatcaccaaggcaaccaaaccaaaccccatggatggtccaaggctgtgagtgagtgagtcccagcattcatcataattttgattctgctcatccggatgtttctctgaacatgacaaaatgaatgacatttcctttatctagaccatcatccctttatctgaagaactctgctttttttaatccattcttgaggtttggtatggtttgtggagttgttcagagaacagctcaaacctggactctactgatgatgctctttccaaaataataataataataataataaaacctttagagcaaaattaggaggaataatttacataactcaggaaagaatctataaatgagctatatacaaaaagctcatcaatcttccaagtgacctgtgacactgctgctctattctataacaccataagtgctaccaaaccacctatcaccaaaaccacctccaccaaacctaacggccgacctcccctgggacgaagaagaatattgaattcgttccattccatgtcactgaatttgtgaaacactatttttaaggttcattgattatctgtttttttaaaggttcagtgaaagcaatggacccagaatcacttgttcagtactgaaatgtcactacatttggagctcattactcaagtgagcaaaagtagagttgagaccacatcaacttgatgttaaaaattaagaagttttaccaagtaaagaaaattaggaacaggtactgtaactgcatgtggggtgatggtagtattatcatatagtagtagcacaattagcaatgctatagtataacaaagaatccaaaggacactgtattttaggctgcaagcacgtggttagccaaccccaatctgattagctagatctgagtgctcagaagaggaggaacatgcactttgtagtttgcaccaattgagcactgcattatcccaaatataaaatggcaagatatctgcttcagcttctcttccttcttcctttttttctctttctttttttttgtttgctgggagagctcatgagaggatggcatggcagcatgtagatgaagacatgcaagtcacctagatgccacttctttaaaaaggttaggtggtcactaacttggacaccactccttcagtgagcaaaggggagaattaagtaaataatcagcactagaattcactcaattatctcatgtgttcttacttcgtactacacattttgataatattttcagcaagatatgatagaccacctatacttttgtcactgacaaatagccatttgatttttttccccgggaaaaaacttttttttgaaagatcatgaaaagaccattttcaacatttattctggtctcttactacctttgtatttaaatatatgatactgttgattttattcgatatttgatgtgcaaccttgatcactatttttctattagaatataacgataaaacctaataaaattgtaacattataaaagtatttataaaaaaatctagatctttatattttcaaactaaatatcttaagagctactcatggtcaaaatttcaaatatctgaaccgaataaagtcaaccgcgtcacatatttaaatatggatgaagtattatatttcagtacacacacaaaatccttccattagtttagtgatatgggatcgcaacctgtaaatgagcagaacaaaatggcacgctcagcttaggtaagaagttccactcacaagtcaaactctgagctctcacgaaacatacagctccttgatctccagaacaacaaaccaaaaaaaagaaaaaggaaaacaatgactcactctaccccgaaactgtcggtgcaaataatcgccacgcttttcacaacgcattagcagtaacagcaacagcaaaacgtaattaaaccaccaccaattgcaagcttgcactgacccgagtaataatttaaggtcctgagtttaaatttttataagagcagttgtttgcgaggctaaattactaattcaaataggtgtatatattcggttggatgtcgagtcctgttaaaaaaaatacccttctctctctacaaaaaaagctagaagcttaatcactagacggagaccaagagaaaaaaagagaggaaaaaatgaaaaaaaaaagtgaacaagaaagaaagggagaaaaacgaaaacgaaagtacgggcggatgtgccgtgcgtgcgcgtcttggcagcggttgatgaggagtagctgtcggagaggcgagggctctgaaagcttcaacgccttgattgtttagtcccacctgctctgctccttctctctccgtacgttggtttctttcttcttccattgcatctccttccatggacgtcggagacgacgaatctcactcagtgcgtcgtcggagtggaaccgttcaattcaaagatcggtgggtggggattggaaggatcggatcgggagcagtgacgccaagtcgcgcccagtggcgatggccagaacgtcaattgggaacgcgagagtcaatggcttgagctgagttcaaaccaattgggtcagaacgttgctctatagcaagatttttcattaatattaatatataattaattaagtattagttaataaaagttcgaaaaatatactaatatagtttttttaaaaaaactttcatatataattttttaaaaatacgcgtgtgagaaaagcgagagatgacttacgagaaataacaatgttcatctagttggggtttctgaaataatttatatattcaataaagaaatgaaatataaatagaacaacatcatgctatataattacactgaatgcatgtttacaaacacccttttcatctagtctagaaaatgaattatgcaatccattgctatggaataaaaacctcaccaaacaccccgcatcattatgttttgatctttaagcttttgtatggctatttagaatggcaattccacctttatattcaatacatttgctatagcaccaggtttctattacgttagatgctattgccacattcaagatttaagaggtgacttgtgaggaattaccatgtttaatgtttaataaacaaattaaatcatgttaaatattatgctatacataactcaattacatatgtgttcgaattgcttcaattagtcatatagaaaataagttacgctaaccactgttgcagaaaagaaacctcaccaacaacccaatatcaagccaaaacaataaaaccgcctagcgattccgagtcccattggttaccttaataaaccaaagcaaaaactaaaatttgaatttttaaatttaattttgaagttgattttaatatatttataaactatctaaactaaaagtctataaaacaacacctccttaggaaaaaaatatttcaaaaaataaaagaaaaggagggtaaaaacaaactttttttttaaaaaagagctgaagaagaaagaaatgaacaaccaatcgaaatcacctctcttctttttttctctcctcttttttttttctttctcctcgcggccggaagagggaagggggaagcaagcaagaaaaaaaaaagaagaagaaggagaagccatagccgccgccctcctccacactccatccgcttcttcccctcctcaaaaatcccccaatctctcgagctccagaggcgagagcccccaaaatcccccgccaaattagctgttaggcccccgagctaatcccgaattcgctcgcggcgccctgcattattccatttattattgttattattattattcccatctcttttttagtttttttggtgttattttggttgcgtatttagtatcaccacccgtgcgattagcatgtctcagcccaatgccaccgcctcgccgccgtcgccggaaccctaggccgccgccgccgccgtcgccgtcgccggagccggagtcgtcggagctcccgtcgtcggcgggggaggaggaggatgcagctgcggatctcgccgagcatgcgcagcatcaccatctcgagcagcaatggcgtcgtcgactcgatgaaggtgcgggtggcgccgcagccgcccccgccgccgccgccgctcgcgctgcagggggtggtgacgccgggcgcgggccgccgtggcggcgggggagggggaggtggcggtggcggtgggtggtggggggcggggtggtactggcgcgccgtggcgttcccggccgtcgtggcgctcggctgcctcctgcccttcgccttcatcctcgccgcagtgccggcgctcgaggccgacggcagcaagtgctcctccatcggtaagatcggcgtcccgcgatctggggcggcgttttctgggcttggttgcagagggttgttgggttgttgatttggctcgttttggggggcggcgaatctcggatcttagtgctcttgggcgtgcgattttgcgatgtcggtgggaatgtaggtccgtggagatggttccccgacttcctgtctagatttcctgctgaaaacgcgtgattggctctctgatagacttgtttgttgagctggattcgaggtatcaggttatgcgatcttgtttatgggtgatttgaactggaaacatgagagttagacgattcgagtttatggttcagctcttgctggtgagttatttgttggatcccgggcagctgattttctggtattgaccaaaaatgtatgattcgaactcagctaattttcgaacatctggaatgagtgctatcagctgcgatgttgatttggaagtattcttttatcctggttttgcgctgaatcttgcaaaactggagtagaaacactatcctgtgctggaactgcttagagggttagcttacacaaaatcgcaaacaattgggacattggggatggatatgcaagtaatgcaacctagagaaacaatgcaacacccttgatgcacctggctgattgatttgttgaacttataatttgctttgcttctgcgcctatggcagcaacattcttggccacccgactcttacttgataaattactaaatcaggatcacttaacagttctctcctactctcactataaatatgttgtcaccaagcccaagcaaccatgttgtttatgtttgatgcttcagttattgggatttaaaagctgctatcttatgtgctagacttagcagttgtctccttgaatgtagagatttctgtaatataagtttgaatgctgtttatataccttagacaggttatacacctctcaaactgatatttacaattcagttgcttgatgcatcaatttgttctaagtattgcattttttgttttgcagattgcttggggaggcgaatagggcctagtttccttggtaggcaggggggtgattctatggtaatttacttgattcctgtgcttctatttgtaggtaaaacatgatctgtgttttaccatttctattaaagaaaatgcaaaatgtattgacttcttactcaatatgcacagaggctggtgcaagatctgtataggatttttgatcaggttaacaatgaagaatctcctgatgataaaagaataccagaatcattcagggactttcttctggagatgaaggatagccattacgatgctagaacatttgctgttaggttgaaagctacggtatggaactaacaatcaaagttttttttttctttgaaaacttagtggtgcataacttctttcattaaagcagctaacttctaaaaccaaattgattttgtgatgcacattttgtagttgacagtagcatattgtctgaagtctttgtgttcctggacaaattataggaaaataatgcattattaattcatgataaacagctgcatgaggaattagatatttagatcaagtgcctgatatccaattatgcccgctcagccacccagatgggccttaaaattagtttgaaggagagagtgatacaagagtgacctttgcttatgaaccatgactttgtagcaacattttgttttcaaatgtttttggtagggatgatatacttgttgtacccttattttttgaaagaaattatttcgcttgtgttttatagtgggatgtcttgcagctattggtacgtaatttccattacacacatctcacgttttacatttttggtataaaatttccattacacacttctcacgccgaacatttttggagcatgtgattctgctcctaatgtattttgcagttttgctgctggtggtcatttgatactgtcatactggtcgctagaattttgaacttggctttggtggcaccacatagcttattcatgtcttatatactgttaaccctgatgaggcactctgatgtttgcatcctgcatgtgaaatatattgatcactttatgtgcttctttgtagatggaaaacatggataaggaagtaaagaagttaaggctggcagagcaattatataaacattatgctgcaactgctattcccaagggcatacattgcctgtctctgcgtcttactgatgaatattcctcaaatgctcatgctcggaaacagttgccaccacctgaactgttacctttactttctgataattcattccaacattacattctagccagtgataatatccttgctgcttcagttgttgtgagctcaactgtccgatcttcgtcagtacctcataaagtagtatttcatgttattactgataagaaaacgtatccggggatgcattcttggtttgctcttaattctatatcacctgctatagttgaagtgaaaggtgttcaccagtttgattggttgacgagagaaaatgttccagtactagaggctatagaaaaccatcgtggagtcagaaatcactaccatggagatcatgcggcagtttctagtgcaagtgacagtccgagagtgcttgcttcaaagctgcaggctcgaagtcccaaatacatatccctgcttaaccatctccgcatttatttgcctgaggtactttgtcctcaatattctctattgcggtataatagttcatcattatggtccattggaatgtcaatttatttagtattttctatgtttggaggattttgccagtttagacatttcagttttgtgaaaatcccctgctcatgatacacatttacagagtgcattaggttgtgcaaatgtctgcttggaggcatcagatgattaattgagcttggaaatgtcatggtgcaatctttcttacacaggacaaaggaacttagtggaaagtctacagttaaatgagaaaaaaagtggtccttacttggatcaacttgaatgttttgaatatgctttgatttgaaaatattaggttatgcaatcactaagcaaaataaccttgatatctgattaaaccattatttttattttgggctatccatgttatcaataaattagaatgggctgaaactggataatagctgtgttacttttacagctactgacaaatgaaagatatggcctacccatctttctttagctgatgatattatttatttatacagctttttccgaacctcaacaaggtggtctttcttgatgacgacattgttattcagcgtgatttgtctcccctttggaagatcaatctcgaagggaaggtgaatggtgctgtggagacctgcagaggagaagataactgggtgatgtctaagcgcttcaggacatatttcaatttttcccaccctgtgatagctcggagtcttgacccagatgaatgtgcatgggcatatgggatgaatatatttgacttggcagcttggaggaagacaaacatcagagagacataccatttctggttgaaagaggtaaccttttttgtccttacaataatctctctctcattaatcagatgggtgctttgatcactaagcatcagtgctatgaaaaaagtgccttatctgtcttggcataaggtagttgttttgttaagtgctggaagtcttgaactttctttcacctggcttgcttctagttaagattctgtttccaaaatgtatcctctgctgcttttgagatcaacaatactattctggatgtacctattcgacatgtagaattttagaatggttcctcatgtagatgaagtcttatgatcaagaagcttcaaagtaatattgatactgatgaataattaaagttcattccaagtgaaactttcatatgtacagtaggcatgcgcataagacctgatttaagaatatataaggactctgacctccaaaccagaacctccaacaggttaaactgggatttagctgatgtgtctattagagaattttcttgaaagtgacggctaatctaaaatctagatcccataacagagcagtcaatgatattcttcagagtattacgagcttaattgtttggtataacttttgtatatttcttgtacagtttcatctgatgtattacagaatctaggcagccaacattgtattaaaatatttttactggtgtgcttctgacatttttgctgccagtaacacaaacacaccccgccacatatattctcacttatccgtgtatatttattgtgctaaaatgtgtaacaagatcataatggtaataccattactgctaggattctacctggtttatatttgccattatgtgctatatgaaatagacctaagcaattaagctatattaaaagtattgctagccactgacatagagaagattttagtttcatctttgtaaatacctcaggatggtaattttataatgctgaaaagtgaacagtatggcattgtctatgtctttgtttaatttcataataacctctgcttcttttgcagaatctaaaatctggtcttactctctggaaatttggcactttgccgcctgcgctaatagcattcaggggccacctgcatggcatagatccatcttggcacatgcttggcctaggataccaagaaaatacagacattgagggtgttaggagatctgcagtgatccactacaatggccagtgcaagccatggctagacattgcttttaagaacctacaaccattttggacaaagcacgtaaattactccaatgactttattagaaactgccatattttggagccccagtatgataaagagtgacttctgggaaatggggtaggcgcattggagtatatcataccggttgtgattcatttgttcactggagaggctgattgctgttggatggtgggaagattggtcaattcgttaacaaccagaacacaatcagcactgaacatacctgactatgccctggatcgactggcatgcaaatactcgagacttttcatctgtatcatatatggctacacgattcttttcatctgtatcatattggcgcatcattcttttcgacactatgaactgcgaaggatagcttggtgaagtctccctctgtgggattgggctaaatccttgaccgcagaataatgcagcggagggtagcacagattgatcgatcgatcgattaattgatcatggcgaagtaagagaaggcagccactatgaggtcgcgagagtttatatgttttccccctcattttattctttttttccttcttgatatactcgagtccttgaaattttgttctgttagttttgtggttgctttggtaggttggagatgattgtagtagagatgccattgtttgtgagtaacctacaggacattgttacacttgttgacatattgaaaatgtgcagataattctttcaagattatttgtgttgattttcccgattacggaactgaggcactacgaatcattgcccagattttagctcgattcgaacgtcacgtttttttgttcacaaacgcagacgcttatgtacatgtgatgtgcacgcatctctattgacttgtaacatgacacgttattagcctagacagcactgagagtgctgctgctgataattttcggacaaatgtttacgtattcaaagggaaaaaagggctaaacaaaactgagcgaaagttgttcgtcctgcagggtccaaattttaatctccgaccccattgactagttaaaatgaccgaccctttggattcgcgattaaaattcagttccctccttaatcctcgttgattaatctctaaccccaatccaaaacaaaaaataattccaactttagggggttcaaaataaatccagccctgagggtttgttaaaatgacctatctttcgaatcgcgattaaaatgacctaacaatctgacaatctctaacccctcctcgtctcgtttgaaaaataaataaataaataatccggtctgtgttcggagtttcaacctgcgtcccccttgaacgcactaaaaaaaatgggcctgctagcccagcccaatatgatttcggcgtcacggaagcactactagaactagcagattttagtcccacctcgactgccaagcgagaagcgatgacctgggaggtgtacaaataggtggccttggcagtcggtgcagagcatggagctgcgtggtgaacacaaagcgaactattctttcgccttttactaaagaataccgtgtgcgcgccacattaagcagcatacctttatttttggagggtgcttttcctatcaggaaaggccccaacaattccaaacttcaaaaattttgctcacaattcaattgttatttactcaaaatctgtttacattcttgtaatttactcacaatatgtttaaattcttgtaatcgttctatgcattctaaggtaaattcttgtgatccttcttgtattcgaagggttttggtacattcttttacattctaaaggctttgttattcaaaccagaaaacgaacaaatggaacactccattcttttacattctaaaggcttacattccaagggttttgctatttaaaccagaaaagaacaaatggaacattctaagggcgtaatactcaacaagaaggcaagattgatcactcaagaacaggccttggcctcaaacattggaagaactacaaaggcgatcgatgtcggtgccaggtacaccggcgagttgacagcaacgagcgcagggctcatggccggaacgccgccgtcgtccgagagttccagcggtgcgccgttgagcagcatcgtcttgctctggaggtcgccgtccttggccgtcaggtggtactcctccctcctcgcgacgtcgcttgacggcttgcgccccagccatgaaaccgctcttctgaggctgtgtgagaaagaattgtgcttatgaaggctggctgttttgtcaaggctgacattgatgtcattctggagggtgacgttgtatccggtggtattgctcaggttgatcaacaggagggtgattccttgctgcatgttgaaaataagatttgtttcagattcttacatggaagagtggctaatctagacatttacctcacttgaatttaacatgatgtttacatggaaatacggcaattttcggtcatagcaaaacagtcagcggtaacgggaatgccataatttgcgaagtcaagaaaagaaaaaaaaaagtgtgcaatttgtacctgctgtttcctgcaatgagcataagcacgcagtttacgcggcgcattgatatcaactgaaagaacttccctgcccataagccgatgccatagtagagcactggggacaaaagaaggtttaaacagtgaaaactttgtaccgtaaaatgctgcagtaaagtctaaagatgtagccttacctatagtaatcaggatttggcaaaaaagtttgggtgtcaagtagaccatagtggccaccaatcagagtctgcctgcagaatatttttgtattgtacttagatgccattccaagctgatcaagatacctgtttgcattgaaaaaccatcacaaattcttgctgccacaagatgctagagtgtagctgtgaatttattttggtgtctgaccgcatgtaattgtgaaagttcatgagaaaatattgagagctgaccagatgctattgatgaaagtgtttgacacaagttcaccgccattgttgaatacacctccgctttcgctgacccaggcagaagcccatgttccatgcctttgaagggtgagttgcatatccctataagtatcttctgaacgatctaaatactttggatctaatatcttccttataaggtgggcatcattccctgaaaacatggcgtcgccattgatgaattttgcttattaattacaaaaagtggactaataatgataaaataacctggatttccagtgaatcacgcttatatatttctgatcaaattaaaaggactcaaatccaacacaaaagatgttcttaacatgagtaagaaaagaataaaagcctgcaagaaactcatgatttggcatttcagaaagaccataacacaactcatcgcttaacaggacagaacccttttttttgggaaagttagagagaattagtatgattgaaaaatgtgaaacaagtaaaagtcctgcctacaacattcttgatcattccctcaaaacgtcaagctacagaatcgaagcacagaaacgatttttcagatgccactagagcaaaagtagcatatcacatacctccaccaagattataaatatgatgcgtcaaagcactgacaacgccatgaccagaagtctgaagtagctgagtgtaccactgctgatcaaagaatcctccaggggctaacagggatggctgggagagtggtgccttgtacaactgttgaaagatggatttaagttcaattgcatcttttccatacagtgtagcatcgactcttgccccaattccatgcccgctcagttcattacctgacaaaacaacaaatggcactattgaggctcacattcgctcagcttacttcatgttccagaactccgaataaatggtatgcaatattaaatgaccaagtataaaaaaaaataatacaacagattaccatattcccatgagtcaactggatatccctttgagattgtgtattttacaaaattatatgcatttgtagagttccatttgctagcccagaaagaacgacggacattgtacctcccatagagcgcattcagaccaaatgtgataattgcactggagataaatgtttttaacacccattagctagctctgataaacaagtatgagttgcatgattgatgcaaaagaagattttggaacttcatgaagaaaatgaaaaaaaaaatatgcataattttttagggagagttttttatgcataatagtcatgtagttaaatactcaccctgttttttggaatagagcattcagtttgtcccacctatccatgcttagacaaccatctgagaaaccaaataaaccatttgacatgtttgtgaacggggcgcatggactgtttgtacccacatcataaacaactcggtcttgcaaagagcctcccagtctaatcctcaaattatcaaatgctgcagagagaacagagaaagagagaccgtgagacatttagggaatcaattgacttatcattgcaattgaataagcatcctgcaaataaacataattgtatccaccgatatggtgcagccgcagatagtatcatgtcagattttgagtagtatttttttctgctgagaattgatacaacacagatagtaggaaataagatttaagagcttctttggaatatcatctcaaaagagagtatacaaaatctttgcaatggaaaatttatagggatccgactaaaagtagaaattgcattcttgcaaactacaaactaaagtagacgtgcttcctaggctgcaacaatgtttgaatataaaaggacttattgcattagagatgtgtgtttgcaattcctttttgtctttaccgcatcactcacctatatacgaaagttctcctctgataatccagacaaacccagcagaaatgattaatatggaagcagtaatcacctaatgaaatccaacaacataccttgaatggcttgagccaggaagggatgatccaaatcctacatgaaccagttggtggaacaccaaatgagaagtaagcccatgaaccaatgcacaataacagcatataaaagtagtactactccaagggaagagcataacaataccaagtttagaattgacgattggccccatggacactgattatagttacacttctctggtggccaccaatcgattgtagcacatatataatttttattcgtttcagcgatttttgtcgatcccttaactatgaccgtcgcctcctctggctgctgagccgaagccgcccaaagaagagcatgcagacatatgaacactagaagcagcagcctcacctccatgcctgccacctataacaaatcacgatcaaaatttgttctatgcactacaagagtatccattttctggaatattatgaatttcttatataaacttttgcggggattggaagattatgagctgatatgataactgaaaagtatgcataattagccactcagtgactgatgcgaaaatttctaaatttcaccagaactatctgaattcaacaagaagacatgacatactaagcaacggtaactgaattaaccgatcagatatagcaagaataaatacttgtctgtgcccaagaaagatttttttcttttttttttctcacttaacacaaaacatgccatttctaacctggaaaaagacgcggagaccccacacttgcaagctcacatctgcaagacaaagatgccgatttctaagccggcgaagcaagcggagatcccacctgacctggcctggacacctcccctcctccgccgccaatctccgtccctcccggcggcgcgctggctgcgaggagatccggcagttggccgccggcggattcggagctcacgggggggcccaatcaggccgccatttcttggctctcagggtgggtggtactggtagctcggtagctacaaccggaagaagctgcctttcggggatacaggtgatgatgatgctgccggtagagctgcagggcacggcgagctgagctgcttcttggagcaacgtggcaggacaagggaataaacagtaggtatatcttgaggtgcgtgccttctccttctcctactactagtactacttctctgtgctgcagcagagtttgcttgtgtcggtgaattgtgtccgattcaggagatgctgtgtgtgtgagatcagtgactgtcactgtgagaaaacaaatttcagaagaaagttgaataaaataaatccagtaatggaggtcagtgaaccagcttgttgaaacagaggactcttagatctgacttcggtaggagttaatactccctaagtaccataatataatagattttgattttttttattgtattgtatgaccatttgtcttattcaaaaaatttatgtaaatataaaaaacgaaaagttatgtttgaaatactttggataataaagtaagtcacaaataaaataaataataattctaaatttttttaaataagacgaatggtcaaacagtacaaacaaaaagttaaaatcccttatattatgagacggagagagcagtaaactccggtatagggcctgtttgaatccggagggctattaaatagccatccgaaatcttgttatttagaagtattaaacgtatattactgacaaaacccattccataacccctacgtctcgtaaaatagtctaagggttatggaatgggtttttattagtaatctatatttaatacttctaaatagtaaaattttggagagatatttaatagcctgaagatccaaacaggcccatagttgtggtgataagagcagcccgatagtgacagtgcgcccaccgcgaagctttgctcgtgtcatgtgtcaaagcttattctttttttaaacacctccacgtaaccacctacgcctacccgtagcaaccgcaagaaattctgttcaccaatattaagggcatgtttggagacttctaagattagagcaagactaataatatagccagctgctgactgtatagatctttatagcatatctctcagctcacttatataatggttagctcttttctgtaaacatatgttccacctgtctgtctcacaaattttcttgattcctatgcctaagccggttataaacttacagtccgcttctcatctctctcctctcctttctcatccacctcagcattcagccttcttataacccactattattcttgctcttatgagaaacaactactcactccgtccaaaaaaaagacaaaccctagctatgagggagtagttggtagccagcttctaagaatctgtaaaaactgggttttccagcttctgacttctagtttattttctgtattccacaactataactttttaaaatttggataaaaactagactgtttaggagaacttctgattctgagagaagctgcagcagctagaagcttctctaatcaggccttaagtctcctgttgttgcatatacgagcagcgatacggatgcaacagcgaggatttgttgaaggaaagcactagaccaaccaaacggccaggggggagacgcggcctcgtaaagcttactgaagagactaacccgtgctattacgtgctaaaccaccacaaaggcacaacgcggccgcaaggcatgcgactgcgccaccgcatttttgcatgggatcccggccggaacatcgcgtcgcgcgtcgataggcacaggctgcgttcggcacggaaaacggagccataattagcaagtaattaattaagtatttactaattttttttaataaaaatagattaatataatttttttaagccactttcgtatagaaactttttgtaaaaaatacactgtgtagcagtttgaaaaacgtgcatatggaaaatgagaagtcaggaacatttcacggaacacagccacagttggtcacggcacaaaactttggtggtgtttgagaggggagggacttattttagtccttctcacaatataagtcccttctctgtgacttatacttttgtgagacctaaacaccaccttactcactcatatgcggatgcgcctccctatcccgggcaaaagctagattcaccgtgtcatctactccctccgtctcaaaaaaaaaaaagaagcaaaccctagatttccgtgtctaactttgactgtccgttttatatgaaatttttttataattcgtatttttattgttgttaaatgataaaacatgattaatattttatgcgtgacttgtctttttaattttttttcatattttttttaaataagacggacagtcaaacgttggacacggaaatcagggtttgtctttttttaagacggagggagtacatacatccacagatctacccgttgtttgtacgaggaacttgtgtgccaaccaacccaactattcgtcttcgtcgtcgtcttaattaacgtaagcctccaagtccagtctgtaagcatggcgagaagggcggattcaccttttaccgacgttttatcagcattgtcgcgcgcataaaatagaatcggacacaagggttaaggggttggagttttaatctcgtttgggaaaagaaatccgttgaggaacaattttcccagtaaacataggcggacacagtcaaaagaagaaaacatggagcaatgtcaccatatcgtatcacataatcaccacgacaacgtacgctggatggtcatcgccggatcatttacacttctttttttttttacaaaggaacatgtgtaacctaactgttcgtcttcaacataagcccagggtttacattaccatcagcaaccgcggttaccagtcttaccgcggggtacggtaatagaaaaaccacgataaccttcttaaattcaaataaatttagaaaataatttgaatttttgataaattttgcacggtttggtatggtttttcacagttaccgcagtaaccacgcttaccgccggggcgcggtaaccccggccctggcggtttgggaaaccctgcataagcctccactttgtttgctttagcatggcaacagctaaaatgagaactgcttgattcagaatagtgacagcaggttacatatagtggtgtgatgcttcgtttggatctgtacagctactgactgaactacaaactagtgttttctcagggacattattctgctagtagtcagtggctaaattctgcagcatgaacgacctggtcttgccatctggtttcaacccaatgctccgcattttcgtgtatactttcctcgctaatctgatcttgcctcgcagacaaagcccgtgaattaccgtgttgtagaccgaggagtctggagcgacctcctgcaaggttcaaagttcatataaggtgaaacgaatgaaatatgcgattcggtccatttggaagtatcaaaattgcacagagtaatatgtcatgaaagttgaacatcatgtatttaaatgctaccgtgggctaactaggtacgattttacaaacaccaaaaaataggaactgcagaaatttaggcatgctttatccttaatgttagcatgatgaatgggtgaggaaacaagaagctatatgtatactgtatgttttagcatacgtgttattctgaatcatggtaacagaaacattggaaaccggaaaacgtcaaacagacgtagaaaacattagttacggttcgctgggctttcaggacaaaggcagaatcataggaatcacttgccttaaccaatcaaaatattttttcatattggcagcaaaaatataagagcttgtttagtgttttcattttctttgtttctctgcgtggaataatggtactgcaatctacaacatgcttacacctaggaacaggaatttttgccctaaccaagcaggggtcagagtgccactaattctgttaatcatgctttaggtaccagcatggtagactaacgcatgctaagcaatgagaaatcccggggtcagagtgccactaattctgttaatcatgctttaggtaccagcatggtagactaacgcatgctaagcaatgagaaatcccattttttttggccatctgaacagaagtataaagcaaagaaaggaagtagtacctccaatatatcctcaacttcattccaaagagatccccatatgcaagctcttataacagataaatgtgtgaacgtgtctggtgaacaccctcgatgagtcatacgccggtacactttcagagcaacttttggcatcctagcaacttcacaagcacctatcacatgattgtatgaaaccgccgatatttgaagtccacctctttccatcatccataacaattgcaagccatgttcccattgaccaagtctttcacaagacatcaaagctatgttgtacagatggttatttaagagtgctgaatgcttggtcttaattccttgaaaaagatctaggacatcccaacaacgaccagacctatataacgctgacagtaaagcactccatgtatattgatcaggcttaaggcctgaagatgttagcagatgatacatcctaaaggcaagttcatcttcaccggccttaccaagtgagttgattatggaattgaacacaatgatactaggtttcattccagcactcaacattctcctgaatgtggtaagcgcaaactcccatttcccttcttttgtacatgatgcaatgatggccttcagtatatcttcacttggatcaataccacttttgaacatttcctgataagcatcaactgctaactcagactgcccacactggacaaatgtgctaactaacaaatcataagtcatcaaggttccactcaaagaattctcccctagccttctccaaagtctctccacctgcctccagtcttttgctcttccgcacacagatatcaccgtgttgtaaacgatcacatcgacattcttcttatcgctctcttcaatttcatcaaacattttcagggctgcaaagtagccctcagtagtggcaacagccttgagtatcaaggtgtacgaatgcccggttgccattcctttccccttcatgaactcgaataccttcatcgcatcggcgaaagaaccccttcgcacaaaacaagccagaagggagttacaggcatgcgcgctcggctgcaagcctgaggcacgcattgaatcgaacagctcggtggcactcctgaccttgttggactggctgagcttgatcaacctcctggacagcatctcctcatccctctcctccaagaagtgcagcctcgatcccccgacctcagatttgctccccgcggctgacgccgacgccgacgccgcgcttcttgctgcggcgacggggccttcctccacagcagccggcctcaccgggcgccgccgcagcccgtgcctccggtgaccatcagcgaccggcggctcatcgtccatgccccaaaccgccacaccgacctcctccttgccggcgacgtcgggttcaagaacgcatggagccgccgccctgcacacgcgcacgcgccctctggcgaagacaaccacggtccttgcagcttccgcatggcgggtggtggcgtctctgcccgctcctccgctccatggatggattcttgccccatcaccgccccttcttccacgcgggtgtgggggaagttcttggctgaagctcgtgctgcagccgctccacactgcagccatatatgcccgccccgcaaatgcaaacgaaacctgcaaaaatctctcaacaagacaaagggattctggaaatcacgctggaagagggattcggctggctcatgaggggaaaatcggcaggaaatctggtgagaaatttggtccctcgctagaacggataggagggtggagaagaggaagagggagaagagaagaggagaagagagagcagcaatggtgggagcagagcagcggatgaggggattagaagatggagggctcgttaaatgggccgaagtttcctttcatttaagatgggcctaattcttcgtcctgacggcccgtgagatcaagctcttgattattttcttggcccactaatgctttcttatttattttagaaaaatgttctttttaactttttttagtaaattttataaaaccataccaatatggtctaagttacacaaaaccatagtgattttagcacatggaagtattatggtcctgaagtttcacaaaagcacaccattgaccaattttacatattcctatattcaaaatttaaaaagctttacttacatgcacgtgatatttatatgatggataaaaaattcatacatttgagatattattatacaactttaaaatgtggttgatcaaagtcaaaatgtttaatagtgtggtttttgaaactttatagccacaatatttggggttaagtgccatgccaaaatcatgtggttttgtgcaacttgtaccaaaatatttagggttattttttatttatgattcttattgtcgtttactgttcagtcttgtcactagatttttactagtgcggaaaagatgaacaaaaatgcacacacgagaactgatgcttagtggactggcatgtctaatctttcaacctgatagctcctttgcaagaacaaaatattggaaatcagtatcccttctttggacaggatgcagtttaacctttttcctttctagcaacctaggcactcagaataaagtagagtaaaaatctagcatccaactagaatcacagaacagattctgcacttgtgagaaaaagcacattctgtttactttgctcctccaatagggcactgaaaactgaattttgcaagaaacaggtttgaacactgaattgacatctgtaactgattactagctacgtgcagagaacaagaatatttcatattaagagaatgttagacaaaaatgatgctgaattgcactaaggaaaatattccctgaatgtttttttttcaaaatttattaggcaaatagctagctatcttcagacttaagccaagggcaagaagagcaagagaaaagcacagggagaaagaatagcacatgctaagcccaaagaacagaacaaccaaaaggggggtttgattcttgaagatttccatgggttaaagcaatcccatatccattcctcttgcctttctacaatacaaaaaatggcttccttgttctctgcctctcttcaccacctatgaatacaagcaaagcaatatttaaaacgcaggacttcgcttagttctgaagattgttcttccttggagctattcgttctctacaaatacgttgggcgccatggacggcgacttgaagaagctaaggtatgcaaccgcatgaaacatcttgaggtgaatttggtgaaagctttggattttactttgtttcgtcggcaaaagggtaaacttttcaatggcttaattagtttcgtgtcatctcaagactgtagctcatacgagctactagctcataactgtagtttttgtgcccttttgccccttgtgttttgtcgagaacttcaaatttctgcaagaaaatgtgttgtcatctttcctcccttatttacttgttcagttcttctcaagagcagccatgttttatttaagttcctcaatatatagctggatttcacattggcgcccagtgattagtgcagggtagtagcatcagcatcaaattaaaatttcagaacatcgctcttgcgcagggttcgatttcctggattaggaaagggaaacaaaggtggcagacaggctccaacaatactgcaagaagaagacacatctcttcaaagaggtaggtgatcaagatttcatctttcagttttaacgatgacataatcttttatttactgttgatcgctaccagcagtttgccattaaatttctgtcctatagcactatgaacaaatcggttaatcagcattctgcattgtaaaaaagtaatttctgctatcagatgttcagatgtttgaattaaaaagcagatgttgaaaatagataattgtcaaagatatatatatccggtttagtttgtcaaagatgtacttttctagttgagccatttattctgttgaaagaaagaaataaatcaggatagaacacacaaagcaaaatataagaagaaggaaacggaaaacttaataactggcagtgaaacttggcagcaccgatgaatagcagcgatggatatgatgctgcatttgcggccacaattgctgcagcagcatatgcaattgcttcgcaagaagagaagctagcagctcagaagaagcctgtccccattcaggggcaatctactactcctcctgtccagtctccagtaaagagaggtgaaagcatgaaaaaacccacaggaggcagcaagatctcaagatggtttagtggcaaagagcctgctgaagacaatgacgatggaccaggtattctgtaaatatgtaactccatctttattcaattttactgtagcaaaacctgcaaacttcttataacggtgctgaaatgcatttcagccaatgtatctgtaaggaggccacttaaaccagcacaaagaaagcaagaggacatagcttcagatcagaaggtgccacccaagatggttgattcttctctgagcgcgaagaaaggttcgggttcctctagcaaattgcaagacaagaaagggagcaagaagtttgagcaagagcaggtgattcagaagaccccatccaccacaaggccagcaacatcgtatcattctagacggaatggagatggtactgttggattaactgctgttggcccagcagacaccaaaactaatgaatgggagaaggcgaagctcgctagcattacggaagagtaagtacaattgttttgaactatatgcatgactgtttgatgaaagcagaattaactcgctgtcaaaattttaggtataagaacatgatggataccatagctgaatgggagaatgagaagaaggtgaaggctaagcgccaaaaagagcaaaaagaggtttttgtttattattcgtaatttaatagcatattacattgcttgttcaatataccctctttatcttttcctggatataaactctttatgttttgaaatgtcgtgatttatgtagcatgtcaaaaaaatgtttagattgacgatactgaaaactgaacttgctaatttgcagaaagtgttggaccaaaagagagcaaaggcactagaagaatacagccaggaaataacaaggatcaacaaaattgctggaggagcaaggacaatggcagaggaaaggaaatataacgatgagaaaaagatcaaagaaaaggcaaataaaagacggttatcggaaaaggctccccgcgcatgcgcttgcttttaagatatttccatatgatgcaatatttgaatggaatgataggcgattgcaagattgtaccctccaaacaacgatgtattgtgctttataatgtgtattggtttgatgagtgtatagaattttatccagcatgcaaaaagttggcatgctctactaaaaaaggtacagcttttgcataatcaccaagtgctttcaaaacgatgtgttgtgctttcaaaatgaagtagacactataagaaaagagtatatgttcagtacaataatacaaattcaggaacttatcggtgatgtgtctgttacatacaaatacacatcaggataacaaaaaaaaatacttggtaaaagttcttaaaaaaacacttggtgagccagttgtagttctcttctagaaatgaataacggaactgctagctgactgtcgacagttttcatgagtaaaaactttacccaaagtttcatatatgaagcaagttttcaagaaactgctcgagttttagcaaaagctgccttaataaaggggctcccctccggatcacagatatcatccccttcggaaaataaccctctttcagtttttttgcgggtctattgttttgtgatagaccctgtatatatatccgcactgtgaatttactccttctctattgataaaaaagagtttttttacagtccttgagggaaggcagtatcatatcctagccgttgatttcgcgtgatctaacggctggaaaacctcggtaccacgtggtaccgcgtttcctgtgagaggaggtaccgatcagtttttgaggtgggagggtatcatcgtaatttcgcgtcacttctctcgatcgacctaaccgcgagcgccgctccttcaagctcgtcgctgcgcggtggaggcggcgcgacggcgatatgcgacggcgggcgcggcgcgacggcggggcgcgacggcgagatgcgacggacggcgggatgcgacggcagatgcggcagtgagaaggcggcggcctcgatgcgatggcggccacggcgcgacggcgggcgacccaagccgagacgacgacgacgacgagcatgtgagattgatcgatgcggccacgatgcgacggtgggatgcgacggcggcgacgacgggatgcgagggggacggcggcaggaggacggacgcgcggcggctggataggggctggacggcggcgggcggacggacgcgcggcggcggtggcggctggacgcgcggcgacgggggcggctggacgtgcgatggcggcgggcggctggatgcgcgactgcggcggccggctagttgcacgacggcggcagcggcctcgattggcgacgacgacagcgggctggatgggcgacggcggcggccggcgggatgcacggcgacagcgggctggatgggcgacggcggcggccggtgggatgcacgacggcggcggcgacgtcgattggcgacgtcgacggtgggctggatgggcgacgtcggcggccggcgggatgcacgacggcggcggcggcctcgattggcgtcgacggcgacaggctggatgcgacgacgcggcgggctcgacgaagagaggacacctgttagtccgatcatactcctgctaaatcaacggttagattagattggtagctcatggtacattccttatgggaaaaatgcaagagaaaaataaagagtaaagtggctcctgcccttggttgtgagagagagagagagaagtcaaccagaaagtgactacagaaatgcttgtaaacaagctccaagccatcacctctcttatagcatttgcaaatccaattacaagtaaagcacacttggttttataacttctcatttgatttacaatgaaataaacctgacatcactatttacaagtacattgactacttattatactctaaacctgttgagaaaatattacttgttaaagaaatttaatgtacaagctacacaacatcctctgcattaatccagatcagaaaaaaaaataaaaaagaagaagaagaaagctgaaaacatgaccgccaagttggcaatgttaaaaaggcacacatgatctatgcagcttgctcagatgcatttccctcgtcatcatgaaataaatgtggtgaattgccagcatgtggtgtagacgcgggtttgccgtcctggagcaagatcactgtttcaaaagcaccaactaaagcctttaccttgcttttccgggactcgacaagtttacttgcagtttcttctataacattattaaacagcccctgtgcatctttcttctcttgtgtatcttggtgtcgcagtttcacaccaggagattccacatctaggttagaaggtccagcatctattgtgctattcatcttatatattcttctagctgacaggccttcactgcttgaaaattcacttgcacttcttcttctaaatttgagttttcttgggccattactgtctggttggagttcaacaattttacctctcttaaatttcaatttgtaaggtgtggcactatcatcatcctgttcaagcgctgagattctttttggtcgttgtccatcagcctttaaatgatcatagctgtttttattgatcgttggtccttcatcttctgtaccagattcatctaattcacttaactcaaaatcatactcttcgtaaaattcatcctctgatagttcttcaggtgactgttgaaggaaaaaccctggtttcagttcatcctgttcaaaggtgttgccagtactagaaatcactaacccatctgtttgtagagtagaatcacttggttgaatttgcacagactttggctcccccagaagttcaccatctgatgaagtttctgaaattggttggcagtgtgaaggactgttattagtccaaccctcaaatatttcatcagccttgacatcttccactgtatttcctgaggtggaaccaagaaaagatccaggctccttagcatgtttttcaccgagtgccaactgttctatagattcttgaaggccttcatgggcttcctcttcttcattaccttcagcgtcttgagactccatgctagcgttggctttcactccatcagcttcaatttctgaactattttcggttgatagagagtcgcccagaactgcattttccacagctatcgagtttttagatgattggcaaggagaagcatcgtctgtttggttttcttctgcctctaaattgctcagtgcattcttgagttgctgatcatccgatgattgcagcaagcctgttacaatggagctctgcaggggttcttcattccctcctgatgcttcattcttccgattgctttccatcccatcatcccctgacacaggcctaattatttcttctggtgctgatctagattcatcaacacattctgtggtatctgaagacactcctgccagtgtcgactccacatgaagacctcttatgaatgaatcttgcacatcatgttcttgtattacaacagaaacatccatcttcgattctacagagaatgatgatctggccatatgcaagccttccttcccattgatacttggcttgcttgaattcatcgaacttcttccagttttatcactgttacttcgacgcacaccagtaacagttgctggtgaagatgtaagctctccctttacagtacgtttagcttttgaagaaagtagatgactagaaacctgagatggcacgggcacttgcttaatcaagttaagcttagtaggcaatgaagtcggtctcttaattgatgattgcttgaccgttgtgaccttttccatagttctagattcctccagttgtggcatctctgccagcttcaacttggcaggcactatggttcccttaactggcattgctgattttttgtcaaatttaggaactccattggaagatcctgaatcagctgaagtcttctgtgcaactgttagatgcttctttcttccatcaaggttcacgtttttatgatcagctgatgaagaagtgcgtgtaatcaaatgatcagaggatcctttcaaatttgcttgtgttttcttgggagcaatgcggtcagattcacccagagatatactcgacttggctagagaaagatttctctgcctgacatcctttgatctatccaagatagctgatctgtgcaacgtcaaattatttaaatgactaggaagtttctttcttctgcctcctgaagttgaaagcttcttctcttcctcaaaaggatttttgtgtccatatttgcataaattatggc

SEQ ID NO: 27828 - DNA, 46672 bp, Oryza sativa
catgcagaaacatgttcttatcatcacagtcgcacatcgcaaaacagatttgtatcaaaaaccataggcaaaatgagatggtggcgctgatttagggggcaaaacaatttatctgtagcaaagatccagtacatttactgacatagctaagtgttagatggtttccatggctttgtacgctggctagtatgccactctagtatcccagtttcttgcaagttcctatcacctcacttcattgatgtggcttagtacacaaaagtatgaactaaatgaaaaacttttcagtgggttcatttttttatagaagtggcagtgtatttttgtagtatcaatccccatcatcaaaagcaatgaacaaattgtgaaagaagtgtttcaaagaacaatgtatttttcattagtgtgtgattgaatcatgtttagggagtttcattgtgtattctataaagaacaaaaagctacagggggatgtaggacagttcattggtaagttaaatgtgattgtacaggatgcctcaactatatattggtgaagaaaaaaattggacgtagccacacagattccatttctatggtatttctctccatggcaacagctgtgatcttggaataacaagtacgctataatagaatttccataaaaaaaaactataggacaactccactccaaatcaataggttggtattggttcattgagtaattgaatagtaaatacagaaaaaattcacatcacatctcagcagttcaaatcaaaattagtttttcttagttgcgtaattactactgtccacaaagttgaagtgcttgaaagcaagctgcaaaggtagaatcagaaacacaaactgagaaaaaacacacaaaatacatctgcatcatacctcctgaaagcaaatatcctccaactttatgcttctcaggcagcacttatcggagagtgtttagcagttttcaatataaagaattcgcctaaaatttgacaggaaagaggtcaaggagacatgaacaatttctggatgaatcatgaactactctggaacaaaaaagtagtttgaccaattgaccattcaactggagtatttgtcaaacagaaaagttttaaaagattaattgggcagagacaccttttgagatcccattcctctgggaaaaaaaaaaccaaactagctggtcattaacacaagcaaccttttactagccaagctgttctagatcacaccatacaccattattcgttccagctagaaagaccaaggattggatgagtaaaagcacaatatgccaatcaaaaccccccacggaaacaaaagaacacctagtgatgaagacattaaactaaaagatggcatcttttcatcggcatatgtttactcttgacactcaacacactactaatctgagcaaaggtactcactggaagcgaaatttagaatgccaataatgttctgaagattgccagtgcaatcgatggataacaagaataacttaataaaatggtaatgatcaggtcgataaaccgtacaagtcaacaatttgacatgagaaatacacctttttcgcatcaaaattctgtcctcgtttttctttaaaaaaaagaaagaaaaaagaaaacgcatcgaccaaattgatccccggccgcggccagatttccctgaacacaatcaatccccaatagcccaaaaaccacatcgcgggatccagacgaaaaccctcgtagcatccaaatcccaaacaactaacgcgaaccaaaatcaaccaaagcaaaacaaacttgcaccaaaatcctcccgccaagatcgtacctctcggaacaacggattggcggcggcggcggacgagccggaggaggatgaggaggaggagatggtgacgacgcagctgggctgggttggcttggctggtacgcgggttgccctgcctctgccaccctttttctctcctctctcgaggagggaaagaaagggaagtcgtgcgcgccgcaactagagaaagaaatcgagaaatacgcgcagacgaaaccgacgggagcggcgcggccgttagcgtccgctgcagtgtttcgccgtcatatgttgcgcgccatcccgtgacgccgtttgtgcttctcttctctgccgctttctcggagaccacggtagaatggttagttttgccctacttttttgagggttgctaccccatgggataccgtggaaatagtacactcacgggataattaaaaaaacaacgacagcataaaggaacaccccacagaacacgtgatttgtctcgatacctagccattgtttgctcggtatcgtcgccggagcagtggctaccttacctcgccggcgtcatcgccgaagtagcagctacctcaccgcccaaaaattctcctcggtatcgcgcgctcgggtgatacctcgccggcatcgtcgcccctgagcacccagagtagcagctacctcacacgcgatacctcgccggcgtcgtcacccctgagcacccagagtagcagctacctcaccgccaaatcctcctggtaccttgggtaaggtaccgaggtggtacctggtacactggtatcggctggcacctggtaccctgggtatcgagctggtacctaggtatcagcgtgataccccaagagagaggaggaggaggaggaggaggaggaggaggagaggaggaggaggaggaggagtcgcggggtcgggaggtcctggtaccctggtatcgactgatacctggtaccctgggtatcgagctggtatctaggtatcagaccttggtacctgggtatcagcgtgataccctaagagagaggaggaggagaaggagtcgtggggccgaggaggtcgagcagcgaggcggcacggcggcggaggaagaggaggcgacagatctggtgcctagtaccatgcctccccagcctcctcagccggctgtggacgacgacgtgctcggcgcacccctgctgccggccatggaggtcttcatcaccgacgctgtagtagatctgcttgctgccggccatggaggatgtcgccgcaaccgcaccccgttccggctccaccgcaccccgctcccgctctccctctcgctcgccgccgagctcctcgccgtcgcggcctccctcacggcggcggccgctggctccggtgagcagtgggcgacggcgatggggagggctgcagtgtcgtgtgatttgggagaggagagtaaggtaggaggagaggattcgaatgattttggggagaggagtgaggtaggaggaggggatcccgtctccacggcaggatgccgtggtgtaggttttctgtacttttttttcttgtttcttttctttcgttttttttttcttttgcacggttcaaaaagctttgtgactgacttcgtgcaggtgtaaaaagatgccagggaatgccagttcaacggcgcgttcctaccagtgagagcaagtgatatactcccagcctatttaaccattcgtcttatttaaaaatttttgtgaaatatgtaaaattatatgtatacataaaagtatatttaacggcgaatcaaattatagggaaaattttaataattagttaagtttttttgaataagacgaacggtcaaacatatttaaaaaagtcaacagcgtcaaatatttagggacggagggagtatattccttcgaatgaacatagtggcggtgacaatgaatatgtcatgttgtcatctcacttttttttaacaaattttgcaaatagccttggtgaaattcttaatattaaaagcaatcaaatataaatggatagtcatatgactcgtatataaaattgaagtagggtgaatattccctatagtagaaagacaggtaatacagtatataaaaaatatgttttatttatattatattatattttcttttatacgtatcaaagcatgtgcatttagctagtcgcaacaaatgaaacaagcagcaacaaggtgaatggagtactgcgtaagtcttgtaaaaattacagtattgagagttgctcaattttttttctcatacattgcaaaattacaagctagtagagactcctacattggattaaacatactatctgggaccaaacaaggagaaaaatactgaaaaagataacgggacgacgggaaaaaaacagtgaggatgaaaagtttttttttttagaaacaggaggaaaggttgatgtgccgaaagcagcagccagtgaattaatcacaacaaaattgtgcgcacatggttagttggcttggattaaattagcatattaatactagtttgattacgattactcaatcaccaggacgcgaaatgattagtccggctccggcaaaagtaccacgtcaaagaatcaaagaaagaaagcataaacttacttaaagagcaagcaagaaagaaaaagaagggaagaacgggtctcgagaattagttcggttgatcaaccattcgatcgtggggtcctggagaccgatgcaattcctccccttttgttcctccgcttcatttattttttctttaattattagttggtgatgaatcattgctcttcagtaatactacgcgtctaaatgtctgacagcacaaaagaagacctgaaaaggccttaatccagaaacaaaaggcttgatcttgggtccctgagtcgctttgcgttggcatgcagattttgttgctgtgcagagaaagatctaatgatagatcatactatcatcatcagtctactcattcgcactctgccacaaatccaagcagcagaaagttcagtccagtaacttgcggactgctgagtggtactgaacactggttagctagaatactctgaatatgtggagtgtaacaatgtaaaataaatctgtaatttgtttcatcgatcagtaatttcagtactgatcgacgaaaagaaaaaggatgttgagacagatcgtgcacatatcaataggaggactggacggttggttggaccatgcatgccggttcaggttctggatggaagtatgaacagctaggcaattcaatgatccagccatggcagcaagctgcaagcagatagacccttctggtctctctgacaatgaacaggcccctctctgacaacgaacaggcccatcgatcgatcgaatgatcgatcagtggtcgatcgatcggccacgcggcagtgtgcatcaaattctcgctttttctgggacaatgcaggccacgatgattgaaagcatgcaggtaagggaagtaggagaagctgactactcccttccttaaaaaaaaaaaacccaacctaaacaatgatgggacgctacatagtacaatgaatctggatatactcatgttcagattcgttatactatgtagtgtctaatcgttgtctaggttaagtttttttttttggaacggagagagtagctgtgacgttgctccagtgtggttgttgggtgatgggttattgattgatgcttgtgattcatggcaatcatcggtgcaaacaatgcgaccaaaccccgtagtagatggggtaggggattgatataagatcgttggatttctagagatcgggatcgaagttttagtgctttctttcctccatgagacgctgaagctggcgagatatgcttaatacctggttgtggagcttctgtctgccgtggtttctcctaaaatcttcagttgctataaactcttgtacatatttttttcacgtaaattttaagaatttgtagttgtaaaattataaaaatgaattagggttttctaagttctccatattctcacttaggctgtgtttggaactccaagttcccaacccctctccctcgttttccgcgcgcacgcttttcaaactgctaaacggtgtattttttgtaaaaagtttctatacaaaagttgcttaaaaaattcaaattaatccattttttaaaaagaaattagccgattcttaattaatcacgcgctaatggaccgttccgttttccgtgcggggagattgggttcccatcccgctatccgaacacagccttagtattcttctgcagcggccgacggcgtgaggcagtccaacttatacggaccgcatggaggccgctgtccagatccggcccagttctggtgggctgtacggagcccgcagtgaatttccatttcgacctaactgaaatggtgagatctgctcggtttaggccggagaattgaaggccagagctggcttccagttgggtggtgaacccagacggctgcattatcgtctgaagagaaccacacgtaggctgtacgtagtgctgtattccaaaaattttcgtttttttaaacgtgtgctagtgaacacattcgccggtatatgaatgccgtgtacgtgtgcggtggtgcgtatgcatctttggtgagaagaaaataataggttgtggttggattaagtttaaatttcaaattgaatgtttggatttgaaacatatcaaaagtttttttttcagtgttagacaactcacaacagaaaacacatgaaagcattcggtagtcggcggctggttgatgcgcgagtccaattcggaaacaaacctttgatcacacctctctagttctacttcgaaattcgaatccgattcaattcaggagacatgccgatctatctactcctgttctttcggagcgacgtcctcaccacgataaatttggccggaatttatcagcgttaggcacggacacagcagtggagtgcgcgaacgccggccgccggttcaatgtcgaagcggcacagatccgatgacgacggcggcgagctcgagtccaggcggccacactcgcgccaccgccgccgccggcgacggcggcatctctacgtcgtgctggacgactggtccaaggggtacagcgtctacaaggtggacgtcgacgggttcgacggcgaccccgacgccgacctggacgacgaggccgtgcgcctccccgagccgccggtgttccggctggagaccgccgactacggccgtttcgggatcttcgtggcggtgggaagcagaatctttgccactcactacagcgaggacacgaacgcgcgcgctcccgtgctcatgttcgacacggtgaccggtggcctcgccgtctgccccggcgtcccggccgagctgtgtaaccagcccatgatcttccccgccggcgacaaggtgtacgccatgggcaggagcaagatcaagatggacgctaggggagagtcgcggaagtacttggaggagctcgcggccgacggcgagggcagctgggcctggagcagcagcgtcgacgaccgcgcgccgccgccgccgttcgacgtcgagcgggcccgatgccacgcggcgcacccggacggccgcaccgtcttcttctccgcccacggcgatggcacctactcgttcgacgccgggacgcgcgggtggacgcgccacggcgagtggatgctgccgttcgacgggcaggcctactacgacggcgagctggacgcgtgggtggggctctggagcggccactcgggccgccgcgggcgcgtctgctcctgcgacgtggtggatccccgcggcggcggcggcggcgagcagccaccgccggcgtggaagctcgccgtgaggagccacccggcgtggcgcgccaggtcgaggttcttgagcgtggcgctggcgcgcatgggcggcggcgagttctgcgtggtggagtggaggtcgcggaggggcgtgagcgaggaggagctccacgagcggtgcctgctgtacgcgaccacgttccggctccggtacgacagggacgggtcgctggaggccacggatcgccgcgcgcgcgccttcaccgcgcgcaagaaatcggacgagttcgaatggtgcgcgtttgggatctgatcgtctatctgaacatcgagcgcgcgcggtgtctgacttgaaatttgcgttgaagatcgtgtttgaatccaaagcacatttttaactctcatataattcattttagacttaatccagaccatggaacaactcaaaacaacgttacctaatgtagtataaaaccttacgtttgacttgttattagctctccgtcccaaaataagtttattaagtttatttttcatgcatcccatacatacaaatagaacacctacaatattataataccactttattaaatcctctttatctactctcaatactccctccgtcccaaaaaaaaagataaaccctaatttccgtgttcaacgtttgaccgtccgtcttatttgaaaaaattatgaaaaaaaataaaaaaaaaacaagtcacgcataaaatattaatcatattttatcatcgaacaacaatgaaaatacgaattataaaaaaaaattcatataagacggacagtcaaagttgaacacagaaacccagggtttgtctttttttgggatggagagagtacataccttactttcacaaacttattttgggaaaaatgggaaaagctaaaaatgaacatgttatgggctagagggagtatttactactccagtacaacattggcagctgataataatatacaacgtcatgatggtctataaagtatataaaccatatgcaccagaaagataataaaaacactagagcaaaaaatcagacattgagatgtcacagtagtgcttacttttgattttcgcaagagtagcataacatatatacatcgtaaaaaggtagggtcggaaagacagaattacagtaaaacctgagtgattcatgtatatcaatgcaataattagagttccatcttacaactactgtccctgaaggcctcaatcgaatggataagaaatcacacttgacatcctcccccagagcacatgagattgcaaatgctaaattttctgctgctgagttataaactgtaatgacatggagtacaatataactcaattgaagatctctctaacgagccaatccaaactgggataagcaaagtagaggatcaaaaaggacggcagtgcaaacaaaactgtaacaaggacatacaatactagaactgctacgcttgcagggacagcatatagaactatcagaaggaaaattatcacgagtggaaacttggctgtcatctgaacaaaagacaacattatcttttggagagatgcactgatgctgtaagtattgaaaacgttgccagcaacactcctttctctgccactggcgctttctgttcgtggagcaggtcttcgatggtgttgactggaacttgggccaccaccagaagggcataaagaatggcgctcttcatgactaggggaatggaactttgctctctcgccattcatgctctcaaccatccatagcagaaaatagttcttgcgtgggaacttgaggtttcccttgtaaactagccggaaagataacaggttacaccatggacatgagatgaagagaggcagttgtataggaagggttgggaacttgacgacagcccattgaagacccaagatgcaattcttgcacattgtatgaccgcaccacaagacatagggaacattctcaacaaggttgaaggattcccaacatattggacattcaaggccttcctctctacttgcacatgaagaaacatcatcatcagagcaatcaggattggattgactgcattttgagggctgtgcttttttccttatgcttccagctatggcgtttgacgcaaaactccacatgttgaatgagagagagctggtacactatatcttgtactcctgagatcctgctttacagaagacaaatcataacatatatgttgctccactaagtctagccactactcctatttatgttgataaaaagaaatccaagtgcaaaatgctctcataaagcaaaagaaatagcagtagataaagtagcatcatctaacttaacagatataaaagccccaaaaaaattctaaacatgttcggtagaagacgcatttccagtcaccaaatcatagaattatttcatattgtatagttttgtgggtagtccagtaatacagtttcatagtgcagtagtgattgcgaaaatggggaaacacagaatgatctgaaaaaaatgtaacaatatctaagcaaatacaaatgtactagcatgtaaggaaatgaagaagatgtcatggatatgttgttagaaaccatcaagtacagatcacatgggctttactgcacaagtgcacaataaattgaagaatcaaatagacaatgcaaaagttcatgcaggctcaaaattttaagctatgaaacgatacccaactgacagtcaacttggagacaaaaccgtttgccttctcctattacttgttcatcatcattttagtatccagagcctaattggtggagtctgagatcgataaatgcatgcctcctcaaacaaatttggttacagtttacagacagcttctagacgaatgggtttcacccagattaatgagcctaacccaatcccccagctaaatacacagcttaaacagtgtctagaactttagataccacaccacaacttcggagaatttcagcggacatgattaaaaatcataagctcttaacaggcctgcaggtgcattaggaaatggccctgatcaagatcccaacctatttgatcacaaaagttccatgggattacagcatatactgacaatactatctgctctattggtggccaccagaaccacatctgctgcctctgcttcaagtctgaaacattgagttgtcctgaactaatcaatgtccggtcatgtgtccctccctaaccagtgcacaacaacagcgcagccgctctcttgagccgcacccagtgacaagtgacaacaagatcacccgcaacatccaaattacaaaccgtatggaaattgtaagttagcgatggtcgaggatgttgtaaattatttccacagcagaaatatgaacatcaatatatccatagaaactcaaatcggcgatgtgtcctagactgtagactcctagttccatatccaagaaagacaccaactcttcaacctcaccaacaacgagcaagcgcctcacgcagactagcaacatgaaattcccgaccagcgtaagcccgcgggaaggaatcggacgcgaatcaggcagttccactcgaggattagggagtagcggcttaccgagaagagcccggatctctagcagcgcaagggcatacgggagcgccccgggagatcgcgtccggttgaaggggagacgctcatcccggcaacgtcctccgcgccgatgggtggggggaagggggctcgccggagtcgggggagcggcggcggaggagaggaaagggaagaagaggtcgtcgagaggaagaagaccacctggttctccttcgatttctcgtgtgtgaaccccccaacctgtggtaaaatctggaccgttcgctcgcctggacggctcggatggagccatctgcgtatctagaaggaattgatcatctcctctaatcaaattttaacaagacctttttattagtggcgcacttgatataatctagaaaaaaaatgatgctggtaaagctggagtgatgtgccatgtaagtgtttgttacaacaacacttcatccaacttgaaattgaactttgcatccacaaaatataaaacggacgttgcatcatatcatttccccttctcccttgacaaaaacgtcgggcaaaaataacgtaaggcttaacgacctgccgttgattttactcgacggctgattgcatcatcttgaggtaccgtggatgagagtagtatgggctatggaaatgcattggttcgccgacaaggatatgtactccctccgtcttaaaataaagcaacatcgtactggataagacacatcctagtataacgaatctgaacagtgatatattcaaatttgttgtactatgatatgtcatatctagtacaagattattatattttaggacgaagagagtatctaacgtatagtatacagagagatcgccgcaccgacagcgaggtgtaaaagatttgcgcgatagaatggcctcgtcttattcctggaacagagacgagagcaacagcaaacggtctgcttaattcccattgcccataaccataagatactcatatcgatcggagtcaccatgtgagattttgggcattcagcgattgcgatttgcagtatacgttttctgcctgaacaaggcaagaggattttgatctctcgaggagatattccatcgttctttacatgtcacttaaatagctattaaaaaattagaaaagatgtattaacatgtgatatatcacaccacaaacatgcaagtaaaaaattcaactcctacatctcgcaacgaaaaaaacaaatttgactccgaatatacattaactagttgcggtttaatttgttttttttcgttacgagatgtagaagttgaatttgaaattgcatgtttgtggagtgttatatcacatcttaatacacattctcattttttttaatttttcttataaccatttgagtgacatgaaaaaaacgaggtgatatcccctcgatggattaaaatagtttcccctcaacacggatgcaaacgcgtactaccaatgaagcaacccaattctgacttcctcgtttacacgcatcaacttaggccctgtttagtcccatgcaaaaatttttcactcagtcacattaaatgtaaataactaattacacagattgtgtgtaaattacgagacgaatcttttaagcctaattgctctatgatttgacaatgtggtggtacagtaaatatttgctaatgatggattaattaaataataaattcgtctcgtaatttatagacggaagttttgctatcaaactacattttaatactttaaatttatgtccgtatatccgatgtgacacgccaaagcttttcactgctgataacacaccccttaggcaaaagaaatgcccgttgcgatcacgatcgaagtatacaacacgtaagcatgatggtatcacgacgactacatgatctgcagcatggctcttcttcctaggattcaggtgttgttactgccgtcttccgacgatggcgagaacacgacggcgaggcagagaggcacgacggcgtaggcggccagcttgagcgcctcctcggtgtccttggagatggcgccgatgcgtgaccagtcgccgctgtacctgcagcaaagccgccccgaaacgggtgagaccgaccagatcgaccaccggtgcaaaacgcaatggaaatccgtcatcagcgcgcgcgcgcgtgcgtgcgactcacccggcgtcgacgaagccgagcgcgaagagagcggcgccggaccgcaggagggcgcccctggtgaccacgccgccgccgccggcggtggcgcctcgctcgtcggtcccggggcccttctttgcgccgcacgggcggaggcgacggcggcctgctccgcgcgagtgcggcggcggcggcgtggacggggacgggacggccttggcgacggcggcggcgggccacgccggcatgctgtgctgtgtgcgcggtggtagttgggtgtttgggtgtttgcttctcgtccacacgtgcgttagcagcagaacgtggagcgctgcacgctctcggggtgcgaggtacggacaaaacttggcactcccgccgatgcaaacggttcctctgctggtactatatatttactatagcaaaatgctactagctatgttacccggggatgcggatagggatacgtgatacgggatacaccattttctcaaaaacaaggatacgggaatacgcttatatatatatgtgtaaattaaaaatacagaaaatgaaatattttttaagggaacaacaataatgtagttttggtgcagcctatatgtcaatctaattcctctgaatctcacttctagatagttcaagttagcaaaacaattaatcttgccgactgacaataatacatggtaaaatcatacatgtatatagcagaaagaatagtgaactgatacatcatgcttatattatcaatttaagtgtaaactgcagtattgcacaagtagcatcaccaactcactaaccagaccataaaatgcagattaaacatcgaaggcctgaaaaggggatttactcacaagagaatgaagagaaaattgttcggtggctatgggttgatgctgctgcgcctgttggctggtggcagaggcgctgctgtagtgttggacacggagctgctgtggcctgtgtggacggccggcggccggcagacctagacccggagcccatgggcagcggaggtgctgccctcggctgcggcgcgcccggtcgaggcgaagctgatgcgcccggacgcggtgtaggaggcgcggcgtgatgcggatgggcgtggtgccgctcccacgtatcacggcgacggcggcggcatgggaagagtgggagcgtgtgaggcggccaagtagtagttggatggctgggttgggtgttcgacgtatcaacgacgtatccataattgttttatttatctgaaaatcgatgagtcgctggatacgtacgggatacgtatcggagcgtatccgatacgtattcgtatccgtcggcgtatcagatactgatacgcgacctgattgccgtataacgctactagtactattccgtgacaatgtatagcacgctttgcagccaaatattgttgacacagtccaagtttaatttcaaagtttttttttaaactttcagcttttccatcacatcacaactttcctaaacacacgaacttccaacttttccgtcacatcgttctaatttcaaccaaactttcaattttaacaactaaacacactcacaatagatcgagtttatgtagctcacatttattcaccgtattgttgaggttacccgtttcttgattatcactgagccgatcgctcatccttgcgttgaaaaaaactgggctgagggcatgttcgtttggacaaatcaaccattctccattagcacacttcccactaaacgatacgttttgtaaaaagaaaaatctatataaagattgtttaaaaaattaagcatatgtatttaaagtttgtaagtaattaatactcgattaattaatgcgttgaagaaccttttatttgttctgagccgttaatggctacagcactatagctaattcaaactcggcctaagtcgataagattggcctaatcctttccgacaacaagcttaaaccttggtggtgttgcaaaagaagtaagtcagtgtttggaattaatgcctaaataaaatcatgcatgagcttggattacagctagaaaaaataagcattttgccttctttttaattacatgatattgtctccttacaattattgctattatattattgcaaattaaaaacatatcaatatcaatatttaatttgtttttgtctttgtttgggttttgggtcaaaatttgaggaccaagtacaaccggtacaggctccgatagagcttcagatgaataggcttgtaaatggtaggatttgtattccttctcaaatatactctttagttgttttaaatatattattgagcatttatttctagggcctatctgcacgacacgtatccttgcaaaatcattcggattttcgaaccgcatggttagcatccaacggttccaagtcattcccactttagaataaaaacctatgaaccctaacttctaacctctccctcccactccctctcgagcatcgccgcttatattatcctaaagcatatcaatccgggccttctctccaaccatcattgctggctaggccagttgagctacctctgtcgatgctagtaatagtaagaagcatcacgtcacttgccatgttgtctcctacaactttcatgagaagctatcatgtcggtatcgtctctcgtatccagtagtccctttttagatcggctttgtagccttcctcatcatttcgttattccaagatgaaagtcccaatcaaaaggttcattgggaattggcgtagatgctaagaaggatggggtatggtgaggatcttcagttgaaaaaagaggttatagacctgaattattattttccaaacgaaatttagaacaaacgcgttgattgtttagtagatttcaattgtattgcatttatagatctattcttagtatactggcaagagttagtagtagatctaagggcacccgcaatggttatctataggctctctataagagatccatgtcagcttattttcctacttggaagatattaaatgaagagagagagagcaaagctatctactaacttagagatagtctatagagaaaaacgaggtaatgcatgagagagctatagatacccatgtagacatactattgaggtggtttactattaatctagtctattgctgagatatacatgttttatagagagcaccttactttatcattgcgggtgctctaagtacacaattttttaggtagcaaaagttgcaccaaagtttactaaaagtaatattggcttaaaaatgggtataacatttttcacctttcaaactatgtcctagcaacttgtctccatataaggtattatataattgtagggcaaacttatcggaaacacacaaatattgttgataggaaaaaactttattaagagtacacttataacgctttctcccattgcctctaggattagttaaagtgaactcctcataactaaactgactcttagtattttcgagttgaattgaaatttcaccatcagccacacctagaatgattgtggaaacatcccaagttgcatcaaccgtaaaccatggtatgaagaaaatccgcatgtagtaattttaaagtacatacccctctgtaaaaggatttaccactgcattaacgtacccaagctaaacaagctacgactaattcgttgtctatatattgtttagtacaatccaactgtattgtatttatagatctattctttatttataaattagcaagagttagtagtagatctaagtacacgggtttttgatagcaaaagccgcacaaagctgacaggaactattgcatatgcctcaactctaaaagtaatatcggcttaaaagggggtgccactatttttcacctttaaaaacatgtgctagcagtttatccataggaagtataccaacatcatggttggacaaacttatgggaaacactcaaatattgctaatagcaagaaattttactgagtgtacactttaacattctctcctctagcatcaaaagcattcatcgtaagaaacaagttattccactggtggagaaattgtctttactcccggtttataaacccccttagtcccggttttccaaccggaactacgaatctgggactaaagatcgctatctttagtcccgggtgaaataaccgggagtaaagatcaatctttagtcccggttggtaataccaacccggactaaagagagggatctttagtcccgtttggtgttaccaaccgggactaaagagaggatagggacagtcccggatggtcccctttttttgttactttttttattttctcccgaatcggatggcatgcacatcccaaatcaaaccccaaatccctaaatcaaagtaacatcctaaatccacatcacaaatctcaaagtcatttatacacaccaatataatacatcacaaatcctaaaaaatttacacacaaatcaaatacaacacagattatacatcttaaatcaatataatgaatcacaaaattatacatctcagtgaatcacaaaatatcaaaaaaaagagagagaaaacaagctgccggatgtgctactactcaagaaatcaatcacaaaatatcaatcccactactgccggctgccgctatcgttactattgcgcgcatgtgcttcccctgcaacgcacgtttgcgccgcacgccgcgcatccgtccgtccaccacgtccgcgcggcgcggcctcctccatctccaggtgagggaggaggaaagggaggggaaggaaggaggaagggaaggatctgtgtaagatccatctccaggtgagggaggaggaaggggaggggaaggaaggaggaaggagaggatctgtgtaagataggagaggggaggagggagagaagagaggaggatcgatctgtgggtgaggtagtggttgcgagtggaggagaggataaggactatggattatatactacgtgtttaatttattaccaaccaggactaaagatctaaatgatctttactcccggactaaacccggactaaagtggtaatctttagtcccggttggtagtatgaaccgggactaaagattctcggccccttgagatgcctctgacaggggatgaaccgggaccaaaaatcatctttaatcccggttggtgtgatcaaaatttttttaaccgggactaaaaatcgtatttagtcccggttttaaatggaaccgggactattgtcgaatttggtcgaccgaccaaagatggtttctccaccagtgttcatatctaaactgaggttttctttcctaaatgaattttctaattcaccgtcaaacacctagaatgaccatggaaacatcccaataaacggggctaagatttacctaatctgacccgaggacaagctcaagccttggtgtttgaaaataagtaggctggactttcaaaatcttttttttaacaaaaaaaatcaagcctgagctcagagtagagctttgttattttgtcttctttttaattacacaatattaccttattattgttattgctatcatattattctagatttaatatatatagatataaatatttaatttgattttgtgtttatttggattttgggtccaaatttgaggcccaggtacgaccattacagacttcggcagggctatatcaattagcttgttaacgatgggattattttattccttccaaaagatatttgtagtcatttgaatatattattgagcatttattgcttgggattatctacacaatatgtatccttacaaagcattgggattttgggacgtgtgattagcatccaaaggttccatgccatttacattaaaaccccaggaaccctaacccttccccttccccctccccctccccctcccccctcctcctctagcgccgccgttgatatcatcctaaagcataccatactagaccttctcttcggatgtggatgttggttaggtccgtcgggctaccttcattgatgctagtaatagtaagaagtgtcacatcacttgccttgtcttctacaacttttgtggaaagctatcatgccgtatttcttgtatctaatgatcttttttgagatccacttcattcccttctcataactacagcttctatgcttctatattgcccgtcacatctgtctcctagatctatcggcaccaaaattgtatcattatttcgttattccaagatcaaagccccaatcaaagggttcattgggatttgccaatgatgctaagaaggatggggtatggtgaggatcttcaatcgaaagcaccggttagatatctgaattactattctccagaacaaaattataacaaatatgttgatcgtttagtatattcctgttgtattgtgtttacagatatgttctttgtttatatatttgcatgagttagtagtagatctaagtacacggattttgggtagcagaacccacataaaatttacaagagctattacgtctttctcaattctaaaagtaatactggcttaaaaggaggcacacaatttttcagcttttaaaccatattcgataaacttgtgggaaacacataaatattgttgataacaagaaattttagtaagggtgcactttaacattttctcctcttacatcaaaagcaatcaacttcaaaagtgagctcctcatagctaaaccgaggtttagggtgtgttcgctattcctagttggtaacttggaacaatactcacagaaaacggagcggttcattagtgcatgattaattaagtattagctatttttttaaaaaaatagattaatttgattttttaagcaactttcttatagatttttttttgcaaaaaaacacaccgtttaacagtttaaaaagcatgcacataaaaaacgagggagagaggtttaaaaaagtgggtgccgaacacacccagtctttgcaagatgaaatgaaaatccgcatcaaaccacttagaatgaccgtagaaacatcccaaagtgtcatcaaccgtaaaccaaggtaggaagaaaattctcactaaagtagtagtattagtaaactacacacccctctcaaagaatttaccactgcgttagcataccgaaactaaccaagctacgaccaattcgagttgtatgcgatcgcaatttctgagaaaatccaaatgctccaaatcacacgcgctgcaaaagcccgcgaccgcatatctcggtggctggtcgagcacgcctgcatcgcatccccattcccccacaccgcggccgctccagcacgccacgtctgaagtgtttcagacgccgcggccaccgtgggatcgaggcatcgacctcctcctcttcgcactgcgctgcactctctctcgcggtcgcggtcccggtccaaaccaacccaaaccaaaaccgaaccaaacaccgacccgcaccgcaccgcaccgcccatttcgctttgcacacctcaaccctcccgtcccctcccctcctctcctctcctctcctccacgccgaccactccccatccccatctctctcccctcaccgccgccgccgccgccgccgccgcagagcaggacgcttcgggtggcgcgggggagggcaaggccgatccgaagctcatcggcgggaggttgcccccccacgcgatttccaccggttccgggggtgggggttcgatccgcgcggagccgacggcgggtgcgggggccgtgccgtgaggtccgccgccgccgccgttcccggggtgtagggtttttgggttcccggcccggcgagcgaagcattggttggcgtggccgcggcgggttgttttgtttttttgctatggggatggtgcccaacgggctcctgcccaatgcgtcggccggggtcacgaggcggctcgacggcgagcggtgggccgccgcggaggtgcggaccgcggagctgatcgcgcgcatccagcccaacgccgactccgagcggcggaggcgcgccgtctacgactacgtgcggcgcctcatcacgaactgcctctcgtgccaggtatagcgatggtgtttgactgctggattgattgttccgagaggtgttacggattattagattgaagggtttctctgcgtggcttcgtgagcagcgagtgagtagagcacagccgttcacctgactcggttgtagtggaatcgaccggattaatgatattggcataagaggcagattgatttctatttctaagtaagttctatttgagcaagggacactggttagtgccctattggatcgttttgtgctttttgttcaaaagtcggaaggtcttgcttccaatagcacttgcatacaagcacatggggggtatcttatcttcatcattgtttgagatatatgcttttttttttctttttgcttcagatcatctgtttatactctttgaaacttgtttacacgccttgagttctcatccagtggagacgatgacaaggattaaactgcattttgggagaggagtatgattttgagatattcgatagtctattgttgaactgtttttcacagtaacatccatttccctgcaacatggaatgcatcagagtagcagttatcatgttaacgaaaagcttgtggaactacaacattgaccttagaggaaggtgatgatatgataaaccggcaaatcttcaagattcaaagtcgtagtcaacccatatgcatatgtgatgagcgacttgattggctgattgaatgaccatttttagtaggtgtgtcgggcgatagcaacgtttaaatagcttcttgtttcttgagaaatggaaagaaacttgttccatcatctttcttccttaagtccaaaagagtattgcacgccttggagctttcgtggtcttaagtttatcatttcaagtgtgatttttttattgattatatacacctgacagaagttatctatttgtgtctctaggttttcacatttggatcggtccctctgaagacttacttacctgatggtgacattgatgtcactgcttttagtgatagtgaagaattgaaggatacttgggctaacttggttcgggatgcattggagcatgaagagaaaagtgaaaatgctgaatttcgtgtaaaagaagttcagtatatacaggcggaggtagaacccttcctctgaatttttagttttggaaaatggctattgatccgtcatgtagcagtcttgattttttttgcagctcagaattattgttgttcctttgggtacatggatgttaaagttactaatgattattttttgcattttctgccacatgaagcaaattagaataagcaaaatatataatacacctatctaaagtgctggctatattatactcttcattttttgctgatggagttttacatgtgcttctgtttctaaaagaagatagcgtggaaacttgaaactgttattttttcagatgccatgaaattttaggcgatccactattgtaggacctgctagcctataatcctgttactgcctggtgtggacattcaagaggattgtttaatgaaagatacttttagcatcctactaagtacagggaaacacattcttttgtttactcatttttgttttcatggtttataatgtgtcaactgtctcactctgttgtcatctctttggtattgttctcatttatttgtgaatcatgtccaggtaaaaattattaagtgtcttgtggacaacattgttgttgacatatcatttaatcaagttggtggattgtgtacactttgtttccttgaagaggtgcgctctcttgttcaaatctagctgaatgtatattgctgtttggttatccttattgcatgtgtttggaataaaaattatttgatttttctgccttacttgcttcaatggatctacattaggttgatgccttgatcagtcagaatcatttattcaagaggagtattatattgataaaggcatggtgtttctatgagagtcgtattcttggagctcaccatggtcttatatctacctatgcattggagaccctggttctgtacatttttcatgtgttcaacaattgttttactggaccactggaggtgactactggttcttgcactttactatcccagcacgagaaacaattcttatttgctacttatgtgtttgtaggtattataccgtttcttagaattcttcagcaactttgactgggagaaattttgtttgagtttgtcgggtcctgttcctataagttcacttccagatatgactggtaatctatatgctgcttactatgacttctatatcaaagttgtttatacgattgttattttacattttttttcaacgttattttgtgcagcggagccaccacggatggatgctgctgaattgttgctgagcaagtccttccttgataaatgcagttatgcatatgcagttacacctcgcatccaggagagccagggtcaacaaccatttgtttcaaagcacttcaacgttattgatcctttacggacaaacaataaccttggaaggagtgtaagtaaaggtaactatcgagcatcaacttacatagtgcttctcttattgaagtgacatgtaccgaacagagttcagtcctggtggttttgtatattactatactatgaatgctaatctatatttttgacaagttaaagatgttttgacttcctaagaattcatatcgcaaacatgctaatggctatttaaatacatggtccttgtaataactgtacttgttttctctttcttttgtggaggttctgttttgctgacataagctgtttgacaataagccaacaaacagttctttctatattaaatacttccagattggatagtgagcacttttctagtaactcatgaaactcatcatttgctggattactgggattcatcttgcgagtataaaaattccttattgttatgaacttgtgatgcatctcttgtcaaatgtacactcttcaatatgttggctttgtggtcattttgatgctgtggtcaatccagcgtcaagtattgaactgtaacgggccatttgactgtatccagcggaagttctatttctgcagaaaaaacatagtacatattatgttgagttgatgagcttcttcttttgtccaggcaatttctttaggatacgcagtgcgttttcctttggggcgaaaaggttggcaaagttactcgaatgtccaaaagaagatctaattgctgaagtaaatcagttcttcacaaatacatggataagacatggtagtggcaatcgtcctgatgcacctacactaggtctggttcatcagcatcatctgaaggttgtccctgctgaagcatcaaatagtcagagaagtgcgatggcactcaagaaaaacgctgaaaatcctaatattcgtgctaaccaggataatctcagtgaaaatgctaatagctatcctgaagctacttctcagccacttcagagaagtgttctacacccgagaaattcactgagaacagtcaacccttctgattctcatgctcatcaccaaaaagttcatgtgacacatgccaatacaaaggtctctgagcagcttgaaagaaacagttctgatggatcaatgcaaaatgaaaggaacaagacagtaccaaattctctctttgttaatgatagaaatgggcaaaacaggtctcggtttgcaagaacccgctctagtcctgaactaacggacccttctgttgaaggatattctcgtggaagacggactggagtggttgaaatggacaaatctttgaaggttgattacaatagcagaagaaacaacttggctccagaagtttctagcagccacatcactaagtcttcacaggatgagtcagtgtcttcgatgaacagttcatctcactatagtgggaaagcagcttctgactcaaacagtgtgtcaagcagctaccgcgaagataatggtttcataatgaacgaagaacttccttctgtatctgaggcatcagataaacagcaagaggagcaagtcctagttaatttaatgtcatcagctaaattgcatgacttcaacgggcaagttcaattgccaatagaaatgccgcctcatttttcggtggcaccctcccctttacttgcaccagcagcttttcccccaaaacattttgctggaattccaccaactagcttaattggggctccatggtccaatatgcatttgatccatggatatgtttcaccacccatggcccattatgtccaaaaccatactttcgcaccaaacatcgaagaaggtaacgagagtgagaaacctattacaccagatgcgagtcgtgatgatggcaacaattggcatgagtatggtgttggatttcctagatattttaatcatcaaggaagagatccacagatgcgccactttaatggaaaagagcattcctcttcacctaacagtgtatctggtgccccctttgaaagacagggagagattgctgttgaggataatggagcagtagaagagaattataccaacatgtttcaaaaccaaacaagtagacaagccagcataaatactcgaataggtagtggaaatgcaagaatcccttcttcacaatccggtttgtcaagaaacaaagctatgcctgagaattcatggggtgaatcagctggaaatacaacaagatcattgagggacaaatggggaaaaaggcctgcctttgcagcacctgacacaactacacatagcaaaaataatactggttggcagactggaaatgcttctgagcatatccccccagaggttgatgatggtgcccggaatggggttatagtaccaaacattagacatgaggcctctgacataataacagggtctggctcaacagcatcaagaactagtcaagtgccaaatgattttgaaccatcacagattggcatgcctaatccactgtttgcacctctttttattggatcccctcagcagagacaatctggtaatggcggactgacttttattcaaacaggtccagcggttccttttttgatgttgccatatgctcctgggaatgatggatctgttccacagtttgagaggaatgaaggggttgatcaacttcctgtcaatattgctgtccaaaattttagttcactcaacaatgttcaccatcctgatatcaatgctacctcaacagcttcatccagtactgcaggtgatccatctgaagagcaaaagcctgacattttgaacagcgattttgatagccattggtgtaatttacaatatggacggtcatgccaaaacccgcgccccatgaatcctgtgttatacccctttgcagtgccaccaatgtatttgcagggccatgttccatgggatgggcctggcagaccagcttcaacaaatgttaactggacccagatggtcccccccagccaacgaatctatcctatgatgcctctacaaccttcttctgaaagaattactggtggtccacagcaccacacggaggatgcgcccagataccgtggtggcacaggaacttacttgccaaatcctgtaagatcctaactagctgctttgatatcttaatgcatagataacatgtttagttgtttactattggtatattgaaaattaaaacatattctatcacatatatagaactctaatatgatgctaatctattgcaaaatggtcttatcaaccatagcttctaaattatatcactgattctagcttttgtaacagctgttataggcgacaagttcacagctaacaagatgctactactcttgtaacaatctagtggaaatgcgttaatcataaaaaataaagtctgtttaatttgcgttgaaattgtgatagaatctaaatctaatagaaaacgaaggtgataaaggaagtaacaaatttgtaggaatgtataatgacaatggacaacattcacatattctatgtatagcaaactagatgtgagattcatggttcactggtgaggatggatactcagctacctggatcaacatacttattagttgctgaatgatgaaaactcttgagtttatttatggttgaatttaaaatttttcaggatgatggaatttaggcctagcggttgtatcttaagtgcaataatttatttcattttctataagaaataaaattcattaagcaatcctttatgaatttgatagtctaaactttttttttgtttgaaaaaagacactttaagggagccccccgcagttaaaactttattcaattatactattaagcattaggttacaaaagttcaatccagttttctaatacatctctctcatgagctgataacctatataaaatcacgaatatagtctgaactggttgatactaattcgtcaattctatctattgcttttcttcttcagaaggttccatttaaggaccgacactcaggctcaagaaaccacagaggaaattataacactgacaagggtgaccataatgataaagaaggaaattggataaattcaaaacaacgaaatcctggccgcagctatggacgtagccactcagagaggtctggcatacgatcggatagacaagcagcagatgaaaaccagtatgataggcagcggcgatcttatagaaatgattcatacaggcatgagacaggcgcccaatcttctggatcaacaaactatatacgcagaccagggaacatgacacatggggatccatcaccatctgcttcaaatggtatcggtgccctttctgggtcttcagctccatatttcatgtactactcatgtgaaccaggcacaaatcacggttcttcatctgaaccacttgaatttggttcacttgggccagttcctacagctgatggtggtgacatgccacgacccactcgccaagcaatgcccaatgagttttatgggcaaaggcatgttgcatttaggggtggctcctctcattcatctcctgatcaaccatcatcacctcaaactcgcaggtaatactctcttctgtcccctttgttgtatcatggtgtcggttttcagtctttgaagtttgattatctgaacaaaacaaaccaaatcattacttgtactacagagtttatcctatttctagaaaacttgtggttgttccttacttaagtgttgcttcctggtagtcaacctagctaaaatcgacaaagttgtatgcctgctaaataagtcaaatctgttagtaagtgcttatgtgttgaatacactggcacatcacgtgagatggatgcagaaaaaggtaggaaaactggcattgaagagaatctgcttcatataatcaggaaagtaggaagttttagctcatttaatttttgctcttcaaattccttttttgagtttttcactaggtacagaagttcttgaaagtctgaaaattgtttgctagagatcaaacttgtcttaattggacaagacacaaaaaagacaattaccagagccttttttgtgagtggcttttccacggggatatggaccaggaattgtgggcttccaaatcagaccttcagtgaacaaaacttgacactgtttactaagtattcatccttttcaaatatatcaaatgaggttgactttggtcttgaaatttttcatgagtgcagactattgaatatgccctagtaattttttagaacttatagacctagtcaaaatggattttgcaacacatgcaatttgcgcagtacgtcccataagcacttccctcttccagtagtattgatgctattgcaagctaatttacaacagctggagtctgttaggaagctttaagttcagtagttaacgtgtcaaaatgaacagagtaaatgtcctccataacaattgctccctccgtttcatattataagttgtttgactttttctattcaaattttgttaagtttgaccaagtttgtagtaaaaattagcaatatctaaaatattaaattagtttcactaaatctaacattgaatatattttgataatatgtttgttttgtgttgaaaatactactatatttttctataagcttggtcaaacttaaagaatttgattcggaaaaaagtcaaatgacttaaaatatgaaacggggggagtaattaaattgtttcctaatattaccatatgtaactttaacctatccagctaatattttgctatcaaactataatgtttttttctggatatatcatgtaatgcactagtacctctttgatcatccgctccattgacacaaaccctctttgatgcaaaaaatctggtgataacatgaatggcatttcccattttagtacctgccttttactcattattctctatgttcagtttttgaactttggctgcattaattattctttgtgcttccatgaattgctttcgtgataattacttttactgatatttttttgttatcatcaagctgaaagtttatgtattttattccctttcaaggtagtccgttctgatctcctaatctgatggctggtcgcattgaatccggtgcttatggttggtttggtgatgagctacccagaaagcaattgtgctctggcagctgataccgaatacttttagcggcctcaccagaatttacttcagtccgacgatacatcagatttatcatagcactacctgatatcggcagcaccaaccttctgatttctgaacaagccatacaacttggaaccctgaatatcttcatgaagaattaacctaaaggataagctcgaggattaactgagagtgccacccttctctgtaatattaccgtcaaaagatgactattaatgctgaaggaaggagaaggattggcttttcaaccttgaaaagcatggaaaattattggtggacaaatgtaactgaatgaatgagatattctcttgtctacaggtagaagagagatcgtgtactctagtttacatacaacaaaacttttcacattagatgtactagattttaggcgaatcctcaacagcaaattgaacggttctgtttctagcatcctttgactcagtaaaaaaattaaagttggtactcatttttctggtgtctgcttgtttattcctggtgcttgcttttaccttgggtaatctgatggtataatttattcctgaggttgcttcatttatatatgctgtcactcgttgaaaccttgatggatgaaaaactttcagaactgcaggccaccggcagttgtatatatacttcccttttgggcgaaccaccacaaaaaaagagaaggaaagaagaacaggcagagtgcttacggtaagacaagaaacgaaaattttaggaagcatatgagaggttatttaacatatgtgggcgcattctgaaatgtctgattacatctaatgcatcgtcggatttctgtactgaatctgaagaaaaaagaaagagtggaattgtctttgagtgtttcagactttgttccttcctacaatacagaacctgtgctaatcaggctaccaagagtaaaatgccattcctggatctaaacatagtggtggtactggtctggcaacaaaagctgtatatatgcagtggcaaaactccaccatggtggaaaatggtctacacatttttcactcttgtccagttcttttcttcagctctgcgatgaaatcctccttctcctggtccgacatcccctccgtcgagcagtccccgacgccccactcggcgccacgcaggcagtatttatcctgaatctccctctcattcctgcaattttttgataaattgttcagagacccatggcaagaacatggctgcaggagagcttcaagagaaacagggctagcgaaaattggggtacttcagtttgttctgcttggacttctcgagcagatccttgagcacttgggaagacttgaacctggagtcgaactcggcgtacttcttctggttctccgcttgagagcaccaaattaagagaaagtttttttttatcagcgaattcatgtcacaacagaagtgacaattggcaggaacattacaggaactctcagcgatcgagattcgagagagatatggcatgcatacatacatacatatatataggagagtagtagccagtttgctaaccattccatttttccaagaactccactcgtggcagatctgggcctggaaccgattccatccctttgaaccctgacatgatgccagcatgtactgcagaaagaaagaacaatcagcatggctgtgcggtgccaattgtgtcttgtgtgttcatccattgttccatgcatcttcagttcatgatccaactatctaccactccctctgttctatatgttctatattataagtcgttttgactaaatttttagacaaaaatagcaatatctataacaccaaattagtttcattaaatgtaacattgaatatattacgataatatacttattttgtgttagaaatgttattagttttttttattaaaattaatcaaacttaaaataatttgcctagtcaaagcgacaatacgaaatgggaaacggagggagtagcgtatacactaacactatcaccgcttgcttgcaagctgttactagtcacttcagctgtgcctgtgtgccggtgtgtacctggactggaccagaggacaagtgagagcgaggcggcggccgctgggacgatggccagtggaagccggccgacgtggccagccgtcttctccggcgccgacgtcgccgcggtcgcggcactgcaccgccccctacaccgcggcgcggtgacaggtgacgcggcgacgaggccgcggaggccaagcatggcgataactctaactcgcctgctggttttcctcctgctccgctcagtggtggcctcgcccagcgtagagagaaggatggggttagtgggttggagactgggagtagtcaggctgctgatgggaaaagatcgaaggatgggtgccgacttgttctcttgtgagccactaacagcgagatgactgggtcttgcctctggggctttgccttgatttttttttaaaaaaatagtttttaatttattaatagatctttccaaaaagtatttccgaaaaatgccccttttggccactccagcccgtctggctagccaaataattttgtcacaccacacgtggctggcatgccggtgacagcctcttgccacaccagaaggttcagattttaaaatacttttggaaaaaggtctattcataaaattaaaaaattaaaaataaaaaaaatattttgcctttgggatattttttttactcttttctcttttgaaacagattattgataggttattgtcatatattatccatttgattataatgatatattaaatattttacaaaacaaaattaataaaaatagcttagaatagagtctaatcaatgtggtggaagaaagtttgttgagaaagtactatattttatattttatagatgtggaccagataatccgtgatagtagtccgttcaaggttttaaatttttaaatattttaaaaatatttttaattaatacttaattaatgatgtagtaattaatcatttcgttttacgtggacgggtgaaaagttttcaactcttgcattccaacgaagccttatagatttggccttgtaaatggtgtgtgttttttttcttaaaacaaagcattatgattttgctataaatctgttgacaaatttcttccttagaatttgtcgatttttgaaccgcttgatgaacctcgggattcgtgcttttgcgtcgacgctttgatttgtttctttcgatggccgctggctaccggcactggcgcggctcatgcacgcgtagatgttagacgaagggcagagataaagcggcagggcatagccaaacatgcatgcatgaatgatggcctccacacgcatcgtacaaacagacattgacattgcgagttcgtaatgcctctttcacgtgagcagtgccaaacataagttttataaaggtacatctcacttatattatagttacaatgtaattacatataaataaaaatgtaattattatagttacagtgtagttatactaaagttacagtgtagttatactatagttacaatgtaattacatgtaagttacagtgtagttattctatacttacagtgtaattacagtataattatattgtatttatatttaataaatttttaagagaaaatttgtcgacaaatgtacaggtagtcctaagcctataaggcctccgtatgatttggcctcgtgtaacagatgacagaacatcgcgaccgtccgtgtcttgatcggacgtttcagatgcgtccacccaacgctaacctcaacttgaaagctgatgaaaccgaaactggattgattcgcctcaaaaagcagagtaccgtgtaataacacacttgacagttgacgcggcatcgcgagaaatttcttcttctccttcagatcccgagctaaagctagctagcttacccagctcgcgcgaatggcctcctacgacggcggcggcgacggccaccgcggccgcccgcccccgcagcagcaccgcccgtcgtccggcggcggaggcgggggcggaagcggcgacctggcgtcgagcgccaagctggtggcggaggcggccaagtcggtgttccaggaccacaacctggagaaggtcgacaagggccgcgtcgcgggcgccgccgccgaactcctccacgccgcctcccagtacggcaagctcgacggcaagcccgctggcaactacctcgagaaggccgaggagtacctccaccagtacggccgcaaggagggttccgccggatccggcggcggcggcaagtaccaggatgagggcggcgagggcaaatacaagaagaagcccggtcatggaggtgggaggtacgaagaagaagaagaagaagattacaagaagaagcctactagtggtggtggtggtggctatggaggaggaaggtatgaggaagaagataattacaagaagaagcctactagtggtggtggtggctatggaggaggaatgtatgaggaagaagatgattacaagaagaagcctagtagtggtggtggtggtggctatggaggaggaagatatgaggaagaagatgaatatagaaagaagccgagtgggggtggctatggtggggggaggtatgaggaagaagaagatgattacatgaagaagccgagtgccggtgcgggtggatatggaggtggtggaaggtatgaggatgagtacaagaagaagcctggtggtggtcatggtggagggaggtatgaggaggatgatgagtacaacaagaagcctagtggtggatatgggtatggtgcttcaagtggtggaggccatggtgggaggtatgaagaagatgactacaagaagaagcctagcgcgcactccggtggcggcggtggcaggtatgaggaagaggaagggtacaagaagcctagtgcccatgggggagggaggtatggtaaggagaaagaggaatatgccaagaagaaaaagaagcatggcaaggggtcgaaggccggcatggcatactacctgaaattggcacaaggtctcataaagaagcaagccggtaaggggaagaccggtgccggcggtatgggtgactacttaaagcttgcgaaggggttcttgaagaagcgctgatttgtaactgaatctatgatgtctcatgaattgtgaaggaccttgctgtgtttggttagtttcctgttctacttaatgcccaaatggtgtgaaatcatgtacgatctccatccggttatacaataaaactgtcttggtcagttggtcatgttgtctctgcattgtaacacgaatgcttagggtgctacccatgaattcgggggaataaatattggatggaaacctgtgttgctcatgttgtgtgtgccattcctgactataattaagtattataatgctatgcagatgcatttttcagagttatttccttattggttcatagttcatagttgacatattactaagttatgttttcagggaataacaaattagccgtgttgtggagtatgagggtaatctatcttaccatactggactatcagttaactaaatttgggttgctattaaggtttgctgggctcaatagaagaaaatgctcttttttccctcttccagaagtgttttcacttgattgacaatggtttcatctttacaaaaatccctttttgatcgataggctgaattattgttgttatgcaagttatgttcatatgattcatggactattcctatcctacctataagctcttatcttctagagacagtcatcaactcctttgttcactcctttgtttttaggctggtcactgaatattgatgtctcaatgctaaatggttttatgcctaaacgattcagtatattgttcaaatacttagtgataaatagttgtctaactagaagaagtatttaatctttaactcgaatctagtgataaactatttaaagtagacaatggattatttagcaaaaacattataaattctgtttgaactctgttatttcggctgtttataaatcacatattgttaacaaaataaattcgaagatgattgttgaaacacatcctcagctggtgggttagtccagggcagaaaataggtggttttagagtgacttgaatgaaacggtggtactattcttagaatacaacaaagctttaaaggataagattcaaaaaacagaaaagaaaatgcagactggataccagctggttcccaactgcaggccttgttcttgaacttccatgatctaattattatgccttcttccttctcccaattccatgataaagagaaaaagcaccactcaagaagaacatgaataaatggtcaactctagtgttacctttacaagcacaaatgtcatctccttccactatggttgaatatctctgcaatgtccatcttaccttatttgcagctgcaggtgcctcttttatgctgtgtgatctgttggtactaattccaaagcttttcagacaacctgaatctaattgatttgagaaatagaggtgtgataggatcagcaatcacagttggtgcttctgccatcttccctggagatgtactgtctagcgctgaggtggtggcagcagctgtatgttggcttaccaccatgagttcagcaaagttgtcaagcgctgcgctgctccctgctggttaaacagctgacctcctcagcttcccattgacttatggctagatgcatgaaggagaaattcttcagtcgttacatcgagaacgctgagggttacctatacccgtttcgatcttcatcaagggtatgtgtcaacaaagtctgatgatgaaggtggtggaatttgcgtctgaaacagcgaaacaaccaaaaaaaacccttccatcagtcttcaccagaagaacaggaatggcttttggtacagcaagcctggtagtcatggttatttggcttctgataatttctttggtgatggtggtcatgaatcagaggaaggcgatccaggggactacataaagtttgacacagatgttcttgaagaaacaaggtcagtatgctgtcatggaggagtcacaggatagtttgaggaactacctgaactaaccaaggctcaccaggaaatactgagctcatttccttgatccatggggtgtcaatgttgcatgccttcatggaattggtattgatgtgctcaatgtttggtatggccaaatatctaaggtaagtactacgctttaggtgtgtttgttttgagtcaacattgcagctgctgatggatttcagtaccgaataatgtaaattaatggaacatcatgtgttcctttctatatcctgatttaaaatattatgctaaatattatgtgttcctttctatatgctgctagccactctgccaaaattagaacgtcctaaacctagatgcatcattgttttttctccagaggtttatattttcaataggcagccaggcaggttctcttcaacttgggcatggttaagcatcatcaaacaatcaatggatgcgtttatatgcgcaggaaaattccttcgtgtctgaatgctccatgaaagacgatacaacttgttcagcaaaaggacatgcaactcagcagacaggcaccacccaaccacatgcaaaagaccatagacgaccggatcacatgtcccctagaaataggcaattcagaacgaaaacacatactaaaatgttcacattgctaggacatcatccatgtgaaggaccggatgagagaacatgcaagagtgtcttttgtcaggaggaacaaattctccatgtttccaatatacaaatctgctgaatcacagcaccagaaatcaccaatgtgtcctccagagaatcacacaccacatggactcaaaaaaaatggtaagaatgaaactatgagataacactgatcaattcaggttcagaactcctcaactgcgatgccttccctggggacctcataagcatccttctgcctcagcttcttcacgccggctatgaagcagatcttgtcagacctgaagctctccaagcttatgctagccaccttcacccacacaaccaccttggtcttcatgccttcgatcgcggagagcttgcctcgagacagagtcaccttgacacgaggcgcgtaccgtatcacggatgaatccttgaagctcacctcacagggcttagacaggtgcacaacaagcttcgagcttgtttgatcatattcgtagcagatgatattccgagggaagaggcctggaggaaggttgtactctcgcaggagatcagagagtgacttgtttggtttgcctggataagagaaaatggaagtcaagtctcttagttcccactcttatgtaaaattcaacttctctgcagatctaacatactgataggcaaattcagaaggcattctgagctattcagggaaattcaactgtggtgaattctgagtgaaatacaaaggtaaaatctgcattacataaaacttgaatatcatttctatgaacaaaattgcaaccaaagtgcacaaattcatacgagtctcaattctcaactctcaactgtaggaacaaacaacaaccttggcagaacttgaggagcagcacacaatattgcatacatctgttctctaaaaaaatagaaaatatataactagaagtgtcataaaacacacaaatagatctcctttgcaagctggcatactttcttttccccaagtcaggcaatgtattaaaaatatgtcatttttatgttttcatgtgagcaggtagattaggatactgattatgctaactttttttctccactgaatacctactggagtatatatcggacatgtatgaaacagaatatgcattacagactggcaagttgcaaatcagctggttggtgtctcataaaaccgtgccatacttaacacaaccttgctaataccgccaaagacttcaagaggaccaaggcaaagattgcaagtaaaacaaggtgttaggtgaacaattctgttagacaaatcccctttcctcttaggagcttttgcataatgtcgtcaacagaaactggacccattgccagccaaagcacattggtagaatgtcacaaaagtcttcagtttggcccccccatgtgcattactgtataactttgtagatcaaaaagggatgaaagaaaaataaagaaaagctatatccgaactccatgcaagaaaagcagaaaagttagaacaaagcagatcactttgcattgttttggatttacgcattaggcaagaaaagcagcattagcaatttggcaccactaataactatgtacaattgtactaagcataatgatttaccaagacaacacaaaatgcacacatcaaggtctgcttcctgtcttaaaactcactcttaatttttatagccacaaatagaacagaattgaaaggaacagtatacctttgagcttgtcgaaaacccatttcgccttctcctcaacagtgctcgagagacgctgaaaatcacaacagttaggtttgtcagtgtgatgtgaatgtcgaacctaaagtgcactgtagcagaatttcctgtgatttgaacctaaactgcattgcacagaagtaaagtgcagtacagtcgaatcaacagggtcattttcatgcatctcccacaagaaaagtgaagcaaaaacaggttgcagaaacatctcgaagaactccaaatgaatcctaacactgacaccaacaataatgtggaagaacaaatcgtgcattcgcacaaccaaactgttaatctccagaaaagaccagatcatttctagacggcagcttcctcagattgtaacagaaaacagcatctccaagaagcaagccagcgaacaaggaaaccaagaacggcattgattgatttcagtagtccaacaaagattcaccaagcaaagaactagccctgatataatccaactcccaacagtctcaacaaaccaatcaaacagaaaagcgaagagaaggcaagtaatacttacggagatatcgccgccaatggcggagagctcctgcttggccttccgggagatggtgaagctgccgatcttggtgagcgccttctccatgggtatcccttctcgtcgctcttggccggaggctgttgtgtggagtgtggacgtgtagacgacgacggacggcctctgcagtctgcagtctgcactgcgattctgcgaatgggtggtggggtgccgcaggatgggcgacacagaaccgggttcaaagctctggcaccctcctcctccggatgatcccaataaataagcagccggctcggggatcgatttggtggtggtctggtggacctacggcgccggatcttctgcggccaaagagttgctgcactgtttgctgcgtcagatggcaggaatttgctcgctttttgttgcgttttactcggaggagaaagaaagccgtttgtttgaactcgtactgccgcgaaatgcacagtggatttcggccttttcggtcaatttaccgatcggcgttcggtacggggaaacgtacagcgagggatcggtaaattgaccgaaaagcctcttttcccaactcttctccctcgttttctgtacgcacgtatttcaaactgctaaatggtacgttttttttaaaagtttctatatgaaagttactttaaaaaaatcaaattaattcatttttttaaaaataattagctaatacttaattaatcacgcgttaatggatcgtcccgttttccgtattactgtaccggttgggaaccgcttcggcgaacacaccctgaatcgtccaacggccgaaccgaggcgcgagccggacagcggtaggagcggggcgcatttggtgcgtgtgccgcgctcatcgcgggtgcggggtaggcgcccgcaccgcaagcgaaccgtgacacggacacgcgctcgcggtggctcgtgtggcctcgtgactcttggcatgcgcgcgcgctgggtgctggttggtttggccgctggagcggacgaacagcggcccggcgcggcactccgcgcgtggtgtgtgcgtgcgtgctactgtcgatcacgccgcgcggcacgggggaccgaccagcctcgtaccgtggatcgggtgggatctcttcgtggtgaaatgctaccaaagctatcggcggccgtgacagagaacggtgcgcgtctcgcagtactgcgcatcaactggtgagggaaacagtacactctgcactgcatatcacgggtcatcgtttgcacgtagtagtggtgtagtgggaagttgggaaccgaacctactactctgctactactactagcaatgaacagaacgaaagtacgaaagctacgcgaaacccgacctggtcagtgagacggtcacgaaggaagggcattttgaatcccagaattgataaaacagatgaatagaaaaaacgtaggaattgaatgccatatttattggatttttatgggattttgaaacacaggaaagtctccaaactatcgtttgattagcacacaggaaaaacacaggaatcttagacacatgaagaggaaaacatgaggtgagacctcatgcttatttttctccaaagttactcattccataggaattttaaaagaattaataggaaataatcctttgtttcaaatgactatatagaattatttttcataggataaaatcctctaaaattcctatggttttgcatttgattcaaataggccgaaatgtgtgctcggagaacaaacgggatagaaaaggataataagctcatggtcatcccgacccatacaaatcgacgatcatgcatgcctccaccagctcacagatgcttcacgcttacaccgattacatgagatcgagctaaggtagtccttgtcattcacgctagctgtcctccacctaaagctaatgtgtgccattctccattctcgtgaattccccttggtcgtgtactcgtgtggtggctctgagccgctgcctgctggcttcgcagccgcgcaccgtacaatcgcctcagatttttggtcggcgtctcgcacgccgatccagtagattgataaggttccccatcgtgtagcgtacaatattacgagtctgtttggagtgtttaatattttgggaaacaactgatgataaattagctgacgataatctggatgagaacccaacttttagcttacatgagcctgttcggggagattatgtagctacagcttttttcaggatcacaagcttttcaaaacagtctagttttccgttcccttaaaagttagcttttcgtttagattttaagaaaatatagttaaagaatccagaaaataaaataaaagtcagaaattgaaaaacacaacttttccatattatcagaactggctactatccagatgattctttagaatcttaagctctccaaacatgtcctattttattttctagaatctataactatggacttgattccgagaaaaaaaacctagattattaaaggaacttctaaccgatagagattataaaagaagctgcggatgggagaccctaacaaaccctatgcgcggggccgacccgagcagagggagacggcgaaacgggcccttggttggataagacaacgtgggccgcggcaaagcctcccccgctctcattgggccgcggagaaacagaaatttgggccgcgtcacgcagcccgcagcgggggcacacgggctcctctccctgtacttccccgacggcccacctctccgcgcccccccacctttcccacgccgctgatactgatagcctcccaccgatccaattccaaccctaaccctccgcctccgcctcgcctcgccggcgccgaagccctcgcccgctcgtcggcgacccctcggcacctcatcctccccgacgcgcgcgcctccgctcgccggtgcgtgctccgtgatttatcctctcttgttctagctcttttacggcttcgcttttggtggttttttttggtgtaattttttttatcagccttcgccaactgttcccccccgtaggggcgagagggattcgtcggccacggtccgcagccgcaatggagcaagatcagggcgttgctgccgcggcggcgtcggagaatccaagcgccggccagggcgctcacgattccggtagcgcgggggctggcgccgcagcctcttccattgcgtctttcgattcggccactgcaaaccctgacgcaaacgtttacagtcagaatccgagctccgtcccgcaagccgatggcgctcagggagcggatgcctccgtgtaccccgccgaccacgcgccgctaaacgggacatcgggccaggtggtagattaccagtctgcgggggctgcagagaacggcgccgccacaaacgagatgggtgagccggttcccgagcagtcctatgcggatggtaatgtttcgcacatatgaacactcttcactcgctatcgggcttgattgtacttgctaattcattgtttcttttcgcagctgtgctttcagcagaagaagcaaggttgtggaatgccgttacagcgaattgcttagacttcaatgcttggactgcgcttattgatgagacagagaaaactgctgaggtaatgtttttactgttgccgtcaccataaaatctgttattactttattctgcaacttgttgtatgcataggcactctaaatttgtaacttctcattttctcattcattcacatgaatgatagatttaccttatgattatatgcatctatatcttggagaatctggttccatgaatctgccttgtggatttgcatcatctcatataggtaatctatgtttatataggttcacaatgcttgatgtgttttggcatagtttgccatgttgagctgtcatttgtaactttactttcctatctctcttattgaaatggtagagctcttatccaagtttctcagggaaaaaaatgaattgttatcatttgtcctatgatagtttttgtaaatatttgttcatttatgttttagttaagtaaattaagtcggaattatatggcaagagtagttctttttgtgctaataattttttttatctattcttgcccagagcaatatcttgaaactaagaaaagtgtatgatgcattccttgcggagttccctctctgctttggatactggaagaaatatgcagatcatgaagcacgtcttgatggtgtcacaaaagttatagaggtttatgaacgtgcagttcttgctgttacttattccgtggacatttggtataactattgtcagtttgcaatttctacatatgaagacccagatatcatcagaaggtagcaatcacactctatctattcctatttgtttcctcttgtagctgatagctgtgtgtgattcatgtccattttttggattgctgccaaaaatcttccctaccaagtcttttgccaacttaaatagtattgcacttgtttgaattgaagccaattttggcaaccctaccaaaatttggctcctaattagtagcaaaccaaaggacacagttgtagcaaaactctacccaccaaaatttggctgcaccaattcttgcctaggttttggcagtaccaaattttgggagggtagagaactaaactcaccctataggaaatctatgttggaatgtttgatatatgtgccttcgaatatactagcaatttataagtaaacttgggacttttctgtcaagaatgatatgatccttcgtggatgtaaatgtaggatgtagataccactgagtgcagcagccggccatcattcattgtaaaagattttatttctacattaacaaattttctcacattgtcttttacagactgttcgaacggggtttggcatatgttggaacagactatcgttccaatattttgtgggatgagtacattaagtacgaagaatcactgcaggcatggagtcatctagccatcatatatacgagaatattggagcatcctataacacagcttgatcggtatttccattggtaagatcattgggtatttgtgcagtttatttttgaattgtattactttttatgaataagtcgttgattagtggtctatcaattgtcagggtgattaaggaattagagtcatataaaccaattacaacaaaagaaatagccatataaatgtaacgtggtattttggatgataattgttatattcttaatgaaacatagtgaagtaaattttatacttgtactaatggtcatttgttttaatttctactcagcctaaaggagttggccgcaacacgaagtttatcagaaatacttacctcagaggaagctgccatgtattctgttactgccgagaacactgctcagacgcttgatggagagacacaacctggtgatgtagatatgtctgctcaacccgaaatttcaggttcaacagaggcagataacctggcaaaatacgtttctgttagagaagaaatgtataacaaggctaaagagtatgagtctaagattattggttttgagctagcaattagaagaccatattttcatgtcaagccccttgacaatccagagcttgaaaattggcacaactatcttgatcttattgagaaagaagaagacataaataaggtatgcttttgcaatggaaatagtcctttactttttcattcagtagacttcatgcagtacctggagtcttgtaacttacaattttagtcttattggctccattatatgctttaacggctagtatttggacgaagcttcctttgtaatggcatattgaactgaggatagagcatggacataatgtttggtttcgatgaggctaagtactccaaactttcatttgtcagtggccgttctgggttaatgatatgtgctaccaaatatcagttgtttgaatttttaatctcatatatgcaggtaattgcttaatgctctccttcttaaccatctatctatcaggcaaggatggtccctccttatggaggggcctccctaatcagctaatggagtaacctgtgtgaacttcttctgtttttttgtcaatattttattgttattccctttatttcctttattacttccgctcaagttttctgatgttacccaatatttgttttcaggttatcaagctgtatgaaagatgtgttattgcatgtgctagttattcagagttttggatccgttatgtgctatgcatggaagctagaggaagcatagaactagcaaacaatgctctggctcgtgccactcatgtttttgtcaaggtatcacatatacagtcagtataatttaccttttaccattatgttttttctcctgcacacttttttgatatggatcttgtgtatatccttctatctacatgccactaacatcatcatacgatatcaatcagcaaggtctgacaactgatctaaaagttctgtttctcatttcatcttgtgttctttcactgtcaaagattctgtatctgcgaaatgaaaatcttgtgattcttgattctatataggtactctgcatggagataaataagaaatataagaaagtggtctgaattattagtttgcaggctgcttaacgcatatctaccctttacttgtaaattgcttttgttattgtgatttgagtagacagtagactccttctgaaaccttgtttgattattgacgtgctgaaaacacaaagaataaactaatagcatctgtctgtcatgattaccatttgccattgataatctgattggggcctgagactgtatcgacaatcagtattttatttattgcaacgtaatgcatgtagtttatactgcaatcgttttagatttactgaataacactgtttcttctattctttaacagaagcaggcagagatccatctgttcagtgcaagattcaaggagcttagtggagatgtctctggagcacgtgtagaataccagcatctttattctgatctgtaccctggccttttagaagccattgttaagcattctaatatggagcaccgattggtatctcccgaatcaaactacggcattat

SEQ ID NO: 27829 - DNA, 15707 bp, Oryza sativa
agtttttacctcaggacctttaaaactgcaaattaaagatagtttatgtatgttttgttttttgtttgcctgcctgttaatgagatactggagacctactagtagctacggcctcagtactagtttgtctagcagagaagaatggatcataattctctaggaatatgaatcaaatgattgcactgcttgtacttcttttcctaatctgaattgtcctgcatggcagcatctgttttatttgttcttttggttgacccactacgattgctgagttagtgacgtgtgtttaaattctctacagtttttggatctatttggggatgcacaagcgatcaagaaggctaccaatcggcatcttactcatttttcgcggaagagaagcatgctgtcatcaaagaagcgaagagctgatgatgttatcatgtcagacagagataaattggctaggattggggatggtactcagccagttgtgggaactgatccaaatgctcataatcctccagtttggccagcgacatctgaagcatcggggcaacaatggggagctgcttatgcaccacaggtttttatattcctataatcctaccaatcatttatttatgtcctgaacgtgtgtagcatgttttctatgctgttgcaaaaaagtgaaaatatattttggtttctttaaacgtcttctgagttggtagactttcctctactgtttatatcctcgcttgctatgtctctgctgtaatctgtcacttgtactatctctctttgttatagtatttcttttaactatttgttgatgcgattgactcttaacctgtttgcattgcaggccacttatcctgcgtatggaacttacgactacagccatcaaatgcctcaatctgctcctcaagcagctgcttacggcgcctatcctccaacataccccgctcaggtactgaagatgttctccatctaaacttgtagagtacctctggatttgaactgctttgtgcttagtaatctgatcaaattgtgctcgaaattattttaggcctacacacaacaaacctatgcacaaccttcagcaatggcggtggcggcaccagcacccgcagtggcaccggcggcagcttaccctcagcaacctgttgcagctcagcaaccatattatggaacaggaacatactactgatctgtagactgattcaagagggtgctacgaaagtctgtttatttgttctcgcgcttgtatcgctgcagcctaaattagcatattttactgatgatactgtaggtcgaagccatggcaggaccctttgtattagtactactagcgttaccagaagactagttaagcacatgatttgtatagcacctcgtgacattttcctgctagcataatggtccattgttttcatctctaaatggtcgttctgttggaatgagttatgcatgtgtcttgtcaaccagccacgttggccttgtctacttgttctgccatgcatcaatttgcagaacaccagaatccattacgccgcaagcatgtttctgtgtatgtgagcgacggccgggaatggaataagagcgggtacaataatatgatgatatcatatttgtgtttatgtgaacaagatgataacatcttatttgtgtttatgtggaggagaggagagaggaaaaatgggctacatatttatatagccacctgtagcatgaccaatagtgtagtatgtgtagtatgtatataggcctggttagatcaatttgctgtggcaaattatttttgcaaaagttttagtggtaaaagatttggcattagagttttgctagttggtgtttagattcacggtaaagttttgccattttactagtaaagatagagagagcgcggctcccaacatactttttagcaaaatttgctactttagcctcccaaataacaaatgccaaatttgtcaacttttgctactagtgtttagatcatttcgataaaaaaatgctccaaaacaacaaaagttttgtcattttggaggaactaaacagggccatagttaactagtattgtatttattagtatgctactaagtttgatatagatgatgtgttaattatattaataaagttagtagttggcttatattattaaactgctctaacggataaaccgcggtggtggtggcggtcgtacgcaccgagagcgggagagcccacgacgagcgaaacgatcgctatcctccggtaaatacgctcgcaaactcctgcacattcctgcgttggtggtggttccaagcccgaagcgtgccgcctcctcgtgtccctttctcttccttggatcggcgtctcgtctccttgtttgccacgaacccacgacgccctcgtcgtctcgcgcccatctcacccgcctctcccctcctcgcctatatcaacaaaccaaccggtttcttcgccggtgaggctatgcaccggtgattggctgctctgctcaagccaaggtaagccacggctttctttcattcccactggtattatctctctctatccgctagtaaattcaacttggtaaaattgctcggtaaaagttgaaccgacatccgacatgtgtgtaaatctacagttctatccggccttgttcggttaatcttcatgagaaagggatcgaaggttgaggtgtggaataaatactctccaaatctccttcaattttcttagaggaaggattaacccaaaaagaccttagtgtgttaatacttttggtaaacttcagattattgatttttagcttactgtattacgcttgattttgtttagtactacatcgaaaatactgatcgatcgacggtaagagtgcaggttatcgatcgtcttggacatggccgaaatcgacactaggccgcttggatctgtacgagcagcactgacccacttccagcagagagctgatcatcacagcaggtttagcccagatagaaatgtgcgtaactgaactgaaactatccacaaaagtacaaaactgcaattccattttagttcctggattccatctcttctcacacacttgtcaattgtcaaatgcagctgcaggagatcgagatcctgacgaaggagctcgcgagctgcaggatgcagctcgaggtgaaagagaacgagaagatccaggccaacctgaagctcgaatccctccaaaacgccatgcaagaatcgtccgacaaccggatgatcgcaaggcagcaatctgaagcttctgaagagtgcaaggcactgagggacgaactgaccgtcgtcagaggcgagctcgacgccgtcaggagctcgaactcgtttctgctgagagagatcgagctgatggagacgaggatgatcctggagaaggagagcatcagggactctctgaatcacgtgctgcagatcaacgagtccgttctttcgtctgctgtcgccgcgatcagggcggaggaggagaggtcggtgttcttccaggagatcacgctcgagttcttgagctctgacaagaaccgggaggtgatcgaccggcaggtggagatgatcaagaacctggagagtgagctgatggcgaagacggtggagatcgcttacctgcagtcgcagctgcagcaggtgaaggagcactgcatttcatcggaaatcatcgcagggaaccaagaacagcaagcggaagcatcgctgacgctgggcaatggcgacgcggaggctgtggtcgtcgccggcggcgggtttgtcgcggtgatctccaaggaagacgacggcggcggcgaggagttctacacgaaggagatcgagcacgatcagcagcaggcggccggggcggcggggctcgccgtcgccgatgggtacgtgctcgtggcgaagagcgacggcggcgacgcggacctgaaggggaagctggaggcggcgcgcgcggagatcggcgacctgcggttcagcctggaggaggcggtgaggcgggcggagctggccgaggaggcgaaggcggcgctggagagggcgctcagggaggagatccagaggaaggcgcagccgcggaacacgccgtctctgacgacgacgacgacgactccggcgaagccgccattgacggggccgagaggaggcgacgggaggccattgcctggaggctgcctgacactggggaaggtgctcaacatgaagtacaagtaaaactttttcaggttttttcaagcaaagcatgcatgaattcaaagatttcaagtgatgctggtgtatgcctatgacttgttatgattacattcatgtgcttccttaattgtctacttaagatgtagtatgactgtaagagcactcaaatggatgccatatatattaaactagctgggtggcccgcgcaattgcacggctagcacgcaaacaaaatcatatatttttccgtatgacttttacttaaaatttattaaatagctatcttattgtcttaagactttgaaagaccaaaccttatcattcccgtatttctaattatatagtttttaaaattcacactagctgctaccccttacttctatcatatccttctttatttgcttgctcgatctgccactatttctattcattctccttgaaacctctaaaaaaatggatcttatagtttttagaatttattgtctcgttaggttttgtttttataatttctataagttccgtcaaacgctgccattatactcctctacggcccatccattgtgttttctttttattgtcattgagatttaaaaaatcgaacataattattgttcaggttcaattttttactttctagaagtcccgccaaaccgtcagcggctttactactgtacttctttatggcccgctgcctccactctttattgtcattaagattttaaaatcgaacatgattatcattggttttttttttactttttagaagttctgaacctttaaaaattggatcctgtagtttttagagtttattgtcttgttgagttttattttttataatttttagatgtcccgttaaacgatgccactatactcctctacagcctatctgccacctactctttattgtcattgggattctaaaaattgaacataactaccgttgaaatttattttttattttctaaaagttccgccaaccgcctacactttgcccgctgcttcttctttttattgtcattgagattttaaaaattgaatatgattatcactggggtttattttttttgtctttctagaagtcccggcaaccaccttacccgtttgcttcacggcatgcctgtcgtccctccttttaatcgttattaagattctatttggtgttttattaacggtttttatatgttgtatcaaccgccaccactctacttctttataggcctgttacttaatttatctcgtcatgtgttttacatggttttcttttaatagtctttatttttttatcaccaattttaattatttataaattatattcctaaatgattctttttctttttctaattaatcgtgtgttaattgtttaatgacgattaattgtatatgtgcaaccgtgcaagctttgtttatttgacagcacaactcttgtctgtgtaggtttataattgaattagattatatgtgtactgtgtacaccgccaaagaaatagaaaaggaaagactcatagtatgtaacttacacagtacatatatatggacttatcttttctacaacaaatctatacagttaaaatctgaattgaatcaaaggttttaattaatctcgtattgggttcttatatggactcctcttacaatattgcttatttctaatttcgaatttcagctattttttatattgtatttctatttggactcttcttttctttttcttcgattaatgtgggaatttctagcctccatagcgaacgtgatgcctccttttcgagctgtcttaataatataatagatagatactgtttaggcaggtatttagtttgcattaacatttcatatctcaatatttttataattttatgaatggttctagcactcttttttttcctgaatttagaactcattgcctgatgatttatggacacctccaaagatgaaactcattttcattattctaaaaagactggaatggtatttcttggagcaaaggagacattatctcgggagatattgaagaatttctcctttctttattcacagctttatatacatcagacaatttaatgggtaccaaatcttatactgctaaagttggagtaggatatatacccaattaattcccatattaaaaaatccattaaatttctgcccgtttgagccacaccattctcatctatttaaatgccttctccttgcttgtcatcgccattgccatcgtcatcacagcacaaatcagtcaaatagtcaaacaaaacacacaccaccagcagcagctagccatagccatggccatgacgacccgcaccctcctcctcgccgccgtctgcgccgccgccgccttgccccgaggctggagcccgataaagaacatcgacgacccgcacatccaggagctcggcaggtgggcgatcacggagaacaaccgggtgtcgccgagcgacgagctcacgttccacagggtcaccggcggcgagcagcaggtggtgtccggcatgaactaccgcctcgaaatcgaggcggcgagcggcggcggcgacgtcaccggcagctacggcgcggtggtgttcgagcaggagtggagcaacacgcgcaagctcatctccttcgacaagaaccacaacttctgagctccccggagggcgatcgatagctctcgatcggcaagatttatgtgttgaatagctcgagttgttttgatgtaaccattgcgtggatattttgtccatccaattgtttttcacatcgataaaaagccagatttcttctgatctcaatctcttttttttgaatgaatgaggaaaacaaagcttttcaaacaacaccattaattcctcacagggcccacatgtcagtgaatattgctgtatatgtaataccacagaggatctggattcgaccgccccctccttttgttctagtactaaactataaacgcatgggtgacactatatatatatatatatatttgtcaacagatatgacattgctctttggagacattaaggagatgttctttttgataagggtacatggtactgaatatgttacctctcctcttgtactttttggcaatagagtcgtttcctctcctcttgtactgaatatgttaccctttgagtctaaatcaagcaacaattcgatccccaaattcactatttgacacttttaactgccccacgccggcaaatgcatgaatgggaaatcacataaatggggaaaatacatttttataggaaattaaatgcatatgtaaagttgataattttaaaacaaggagtaggaagaatacataaatataattctttggatggttaacaacactggaaaatagatgaaagaaatatactgaaatatgaaagagatgtactgaaatggaagcttccaaacgattggaccttctgctatcctttttctttttagaaaaatcatgcattgtgccattgcaaaggaattttacatgatttggaagcgctagtattttgttctaaaggtcaaaggagaaattttcctatatatgtgactttgttaccaagggcactttatcaaccttatgtgaaaagttcattttatcccgagcagtgcatctcacctttgggaagtgcttcatatgttctggggtaagataactcttcccgtgaggtcaacaaagtgcatttggctaaaggctaacggcgatggtaaaaagaaagaaaaaaaaaatactctctccgtttcaaaatataaacattttcagtatagtgataagtcaaatattttcaactttaactattaatggtgagaaaataaaaaagatcagtcatgtaaaattgatattactatatttatgttaaacaaactatctaatacgcaactcttttcatttgaaatatcttacttttatagatattgttgatcaaaatagtatcttggagactgtgtcagagtctaaaaatacttatattttaggacggagggagtatatgttatggcattttgtaaaactcacattcatctacggctattttgttgaatcaatcacatgtcagtggcaaaaagtagaattgctcccatcccgtcaatacacaattgcatttactgtatcccaaaaattgcctactattttgctctcagatttcatatctaaataattgatttggaaatcatttagagatcccaaactatatgtacttataaccagatagagtaacatgcatgagagcaaatcaaagcatatcccaatttgtaaaattacaaacctgccaattaatttcttcttatttagtgagcataatacatatacatgttaagatatcaccagcaattaaaaggatgctaattgaatcatacaattggataggtagcaattagcagcctataattttctacctgttggcagccacacccttccatctatttaaacgacctctactttgcttctcttttcaccttcacccactgttaaaaaaaaaagtttaaccgcagcagctgcagctaagctactagccatgaccatgaggaccagcagcctcctgctcgccgccgtcgccgtcgtcgccatcgtcgccggcgccacggcggccaccgtcgggtcatgggagccggtggacatcaacgacccgcacgtccaggagctcggccggtgggcggtggcggaggaggacaggggggtggcggcgggcgggctgacgttcgagagggtgaccgacggcgagaagcaggtggtcgccggcgtgaactaccgcctcaccctggaggcgtcgagcagcggcgccaaggacggcaggtacgaggcggtggtgtacgagcaggacccgcggagcaacgcgcgcaagctcgtctccttcgagcccatccactgatcgatcgagcagctagctctgcgacggcgaaactccggcgatcgagattgctttgattaattaccaaagtgtggtgtttatgtttttatttatttactcctgcatgcgtggataggcttggcccatccatgtagcgtgattgcgtgagatactgagatcaataagaggggagatttatattttcttatgttcgtaaggtaaaattgttgaatgaatggatggaaatgaaattgttgaaacaacattgatcatttatctccaggttcccttcgttctgccagaatccaaattaataaggtttcatttcttcattttttttaaaaaaaagtttttgagctctttagggtcacacacaaatacatgtctgtaatacacattgtcaaacttaacaaggtcagtcatttcctagcgaataggggccgtagtgttggccgttctgagttttggccggacgacagttgtaaccttatctcacacctggtgagtgtggacaattcagtaatctaatgaattccctttccccgaaaaaaaaacttaacaaaaatctaaatatttggatcaactgacacatgtataaatcacatgacaatttccggtgttattaaaaatttaaaatgaaccgtaaaaattttgacggcataaaacacaaagcatgtcacatttggatattataaaaaccactttttccgggaatccatacaacatattcctgtcagtagtgtgttcagttgacaggtttggtatctttgatcttatagaggttgggcttctctatactctccaatcacaacacttggattttctctacttgtggtctagaggtgaaagggttgaggatgaatgagtaaaattttaaacacacaaatacaactaaaccaatcacaacaaaattacatatttttagtaagacagatagttaggtgtatgtagaaaatattaataatattagatattaaaaacagagaaagtccgtaacttttgaacggtagatggccgaattttccattaagtatctattacttattgcatagagtatatacatattgcaatgcaccagccaaaaaattaagaaattgattaacaaggaaaaacatagatcaacaaagagtaaaaaaagacagtatttcatatgcgtaattcaactattttaattgatactaaatcatcatacatcaagatggatttggatccaataaatttctacctacttgaggccttaccattccccttcttttaaagcatgttcgagatggcgatcgaacaggatcctaaaatattaggggacccaaaattttcatactttaattcatgctaatatgttccagcatgtttaagacatacgttccatttcgtttcattttgtaaaagctttgctcttccttatttacttatttggctagaatagacttcttttcttcaggtccaataaatgttctatagtaatgcacggccattttaaataactatgactaaacatatatacaagttcacattctttggatctacctatctattatagagtaaatagttcttttcacaataagagttatccatacagtgacagtatttaattataaaagttaattggctaagtagctgaccctattagtcagtttttttaagataaaggaaaataagcctttatctttttattactattttctccgcttaatgaatagccgtttgctaccaatgggggaatggcttcttatttccaatctagatgattggatttgtaccaaaggaaaccagaaatttcatatatagtagaaatctgggatagagaagctcgtcctattcattggtaccgatcatgaatactttaaaaattgtcttatttatttgaacccatgatcaggttccatttttttcacttaatcaaaattaaatgactacagctagacaattcttcttggcaattgaaacgtgactctagcttgataaattatgcaaccttggtgaatacatatttgtgttcattcattaagtctattctttaatctacatatagtttttttaggttattcctaaatgatctacatatttgtattcattcattaaatctattcgttatttgtgcatttgagtaaatggacattgatgcatgcatcgatgcacacaagtatttataacccacatgcaatatatttgctattggctagaaaatagtggggatggtgcatacatggagtttgttgctagagtaaatatagtatgagagagttattagcttttcttggtcttggtgtacctgtaaaatatgtatatcaatttggaatggaggagtatgtattatgtgaagtgaaatttactcttctatttcttagcattttctaacattaagtcttattttatattttgcaccgggtctcaaatttgtatgtatggccctggcgccctcttctaagttatcctcgtaatctagttcaaacactttcacactgccatgaggaccgtagcatcctcgttgcaaccgctgtcgcctttaagatttttaatatcttaatattgatttgaaaatgtagaaaagatttttaatatcttaatattgatttgaaaatgtagaaactatatgtatttataacaagatttgtagtaataacatgcatgggaggggagcaaatcatgcatatcccaattaatttgtagacctgacaatgaatttcttgttgcttactaagcatattgtattaccaacacatcggaaagatataaagaacaaaataagtggggtacttcatatgcaatcaaccaacgatataataatcgtatgcaatcaacgatataaatggatgctaatcactaaaaatcatacaattattttttgaatctaaaaaaaaaccatacaattggaaagacagcatccaataattttcttccaacaagagccacactttattccatctatttaaacttcctctcttttgcacaagcagctagcctttcaccttcacacacactgtaaaaaaaaaaaaaagctcacaatgaggaccagcagcctcgtcctgttcgccgccgtcgccgtcttcggcgctgcctgcacggcggcggccggcgacgaatcctggaagacgatcgacgcgaacgaccggcacgtccaggacgtcgccctgtgggcggtggcggagacagactgggcgtcggcgacgggcggcctcacgctcaacacggtggacggcgccgagaagaggtttgaggccggcgtgaactactaccgcctcaccctcgaggcgtcgagccgcgtcgtcgccaagtacctcaggttccaggcggtggtgtacgaggagggcgacgagcacaagctcgtctccttcgtccccatccactgatcgaacgctagcagctagtcactccatccaaaaaacgaatctataattggatatgacacattagtacaacaaatctacacacaagtatatcaaaattcatagtactataatgtgtcatatccagtactagtttggttttttagggatgaatagagtatctgaaactatgagaggctgcgaaggcaaaattaattatggcaagatttattctttttcttgtattccctgtgtggatataccacacacgtccatgtccacgtccacgacacgatacacatccatccattcatgtattgtgacgtcgatcagtaagatgcaaattatattcagattttctattttgttgtcaataaaaaaatatgggagaaatctgttgatttttttttatcataggatatcgatgcacaccaatgttcgtgctggtcgttgggtatattcgtgcgcaacagagagaaaattgttgtgtgcgtgcgggggctcgatcacgcacacttgtttcttccactaagcagtggcatgcgtgtgtaatgggttagagcctttaggctgccctttcacaaactatcttagactcttagtccttaaatattctagcttaaaattttactaaatttcagcccaatccttatattttgtagactaagaggtagggctcattaccacccctacacatgcctacaagtgtacggactcgatcccacaaccttactatagttaaccttaaaatattaagatttttttctgtcgaaagttgtatagataattccaattatatttcttcacgtcgtataatctaagattgatgaatgcaatcgattttgctaaacatccgtcgggtgatttcttctctcatatttgatgttttcttggccataggattacaccgagattagtgcaggaatgatgacgtttctcgcttccatatcgctctctctctctccccctttcttttctaaataaaagttgatttctttatatgtcaaaaaattaagacatttgaaactaaaataaagaatgtaaaattaatcctattcctatataactaaaattatatttgtaaattcagttgatatgatatgtaagtccctgtataaaaattgttgtgcaagtaaatatgtatttgctattttctttaaaatataaaattacagtcatatataactaaattacatttgtaaattcagttatatgacatgtaagtacactatataaaaaagttgtgcaggtacatatgtattggttattttcttttatagtctgttggatgtaaatgtaagggtaaaaaaaaatctgagtgattttttttttagaaatcacccgataaattccgtcgcccatacgaacatgcaagaatttgcctcttatatatattgatgcgacgatctgtccacacaggacgagtacatgaaaaaggaaaaaaaaaacttcaacaatcttggatcatctgtccgctacgaaggagacgagcttgcgcgagttgattacggactacttgcgccacggcctcactgtccggcctccttcgccgtggcctccttcgtatagccgtcactgcctacttgcgccgacgacgacgggacgtacggccgtggtgttccgcgacggggaaccgcacacgtcccgccacagcgcggtggtcggcacggccatggtgcggctggtcgacgcgctggtgcacggcggcggcgatgacgatgacgacgatgacggcggtggcgggtactactacttcgccttcggctgggagtgggagaagccgctgctggaggggacgctggtgttcgacaagtcggtggcgctacagggggtggcggctccgccaagtggcggatccaccatggggtctctgaggtttcgagaccccactacccgtattataactatgagactctacaaagacctcactaaaattttctgtcatacgtcttttagaaaagagggctataattttatataatttgttcagaccctcctgttaatctttcctagatccaccctggctcccggagccgggggaggccgccggcggcgcagagccagcgaacgtcgtgcgcggcgtggtgcgcgcgcgtgctcatgttcttgacggtgcagtgactaccggagctcgtcgctgcctagccgcatttgcattgcatgctgtcagcctgcatagaacattcgcaatcagcaaggactcagatcacccgttttgtttgctctatgaaacgaattgccttcaaacttttggtttagctcaaatttactattgtcagcaggaaacttgacactatataagggtgtcagggtgatagacaaagttgttctgatttaattatgttatctggtttggctccaatttacaattgttatcatgaatcttaagacttagggtgatagacaattgttctgatttaattatgtttctttattgtggcatttggtactgccagtgttttcagaagcttctctctactatgctacaggaagccccacggagaaagatacaacctcatctctttgcttgtgtttatgcttatcagccaaaatttgaattttcaatcttaaatttaaagttgattttagggttttttttcatcaaagtttatttttcagcctttgcttttaaatcgttaagaacatgtatataaaagttttattcacaaactatttttcgtttgcaaatatgccgtttggcttattccctcgataaacgaaacaatgagggacctagatttgagtcaaccaaaataggcccaatttagcactgctatatcctctgctgtgggttctaacttttgccaggttggccgaagatgtggcggacgaccaatgtcattaagattgggaggaaaggaagtacaaaatgtgtgttacattgacaagagaatgtcgagtaggtccgaggcaaaatgccccggtcccgtgaacaaagaaaggcccaaaatctgcgcggaaaaaactgtagattcacttaattacattggggaatgattcctgccaactaaaatcttacatattgtattccgttttccaaatgtcaatggcagttgcatcactgcattgggttttaagaaaagggactgcatttatgacatcacattttgtacaccgtagattaaaaatcttacaatgtaaacttgcactgtaattaggataaaaacgattgattacctaaaggaaaagataagagagatagaaacatactcttttttttaggggaagatagaaacatacttacatataagcaagatagcaattaataagaagaaagtgactgaaatccagctaaaaatgtgatgtgtttttagcgaaactgtaaaatgggtaaataacaaagtcaaagggataccgaaaataatcctgaaaaaactttgcagttgatttggtaaaagatcatactacctccgttttttaatagatgacaccgttg

SEQ ID NO: 27830 - DNA, 2630 bp, Oryza sativa
aataagatgaatggtcaaacatgtgagaaaaagtcaacggcgtcatctattaaaaaacgaagggagtattaaaaaatcaagaaaatttcactcttctggaaatcagcaaggcaaacattaaaatgtctaaagctgctctaccgatggagtaagccactgcagcaacacgtatacgccaaaaaggataatgatatacagcaggtaattgcttctgtacagcaggaagatatgatgaaaccctcaagttaatgggcgtcgaatgcagcaggtaattgcatttgcaatagcactgtggtttaactattttctacatgaaatggtgcaacccggataaatcaatgtcgctgcaaaattacttatgaaacatcgtggtaaaaacaagacaacctgataaatttacagattacgtttacctagaactatggatatttgtccaatccacgatttatgtaaacaccaccagcatcctcttattttcttgcatgatgacgcatctcggactgggtaacctccggtaaggttacaatattgcaccacccccatcttccagaagcaggatgtgaaatagcttgtgtagcgtccatcatatatatgtgcatcgctcacatttgacacttgacagtacaaatatccgtagcctgagaatgatgccatgttaaaattctaacttctcatgtggagtctttctttggtgctggagctgtaggccctggtgggcgagccaaatttaagttttgcatctcacttgcaagaatcgccctcctttctttcaaaaaattgagccggtttgtcagcttggctaatgcaaatggcactgccccagattcctgaaataatagcaagcacatacaacggtcatcacgaacttcaatccacgaaagtggcagtaaataaccgcatttctatagaggatactagcagtatacttataggacacaaaaaggccaaagaaacatacattactatatcttgccgactagaagtgatatcggttgaggggtcagtgagattacctctgttctagtgctcgaataggcatttgatccaagcctgcctaacagtggattgtttgagtattgtttctgtgcaaggttccactttgatgtaaatgatccatcttggccatccttcataatcccacccttagaagataagatcctttgagccctttggctgatggtacttgattgttcattggatgcaatacctacgcaaaatcacatatttgaactactaagagtgttgtttctttggatttatttattttttaaaaaatgagcagggattatatttatcatattttgttgataattagtactcttttgatgcttgtggagagttggcttgtctatggaagaagatgaatgttgtgtggtttgcttccttgattgctcaatatctgcctgaaatgtgacataaaaaataacttaatgatagaattgagaccatgaataactaaaaacacacccagaactgactgcacactcattgttaactccatcgagctggatatttcctacgcaatctcgtctttttgcttggttgtctacagcaatgaaatatgcgcgattgtgatgtaacaaggatatttactttttttttcctgcacattttttactgggcacctctgcgcatattcaggcagacataactaatgtgactaactttgttacacagtttcaaaaacatctactactatgagacatgcacatgcaatagtcgtcctggatttggtgttaagggtataatatatatgccatgggcattttagtcttttccaatctattgtacaaaatatatgttcactgggcctaactcaattgcaatagaattcattccccattcctctcttcttctcctaaattaacatgtgtctctaatagtcttaccatgtctgtagccgatgccatgtcagacatagaattgggcccaacatttgatggtgaagtattctgttcatctctgcagaaaggtagcccacaagtatgttcccttcacaattctaattggacaacaaaaggctacataaagtgctaaaataccacagaacgctgaaagatattcttactcgaaaagcttgtctgtacttaggagtcgtttgttgcaagagtcacataatgaggtggagctcatctggacattgttgttgagttgtccacggagatcagaaaccttttgcttcaagttcaaaatatcagcttcagcagtagcaacttcctcaagatcagccttagtctttcattagcagaacaaaaaaaataaaataaaatggtgggaaaacacttgtactttaactcgacaataaaattttaaaaagaaaaccttgctatcaattgttgatgggaaggacacctgtcctctacgcaaattcatcagcccagactccaatgaggccctcaattttctctccttctgtagctgatcccgcaaattttccacctgttgtatgaaaaacaatttccgtttaacagagatttgcatatttcagccagatattgaagatgtataaaatttctggtgatcttaacataatgtaaggatttcttatggagataaagagacttaatcataaaatctacctggatgttctgtttctagaaaaaaaatactttcccatagtttgagctctt

SEQ ID NO: 27831 - DNA, 1671 bp, Oryza sativa
gaatcgtgtcaaatgagggagaggagaggggtatttatagtgtggagcttgcttgggagtgtggagaacctccatggcatccaatgagcatattcactctcctcatgccaagtgtccatttggatgatggttggagcgccgaaaacggtcataaccgtcattaggaagcagttatctaccgaactggacttgggccggggcgaacggcctctaccggggttcggccgaacccctgagttcggctgaacccgagatagctctgtttgctccagttttcgtcccggacactcattttgggcccctcaattcattggtatgaatgtttgtgtaacatactgctgtaggctctccggacctcccattatatttgagagatgaagtgaatagttcaagtccaaacaaacataacgaaacatgcgacgcctcgagagaagaatattgaagacattgctgggcctttatgtcacgcccggaaattcactagtaatttccgaacttatttgtgcataaaatcctcgtccaggaatcagccgaggtacacaaactgacaatttaatatacaaatccatcataataataacgttacatacttacaaaagaaaagaaaacagcagcggaataacgatctagcgatggcttcagctccactcccacaggcagctcaactggggtataagccaaacgtcttctccttctggatcctttatcttcaaaggaggtttgattgattattgcaagaatgagcatatgacatactcaacaagccacacagcaaatatgcaagtgcacaaggataccaaaggatggcataatataggctcatttgcgaaagcagcatttagcaaagagttaagagtagtaaaacagtagagtaattaattaaaaattttaatcaacactgaacagcacacccatgctgcacaggcccaaccatcctgaacaaccatacccggctgtacagatctaactccaaaccaggagctaagcaaattattaccaagtataacatccataattattgtgagaggtgtgagactaatcacgaaaaacattgctcaacccgcccataaccgcgggcacggctattcgaatagttttactctggccagaggtgtaccactgtacccacaagacacaaccccacatcatatcaccatgtgcctcaataccaccacggtacctcggaaaagagttgtgacaataccccttgcacaacataacccattacagcgcacctttcctggatcataatcacccccttataaacaaggcatggactccccagcgacccccgtggacttctcgccacttctcagtctggcgcactataatgaatcacgctatacaaaagataaagccgttgcccacgctggcttgtggttggcacgataaatgtttcacaacagtagctcgcgaaccggtccttaattgtcatgagcacgactctcaaaaccatgtgctcacaacccaccattatcaagttttagttggcaagtaattaattaaccaatcacgattaaccatcgtgaactatcattaagccatccttaaataatagtgagtcataagttatcccaatagtgtgctaatgtttctaagcatggctaagcaatcataactaatatctagctgaaccaatatataaagcccaactagtcaagttataataac

SEQ ID NO: 27832 - DNA, 71681 bp, Oryza sativa
atataggatcaacatgctcaaaggattgtgtttaggatctgtgtgacttggcttgcaataatcggtcttcaattaatcttctgaacacttctgacgcactcacgaaccttcgcaacgacggaaacgacaagctaacacgcaaaacgaagaaaaagactaataaaaaccaaataaacagtacatataaagtaaacaaacatgtagatcatgattttagatgaatttagcaacttgaaccactcaaaaccgagttacgatgatttagttatgaatttccgaagatttaatctattagaaaaaactggaaaaggagaagatgatgacgtcatgatgacatcatcaatggccggactaagatggcgacctcgccggagattggatggtcggctgcgactttggaggacatgaacacgtagaggacgacgagacgaacccaacggtactcaccctcgaaccaaacgacgaacgacgacggccggcgacgaggtctgttggcggcgcggcttcggtcgacggcggtgacggggctccggtgaccggcggcttcgggggtcaggcggccgggattctccacacctcggcgcaccttacggcggtgacggcgaccggcggcgacgacggaagcggcggcgcgacgcggatggagctcggccggcgacgacggcggggtggagcacgtggcggcggcgctacgaggcacgggagaccacgggagagggggcaaacgaaagaggaggactagggggtcctatttatagccttgaagagatcggactcctcccgcaagaaatcgatccgggaaaatcaaaaactcggttttggagataaactcgaaaacgagttcgattcggataagatactcaacgatttgctccgatttttgggggtaaagatagaggaggataagaggaatatttcccctcagcaaaattggagaaaaagagcaacggggaggcgagatttggaaggaagaggcggcggcactgtgcacggcacggctggctcgggctctgcctgagttggaagatgaacagtagcgcagggagggaaagtagacttttccggctgagctgagaggagaggaggcggctcaggttgggccggcggaagagagaggaaggaaaggaaggaatgggccgaaaatggcccaagctgaggaggaggattttattactttcccaattaaaataatcacttaaatgatctttgaattattaaaaatacttctaatgctcaaataatttcaagaaaaatcctgaaaatacttggacactcaaagtacttaacaaaattacaattagaccatttaatgattaatttaatatgtggttaattactgaaatgctctttgtatgattaaaaattaggaattgagctccgaaaaaatctgagaaaattccagagagttgacttaatcatggagaatttaataaaaaattaaatccatccatgctttatatttaggaaattttatttcccacatttaacttcacatgtaaattaatgaacatttaatataaattctattattaatttattaaataatttataaatcctgaaacgaaaatcaggatgtgacactttagcctgccagtcaacttcagcctgagatgtgcccatcaaaccactcgaaggcggcgaccagatgtgttacacattcaggagacttgacaaaaatggctaaagatctacaacatctcaaatattcttaactcatactcatgtgaagctagtttccaggatgtgcggatgtgcactagagtcacacattcatcttaagcatgattatacgtagcaaacacaaataagatgaaagctattatagactacatctactttagttacactggctgaccggccaaataaataatagaacagcggaagcttgtttacccaatccacaagcacaccgactaggggtttaccccattaagttcaaatcctagaagaagcagtcaaaacctgcatcactcaaagactaagtttaaaacctgcaagcaaaaggttaattcaacggcaagagtcagtacattatttgaaataatatactggcaagcaccaagacaagcctaacactctacttgtaaggaatattatcaaggaaggcataatatggttcgttttagcataaagcaagttttgtttgcataaaacacatttaaatctgatttgctttcaaatagttttcagcaagctagtacttagcatatgggcatcaaagtagacattaatcatgtatgaatatgcacctcattgccatccatggcagcaaggagatcattctcaaatctcatcacaatttgaaagtaaatttcagcatttagaagaataaacacaagtctatactcaacacatatccatatgccgctcataaccgcgagcacggctaatcgattaagttttagactctgcagaatttgtacagctttacctacatgatatgaacactctagtttgtttcgagtttgcaagactctaccacattctacacgttgaatataacatacccaagcctgtaaacctgagaactaaatttaatttaaatgcatcatgtggttttggagtgattttaattgtttttggatcttaatcatctcatcatcacatgcaatgataggcctagagtcacaaaaacaattaatctggaaattatatgcatccaaaaaaaattctacaaaaattctcaaaaataccttgatatgtcagaaatcaacccacaaattttcagaattttgtttagtaaggtttgctaactccttgatctactttaatatctccaaaatcctgaaaaactgcttagcagattcaaacttgctctccctgtaaaatttatttcaaaacctctttttgatgtttggtttcagccaaagtcttctactaactttcttctaacaccccgaggagtggcacaccctggatcactctctaaccctttcttctctccctccaaaaatccaatcagctgttaactgcactgtcaactgctgctaaccaacactgtcaacacatgttcattactccatcgaacctaaaccagagacttctaacccaacccacttcagcacatttactctccacatcacccccgaccaagaggatctctagcccaggtttcttgctgttgacagaaaacacgaggcctgggagatatgcttaactccagtgcaggtccaaaactcgcctttgggtatgctagcgtgccagttgatttgatcctgcaatcaacaagaaataacggcaaagaaaccgcggttaaacctataaacgctagccgatcagctaagtgccgatgacatatcatttatctttgagccgatgtcatctatgtatcgatcggcggtcataaataagtaagaaggaactagatctactcgatcggctgtagatattaacaatatatattccttatatcgatatatacttaaatcaagtgattgggataaatcggtcgccatgccgagacagtataaatcacttagatcgaaatatatattaataacgggattatatatgttcatagcatactcgatcaaatggatctaatatgtaccgactagtactctgataccactctatactaagatattaaaacaagtataatatatcaaacaaaaatctgatatacttaaatgcgacaagatcttaacataaatggcagatttaacatatccatgaagcatatagagcaaatatagttaaatcagataagatcggctgaaaccccgatactaccctaatcggcaaccagaaggcaggctagagattaatattctaagcacgacttaatagatcaaactcaactgatgcagcattaagtatgaaaagaagaacaatatctagacaatcaagccgctggaagtttcatagagtggtggatatcccatataatctaagtcaacatcgatgtttaacctaatcggctgccctctactgacagatgttagccgataacaggttaaatagtgatattgccaaagattatgtaagatatatgataactcgacgaattacataaacaagattagagtatcgtaaagatggaagcactaatcccgagaacgcaaaccatcataacaagttttacctcttgttgaagatcgaaaccaatgcagctcaacccaaaagcaagaactcatcgaaataaaactaaagcaaaagggtggcgatgcgccgaaattgtattgaacgtgtgtgtttttttattacatggggttcggggtctatttatacccgaaaattacaaactatgtccatatcggacacgactcttatctctaacaaactctaagataccataagtctttacggcagacttttgcccgaacatatctctaaggaaattacataaaacatcctaactaatagatacaattgccttatcaggactctatccatgcgtggcaatcatcttgaagcatatcaactcaacccgatatcacacaccaagttccattgctagaatcggctgtctcggctcacccagtctgactcggactcagccgatcctaatcgtagccgatctggactccagccgattctcactctgtttcaggaccgatttccgcccttgattctgcttcgatctaatcctctttttcgatgcagatattaccaaatttggtcgttaacacttgccccccaagtccggaatatttggtaatgtttcggatttgccctgtatcgactcctagctagtttcgcactctgccgttttccgaccattaccctcaacgctttaaatactaatcaccgccctgaaaaatcttcaccccgttacttccgttttcaccgccgaagccaacctcatcccctttctctccggcgatttccccgacgctcaaggcgaccccagacaatcccatctccggccagatctccgcccgtagtgatgtcgtcctcctccagcccatctaccacaccgtcggccgagtacgctgaggtaagttctcatcggctagatcccttttcttcgcatgaaatcgatttccctctgcctcatcttgttttcttcttctctatctttgttcgcatttgtagcatccctccaatctgatagcgattcccagcctatcgcacgaaaaccattactttattggtccaatcggcaatcttgaccccattgattttatcatcggtgaaactaacagaatcccctttctaggtcattggaagaatatttttaagtcttggccatctctcgagaaaaccacccctgagaagagttggaccacatggtacaagcgtgtatcggctagtaagaaagttcactgggatgagatcgggatcggccaagcgcttgcccttaccatagccaattccgctaaggacgaacctctgatggctgccgccacctatttctagtccaacaccatcaatgccttcttgttcaaccaagggctgatgactccaactttgatcgacattaccatgatcaccggattagatgtaacttcatcggctaattctatgagcatgaacaccaagaaccaatttgacttcaggaccaagagcataggtggttggtctggttatgtggcagcatatatgggccaaggatctgttactccttgagagcatgtggcctttttactcatgtggttgggaaagtttcttttctgtggatccagttgtggccctacaaccaattggcaatttgtagccgaaaccctaaaatcaaagaaacaacttcccttgggcaaaatcctcctcggctatctataccaaatattgaacaatgcatcggccaagatagtcgtcggctcagtagttggggcaggtggaccattgtggctgctgcaaacctagctaaatctgatagtcatgaaagttgtcaatcggccatccgtgacagaagctgaatttccaaggttggagccgattatagaagatgacggagaagaacgcacccatcgtaggtgcatgtcttatgaagaatatgcatccacaccaaccgttgccggagcaaaactatcggctgaactactcaaggattggttttgcagtttttatcagagctttcataaagatgcccgaatctggtttccctatgaggactcaatggacctagatctcccgtcagactttaggtttgaggacatcaatcatgaaaaataccaaatatccaaggaagttctcatagctgcaatcagcccatgcatccttcctgtcggcattcatcagggaataaacatccaagtctcttatgaattttaccacccaataagctcgactagacaacttggactgggtcaactcccaattggcttattctttaccgataagatccagtgccgaggagaaatctcatcatctttgatgatggatcggctgctaaacctccaaggaccccctctaggcagtattgataacattgaattggcaggattcaagagcagaaactttgacagatggtggggcgaatggaagctgcacctatttcatcaatcggcttcgatgtacatgatagatctattccctgatgtcataccccaggtaaaccttatcattattaacctgagtaattgtcagccgattcattacttgactaatctcttgttcttgttctgcagacaatcgactcttcccctccacgccaaagcaacagtggcagagacattgaatatgctccaggtctaattcccaatggaggtgggccatctccccctgtcatcggctatcatgcccccaggacttcaactctcctccaaggcctaatcagggaaccagccgatgcaggcaggaaaagaagaactaggtcattggctatggacgcattagctccagctccaaagaaaagggccaaatccaagaaaaccaagtcgactgatgacctgccttctttggatccatccatcgagcaagctctagatgaagaagaaattgacgaggctgttgaccaggctcccgctgatgtaagtgatactgaggaaacaccatcggcttcacccaagcaaactcctccgactccttctgcgccagttcatttttcaagataaagcagctctctttgatcccttttgtaatcacttcacttttcggccgatcactcacagagtttattgttgcagaagaagaaaactgctatgaaaaagaagccagcagcaacaattttcaaaccggctcaaccagtaagatattttaattcttttattagttgatatcagccaattttatctaacacttgtttcttttacagcatcctcctcctcctccttctcctcctggacaacaatcatcaagtgaccgaactccatcggctgtggggagtcatcatgttgaggaagaagtacaaccaactgctcctgctatcccagtaagttttcccttgatgcaagaaattagatcggctatatctacttagctctcaatcttcctaacattgtttctgcaggttttagccgatctcttctcttttgacattagagattatcttgatgaggcagaggaagatacttcgagcaaagctctagcccccttatccgatgatgtaaagaaaacacttgaagatatctcccatcggctagaggcctcctctttagatagcttagtggtcgactgtgggtcgattaggacacgactgcatgaagttcaagctctgattcccgaagaactggccgacgtccttactccagccgcttatctcgagcagcatcaattcaagctggaaaaatgtcacgcctagaaatttagcccaaatttctagactattttgtgtatttaatccctgtccaggaccagccagggtacacaaaatgacaagtaatatacagttccaaacgtaaataaagcgtaaaatacttacagcagaggcacttagtcctcacaccgaaagagaacgacagcagcggaaaaagcgatcctagcggggcttcagctcctctccacaggcaaagctcaattggggtctgagccttggtcttctaacttcgtcttcagctcagaagcactacacttctgaaaagggggaaataatagcaaggctgagtacaaccaccgtactcagcaagccacaccattgatgcagacgtacaaggggaacacaaggatggtttgtggctatttgtataaaggcggttgtaaaacattttattgagaaaaacagtaaaactgttgagtaattaaagtaacattaaatctccactgatcaacgctacaccacgttgaacaggcccaaccaacccacctgaactacagtgcattgagtcaatttattaaagtgggactaatcacggtgaatctggtcgatcgcccataaccgcgggcacggctattcgaatagttttactctggccagaggtgtacaactgtacccacaagacacgattccacacatgtcgccatgccccaaagtatcaccatgatactgcaaagggggaaatcgtgacaagaccctgcgcataaccctcccctaaccatccacaccacgctaaggtttcacccccacccctcaaaaggcagtgggcggtctctcttgcgccgcagtgaatccggcagctggacaaccggacaccccggccgacccaactccatcacgcccaccctcgccaccggtggctaggaaagggtcaagctatacttcagatcaagcaattacccactcccgcttgtggtaagcacggtaagtctcccagggtttcccgtgaaccggtccttaactgcaatgggtgcgaccagcaaaaccatgcacccacagcccaccattcagtcgcattttagttggataaatacgaccatgaaacatggctagatgtctcgaacacgcagctcattctgatcctaaaaaggtctaatactgcagttatcccatcaaatgagctagtggtaattaagcatggctaagcatataattctagctaggtcacataagtaacatgagctagtcaatttatttgatgaaccctgagttcctctcgacactcaaggctgttgttggcccgatctttcggtgagttgtgacaactacgatttgggagaaacgttgacgatccgactacaaccgtacgagacgttgtgttgcgccttagcgatcgatacacctctccgttggttgttgatcttgccggtgcagatcaaccctattcctgcaagcaaatcgaagaaacaagcaagaacaagataaaagcaatctgatattgcaaataggaatttaatacaaatgataaattggggttccgaagaacaagcagacggacggtctagccgacacgcgcgctgcaagcaagtagcaatggctaaactttaatctaacaaaacccgagaaaccttgaaggggtaactagctatatataggggtgggaggacgacctaggggtgcctagggtcgtgctccaccagcttggggcgcaccccacatgggccccacctgggccggggtcccaaatgaagttacaagcccataggcccattataggtgacgcaacacattgttcctgtgattctggccacacgagatggaatttagagaagaggctggatccgttagaaagagggctccgagagctttctatcaagtactcacaggccgaaaacggaggtcgtatgcagattcggtggccgtttgaagtcagcagtgtagtaggtggccgaatcggattccagcacttggagtacttgatctcgatatcttcttgttcatccatgatgtcagcaatgattgcatccgtggtagccatggtcacatcattattacccagggttgacaaaggacagatatcaagtaaacatggcacaagcgagcagataggtaatacccacatcccatgtaattagcaaaacatgcatatttatttgcaaacggtaaaacatttgtaaagtaggatcaaaacgctcaaggggaatgtgtgacttgcgttgcttcttcacttggatcttctgaacacttttcctcgcgaccgcgaacttccgaaacgacggaaactacatgttggcacgcaaaacgaggaaaaactctaataaacaccaaggaaacagtacataaaaagtaaacaaacatgtaaatctcaattttagatgaattttgcaagttgaatggtttgggcgattttatgtggtttgggcgcgagggcgcaggcgggagaggctggaatcgtgggcgacgtggggcggcatatgcgcggcatggcggcttcggctctggaggccgaaggtagaaggaagagctgacaagtggggtcttcgggcccacctgtcggcgaaagggggaggggagtcagggggttatttagactttacgcgaggggaaggtgaaatgggccgacggcttaagagaagagaggggaggccgactgaggaagggggaaggagaggggcgcggcccgcgggaggggaaggattcttgggccgaaaacggcccaaggaggaaggggattttttattttgttttctttttattttaattgataaaatgaactttgtgctattcaaattatttctcgagctccgaaaattcgcaggaaatttcagagagtttttttagggcacaaagaatattacagaatattcccggccaatgatttttaaaggaaaattttaattctcccattatttcacttaattaaattgaattaacttttatttaatttctagaaaatgcattatttaatgatttttagtcccgaacaaaaatcggggcgttacaaaaaaaccaagctaagactagccgaacgttggaagcgcaaggagattgaagccacaatccaagtcaatcgacagcttgtgcatgaagaaaaggtcaaacttgatcaactatttgagggtccgattaggtccaatattgaccggctcgaagctcgcaagatcgagctcttggcacaacttgaagaatgcaatgctgagctggacatagaacataaaaaaatagccgatctcccaaagtctgtcgaagagcagaaagcaaaactcaagaatgttgttgatctgaccaagtccctaaaggttatttctggaactgatgctcaagatgctcaagccattgaagaagtagaacaaattaggcaaagggctatttcagctatccagcaatacttgtcttggtgactttctgtgtaatagaccttagaaattttttgtaatcggctaagatactctagtactttactgtcttgacaatcctttgtgccgattaatacaacttctcaattcgcacaaaaattttcattttttgtatatatgtgcccccctaattctacaatgtcaaaagcgagaaaattataaaaacaactaagggcgatataacaatatcggccattgtacatcggcaaaccactaccgattacaatagaaaaacaactaagggcgatataacaatatcggccattgtacatcagcaaaccacaaccgattacaataaaaaaaaatctaagggcgatataatcatatcggccatctcaaggcgatgcaaacacatcggctatcgtgtattggcaatcatcagccgatcatgcattaacccaaacactagggtaatatttcttcaagtatttgccatttaatgctcttccataagacttcaccatcgagtccttccaacatgtaagcccctttagacactactttatgaatctggaacagtccatccctattcggcgaccacttgccaaatttgctatcccgagtcccaatcggcaaaatcaacttccatataagttcaccttccgaaaaatccttgggcaccactttcttgttatagtgtcgagcaattcactccttatccctagtaacctttgcaagggctcgcaaccgcgattgaaccagatcttccctcttatcggccataagattgtaatactcatcaactcttaaatccttttgtagttccgttctcctggagccgatccttgtctcccacggcagaacagcctcatggccataaacaagtttataaggagggacctagatcgatccatgacaagccatccgataagaccacaatgcttcggccaaccgagtatgccattgccgaggataatcagaaatcttccttttaatcaacttaatcaagcttttgttagatgcctcggctttcccattagcttgtgcataatatggtgaagaatttaacaatttgattcccatactatcggcaaattgaacaaactcatcggatacgaaaattgaaccttgatcagttgtaatagtttgaggaatactaaatcgtcatattatatgctcttgaacaaattgtatcgcatccccagaatcaaccttcttcaaaggaatcgcctctacccatttggtgaaataatcggtcgccaccaatataaacttatgtcctttactcgatggtggattaatcatgccgatcatatcaatgccccaacctctgaacggccatggtttaatgataggattcatagacgacgccggcgctcgctggattgctctaaatttctgacaatcttgacaccctttgtaatatctgaaacaatcttccagcattgtcggccaaaaatacccagcacgccgaagtaaccacttcatcttatgagccgattgatgagtaccacaaatcccttcatgaacttcaccgattgcaaccttagcctgatcggcactcaaacacttaagcaacaccccatcaatcgtccgataatagagctcatcatccaataaagtgtacttcaacgccttatatcttaatttccgagaagccgattgagatggattctgtaaatattgatgcacatcatacctccaatcatcggctgttattgctgcgacttcgaccttaacatctttgatcattgacttataccccgatgccccttgggccaaatcattagcttcaatattttgttctcgagatacatgcttcaaagtaaccagccgaaactccttcattaattcttagcacttctcattataaaccattaatgtatcattcttacactcttattcccctgccaattgactgattaccagcaaagaatcccccatgatttcaatagtatcggcttcaacttctttgagtaattgcaatcctttgagcactgcctcatactcagcttgattattagtttcataaggtttgatagtataagcaaactcgaaacatgcccccctaggggaaattataactaagccgataccacaaccatgagtatacaccgatccatcaaaaaataaagtccatggcacaatctcgaccgagccgattgaatcatcacggtgttccacgataaaatcggctatagcttgtcctttaatcgccttcggcgattcataccgaagatcaaactcagttaaggaaaatatccactttccaatccttcctttcaaaatcgaagccgataacatgtacttaacgacatcggctttgcagatgacggtgcattcattggacaacagataatgccccaaccttgtacatgaaaaatataagcacaagcataacttctccaaaggggaatatctagtttttgcatccaagagtcgacgactgaggtagaatacaactctttcttttccttcaagctcctgaatcaagactgagccgattaacttctcaccagctgatagatataatataaaaggtattcctttctgcggaggaatcaaaattggaggagagctaaggtattccttaatactatccaaagctttctgctgctctgccccccaagtaaactgctgaccggctttcaatctcaacaatggtgtaaaaggctctaaccgtccaaacaaattagaaataaaccttctaacaaaatttatcttgccgatcatctcttgtagttctgtcttgttctctggaggctaaatcttcttgatcgcattaacactcctttgagtcaccttgatccccctctcatgaacaagaaatctcaaaaactggccagccgatatgccaaaagcacattttgtcgggctcatcttcaggccatattttctggttctctcaaaaaccttcctgaaataggctatgtggtcttctatctccttagacttaacaaccacatcatcaatataaacctcaaccaaccagccgattagatcatgatatatgtaattcatggctctttgatatgtagctccagcactcttcaagccgaaagtcatcacaacccattcaaataagccgattgcaccaggacacctaaaagctgtcttatggatatcttcttcggccataaagatttgattgtatcctgcattaccatccataaaactcaaaatcttatgccccgaagcagcatcaaccagctaatcagctactggcattgggtattcgtctttcggggtagccttatttaagtttcggaaatcaatgcacaccctgaccttgccgttcttcttgataacaagaactatactagaaacccactcagcatatcgacaaggacgaataaaaccagcatcatataatcgtttaatctcaaccttgacaagttcaagcatatcggctttgcatctcctcggaggttgttggtgtggcctaatccctgatttgataggtagccgatgttcaacaattgatcggctgagtccaggcatttcataatactcccacgcgaagcaatctctgaattctttcaacagctctatcaacttggttgtgaattccgaggacaaattcttactaataaatgtcggccttggccgatcacctggacctatatcaatttcttccaactcatcagccgacatgaaaccctgtccttgtttgtcatcgagatcatctactgtgtcctcggtgtagacgtttgaaccctccatgacgccctcaaaataatagtttgggttctccatcttcaattgttgtatatcagaatcggacacttttagaaaatctccatcccaaacttttccagataaacaatcaagaccatccatctcccaaagagctaaatcggcactggcaacattcactgacctgttggctggcacaatttcaatcttgtcgccttgccactaaatcaagcattgatgcatggttgaagaaatacaacaattggcatgaacccaatcccttccaagcaacaagctataagaacccttcccatcgatgacaaagaacgttgtagggatggttttcttgccgactgtcagctccacattcaaaactcctttggtttctgatggattgccgccaaagtctttgagcaccatgtttgtcttgatgagatcttcagcgtttctgcccaacttcctgaatgtagtgtaaggcatcaagtttactgcagccccaccatcaaccatcatcttggacatcggtttcccatttacataaccatttatatacaatggcttaagatgccaattctccgacccctctagtttctcgaaaactgcctgctctggtgacaaaattaatttagccgattcttcttcaacttcgtcgatatcggcttgcttgatcccaaactcggcaggcaacgtgaaaaccatgttgaccgaagcagttacaacactttttcccttagccaaccttcttgcttcatcggctgtggcttcatcggctacaggaacttgattcttaacacgccactcctgcctcggcttcgttttcatcagccgatggttgatttcctgctcgacttccaaaaagcgctccctattcctcaatctttgaacccttctcttttgattcttcgtaaagataccagaaggacaccattgagtttttatgttttcactgtcctcctggccacgatcttggtttactggacccaatctttgatgaacaggaactcttgtctgccttagccgactgcccctactaaacaattggcttgaactctccgcaatatcactgcacccaggacagtcctcaatagatggcaacctcataccttcattccaacaaaatataaagaactcgcaactccaatgaggatcaaagccatcatcatcttcttcataatgcctctcctgttgtttatcatactttccctgatatttgttaataatcttagccgaatttacctgaaatcctatggcacgacccccatcggctgttcggccagctgtatgcaccatattgacaggaaaaggattgccatcaactttcatcggcctcttagaatcatcaaatttgattttacctccttcaatagccgcttggatctactgcatgaagaccttgcaattattagtcgtatgaaacccagaattatgccacttgcaataccttttcttgctcaattcttcagccgatggaattgtgtgaccggcaggaagtggaatctgcttctctcggagtagcaagtcaaaaattttgtcagccttggtgatatcaaagtcatacctttcctctttccctgagttctttacccattggcatggtataacatttttacttcttacccatttggctgcagctatctcatcctcatcatccgatccacatacataaggacagacatgattaatctttctagaattatttctcgcctctgcaaacctttgttcatacaaggttaccttctgtgttagatgggacaagctttcaaagtcttcagatgagaatttctctctaatcggagcaatcataccctgaaaagctaaatcggctaattgggcatcagtcaaacttaagctgtagcacttattcctcatctctctgaacctctgaatatactcatgcataggctcatcatgtctttgcttaattgccgtcaaatcagacaatttcatctcatgtaccccactatagaaatagctgtgaaaatgcttctccaaatcggcccaactgttaattgacccatatggcaaagaagaaaaccaagtgaaagccgatccagacaaagacaaccgaaacaacctaaccttcaaggcatccacagccgatgcttcaccacattgagctaagaatcggctaacatgttcataagttgatgtgctatcttgccctgagaactttgaaaaatctggaaccttgaaccggttaggtagaggaactctctcaaaccattcaggatatggctgtcggtataaatttccagcatctttcggcctaagcccaaactgctccttcatgacatctgcgattagatcggcccatggttgttgttgaggcgttccttgaggctgctgtggcatgggctcaaattggttgtactaaggaacaaactggggttgagccgattctgcctgctggtattgaacttgaggtgatggcggctgatattgatagttcaaattgaccccttggtaattctgaagatccggctggatgttgcgcaccaaatgctcggaaataacctgaggtatcaccgtgccatctggttgtacgtgatgaactaagtgctctgggacagcttgatttgcagcatgctgcataggctgaccaccaagcgttgcaaaccaagacgatgcattcattgagccttgctgctgaatcggcagaacaacctgttgcctaaatggcgtctgctgaatcggctgcaaaacctgccgtctcggtggcgtctgcttgctgagttggttccacaacctattggattgggggtgtttgttgaatcggctgcacaacctgctgccttggcggtgtttgctgaatcggctgctgctgggttggatcaatggtgtgttgagggggtaagaacatagatgcaacatggtcctatgttagccgattcacattccgttcagcatactgtggtgtttctctcaccaacaatcggggattaattaattagcctggagccgaaggtggtgcagcagatgcaggagctggtaatggtgccgtcggctgagccgatggcgcattaagtgggatcgactggacaactggttgattatcggtgattaatggccgataattcgggaatactccccctggtaagtaaactggtcctgtagcttggtattcggccattgaaccatcaaccattgatttcaccatgtttgccaaagtattggtcaatattccagattgattgatctaagcatggtgtacagcataatcaacctgatcttggaagttgttgaactgcaactgtgctgtattgccatcttgattagggccttcaccttgaactccctgagtaccatcaccttgaactccctatactccttgagagttatcaccttgatttccttgagaaccatctgaagcacctttgtcactcggttgagccgagccatctggagcttgtttcacctctccgtctttggaagaaccagtcccaggaatatcagcaactacctttaccttatacttctacaccatcgttcccttgcgggtttgcataaatgagctcaagaactggttgcgtgcctgctgcatcatcgcttcaaaatccttcttttgatcgggtgtcaacttgtctggagcgatgttcacgatgttgccttcattaacctcagataggcccaactgctgtatcttatctttaatagaactggggctagctgaggacggtgataatggcggcttgtcatccatgagagaaacctttgacttctaatcggtcccactaggcatgccaaaagcgtgttgacggaagacatgaggcctgggagatctgcttaactccagtgcaggtccaaaactcgccttcgggtatgctagcgtgccagctgatttgatcctgcaatcaacaagaaataatggcaaagaaaccacagttaaacctataaacgatagccgatcggctaagtgccgatgacatatcatttatctttgagccgatgtcatctatatatcgatcggcgggcataaataagtaagaaggaactagatctactcgatcggctgtagatattaacaatatatattccttatatcgatatatacttaaatcaagtgattgggatagatcggtcgccatgctgagacagtatgaatcacttagatcgaaatatatattaataatgggattatatatgttcatagcatagccgatcaaacggatctagtatgtaccggctaatactccaataccactctatactaagatattaaaacaagtataatatatcaaacaaaagtctgatatacttaaatgcgacaagatcttaacataaagggcagatttaacatatcatgaagcatatagggcaaatatagttaaatcagataagatcggctaaaaccccgatactaccctaatcggcaaccagaaggcaggctagagattaatattctaagcacgacttaatagatcaaactcaactgatgcagcattaagtatgaaaagaagaacaatatctagacaatcaagccgctggaagtttcatagagtggtggatatcccatataatctaagtcaacattgatatttaacctaatcggctgccctctactgacagatgttagccgataacaggttaaatagcgatattgccaaagattatgtaagatatatgataactcaacgaattacataaacaagattagagtatcgtaaagatggaagcgctaatcctgagaacgcaaaccatcgtaacaagttttacctcttgttgaagatcgaaaccgatgcagctcaactcgaaagcaagaactatgtccatatcggacacgactcttatctctaacaaactctaagataccataagtctttacggcagacttttgcccgaacatatctctaaggaaattacataaaacatcctaactaatagatacaattgccttctcaggactctatcaatgcgtggcaatcatcttgaagcatatcaactcaaaatgtcacacaccaagttccattgctagaatcggctgtcttggctcacccagtctgactcggactcagccgatcctaatcgtagccgatctggactctagccgattctcactctgtttcaggaccgatttccgcctttgattctgcttcgatctaatcctcttttccaatgcagatattaccaaatttggtcattaacacttgctgcacaaaatcgaccatgaatcccctccaaagatcgttggcaggcaaccctctttgacttagcctccaaggctattttcgaatttctttcactgacagtgggccccacaccccctgggacccacatgacagcctcccactctcccctcgcagcatccaccgtcccccatgcccgatggatgcccaaggaacacaatgagtgcaccagccacctctctctctctcaatcccccactccactcttccttatttcccaagccaaagcaccggaagcaacagcacactccccacactcgcgttccaagtccaagaaaacaaaccccacgcacagaatgcccagagctcggccatcttccccggctccggagacttagccgtcgtcgtcgtgcatccccggtgagtccctctctcttccctcctatggaacgtgacctacgcatcacgccgagctcacccgtaccccttttgccctaggaccaatctgtcgagcacgtggtgggcaccgtcctcgccgccggccacctgaaccgccgacgccgctccggccgccgttcctcaccaccgaagcaacaccaagatccggtgagtttctgtcggattcctcgcgcatgcaccctctgtggctcatccctaacacccccatactctcgaagttgcagttcgcgccttgagtcgacccggcgacgtcgatgccggagttttgccgccgttggccaacaaccaccgtctccgccactccctggacctcgctgcctctgtttctctgcttggtgagcaccctggtaccatatgagagcacatgcactaaccctttgcactaaccaagcctctgcatgcacatgcatgggcataccgagacacaccgccgctgtagctcatgttccatgggctacagaccaccattgccctcaccaccaccactggcggatgcgcaagaacgttctttacattttctcttttgtgctcgaaccgattcgatccgtcgattgccgccggtgaggcgtagaccgagctcagccatggctgctcctgatgtgagctagctgggaacttcatttcttgaatttgatcgactcgatctagggtccaatctgaaaactgccatgactcatattactatagcaggaccttgatggaaataaacaaaatcatagggactcttaataaagtttgctgtccaggtggcagaagaagtgcgggttgattcccccaacttccgagggcctctctgcaaatctcctttcactgtcctgtggacccggctggaattcaatttcgaaaattgatttctattttggtttaaagcagagaacgagcagaacttctaatatttgtagaaaattcattttaacttcaaaaattgtgaaaccacttctgttaaccttctaaaatcattctcagtaactttgtaaaaggaattttgttcatttctgtacaaaaatgttgcttaataaaacttagccctttttaaacctttttaattgtaaaatgcatatctctgtaaataaaaaagtgacaaaataaaaattccttcaccagaaaccacctaagaccagcacacactcactgcataagtttcatgcattttggtttttatgcatttttgtatttatcgtatacgcgtattttgtatagaggaagaatacgtcgaagaagaagagggtgagtttgttgacgaccaggttcaggagtttgcagacgaaggcaagtttgcccctcctttgaccacattgatcctatgttttattgggctaaatgattctattgcaaacatgcatacgttagctagtattaattttggtaaaaaaaattatataaatgtgggaatggtagatatgacctaattgctgcataatccaccttgaaatattgaatccatgctggttgtaaccatagagtgcttttgaatacaattattgtgttctttgggattatactatgcttatattgccgctataaccttatattcggttaccgccttgcaaattactcgttttgataaatgttatatgtgaaaatggttattttgatgttgctggacagaaatttaaatgtgtgagtattgtgaactgaaaatggagataacttgttttttagacttgggcggcgagtggtgtacatatggtggtagttgtacaccgatagggggagcgtttgcctggatcgattaaggaccccactctatgtcaccaactaatgaaaacagtacaaaccacatatgctaagtatgggctggcctcaacctattaagttgtttagagtttagccttgcatcttggtaggccgaagggtatgggttaccgggttttggtaacttatcggaacttcctatggtttgtgatatgatgaaattgattaatgacatgtggtatgtgatgatttgagcgggtagtctgtccaatacaatggtgtcatgcctcgtgagggattccgggctgggttccttacggcgctaggttaaagcgtgggcccgctacctagtggcgctaccttgctagtagcgtgggtaaaacacacatcgtgctggtgcaaggctagacaataaacaatgtaacggtttcgttatgacctctagatcacactcaatgtgtagagtctggtgataccgacgggtatcggacaaactagagcgatccatatcatgtgggcttaaaagttgtacaaactctgcagagtctaaaactaatcgattagccatgctcacggtcatgagcggcatggtgaagtgtcatgagtatagttggtgattttgataaactcttgtgaacttggaaaatggttggaatgttttgtttatgaacttgggtaaagttcggtgaatggtgatgagatgatggcgagtggtgatgatctaccttgagggggtagatgtgtgttatttatccatttacattacaagttttacttactctatactattgttataaaattccgttgcgaaacatgttgtgaactaaaattggcatttatgcaaattaacctatacacagcttatccttgaatatggccaacatgtagtatgctaggattgtttctgacttgccagtacattaatttgattaatgtactgatttcttgctttcttttacttgtttttgctcaaaccccgctgcagttaatgactgtttcgatgaggagtttgatgcagcttgtgatgttgcagatttccaggatggttctaactagggatttaccctagtcggtttgcctatgggcttttgggtagcacgcttaccgcatgaaccaatatttatggcttgtcgccaagtactacttagaaccttattaagactatttatgcttattgcttagaaccacttattattttgatatcatgcttgagatgatttatgtgagactatgttgcattcctgggcgactagtcccacatgaggatgggtttgaaatggttgagataaccagggaatatgcctttgttgagatcgagtctctggggtacgcttttggtcgccaccatcgagtggttgacggccatatgacataaatgactggtgtggctattccaacggttgtcttctatttcatatccaatggcttagagcctatgtagtgcactcttcaagacatgtcggggtctgcgatgaggttggatggttatcgtatttatttgggctttatttgagaccccatccatccagatatttcgcgctgacatgcctcggagcgttgcaccacctaggctttgggacgtcctcacattgaatgtggtctagaggtcataacgaagcctttacattatttattatctaatccttgcatgagcacgatgagtgttgttccacactaagtctagaatcttaatgtcattatattggaggggtctttaccaatataacgccataggcaagccgatacagtcgcttcctatgtggcactcaacgttgtacgtgaggcggaacattacagtcgtcccctcacgcggaacagtatagtcgttccctaccaaaccataaataaaagtgaggcgaaacgttacagtcgtcccctgataaacatcatacacataaaaggcggatcggtacagtcgtcccctttgcataaacacaaatagccctacagttcactcgtagacactatcgctactacaacggcctccctaatgcaaggatagataataaacaacttaatgagctaaggccatcccatactagcacatgtggttgcacggtatacataatgaacatacattgagtgaaaaccttaggtcggtttgggcgcacactccccctatcggtacacaactaatcaccatatgtgcaccacttgaggcccaaacctaaaattcaagttttccatcattttatttgtcaaatacttcatttattcatctatgtccagaatctaaataaaatcatttttcatgttaatatgagcccaagtgataagtaaaatcattctaagcatggctaagaatatagtaaactagtgacaatgtaactcatattccaagtagtaataggatataattactaaggttaggaatgagtgatatggatatatgtggggttaaagtgataatgcaagtaataagagtttgtctaacaagttttacaaaattttaatgtattagtgtacaatcgatatgcaagatttgcaaacattttcaataacctccaaaaacataggatcaacttgatcaaagagagagggaggtgggactttccttgaaactggaaaaaatcagcacctaaatcacttcttcaccgtttaagcaatcatctaaataaagtacacattatgcaattaaacaccgaattatgcgaaaaatccaaaatgctctaaaatgcatgatttgtgcacagtggataggtactggtctaaaatgaatttaggtgaaataatttctattttatctctttttatttgggagttatgaattttagaagtttgcttcggtataggatattatttgccaaggtagtgttataaaatattaaaatatttttacaaagtgattcttattaacttttactccacagagatgtagggaagtattttctaagactaacacatttggtttcacaatttttggagttataatgattttcttatgaattttacaagttataacgtgttgtatgcatataatgttttacatgcatatgtcttgagagctttatatccagaacataatacttcttgattgagttgagtaaaaggaataatttggttaactaatccatttttagttcataagcttatggtcttattatcgtggtttagttcataagcttatggtcttattatcgtggttcatatttttatagactaggggagatctagtctatgctagtacctagaaattactatatgagctaagttcttctaagttttggtggatggggatagaactatggctccactggtcctaataagttttatttggatttatttggagctaccatgcatatatatacttattcatatgtattgtttaaccactattatgtgtttagtacctatactaccaaattaaggtttagagctatggtctgaacagaggttgccatatttcactctactaggttgaagtatattacttgctggttctatagaaatttggttcacttcatttagactaaagatgaattttctacaaaatttacaatttaaggtatgctctatgttggttatcacttacataaatatttagaggcttttattacacagtaagtatataattttatattataacttggaagtatatgttttggtaattctacagaacttgggtttactcaaaaaggatctaacatgaattttatataaacttctaaatttcagcccacagaaaactaattattttgtttatactagttttagagacattaggtacaaagtaagtatattatcttatttcactttacagtggagaataagttggtgattctgtcgaatgtgaatttaccctaaaatgagttgagatgaattttgtatacattttataagtttatgtatactttatgtatgatttatcttatatgaattttagaggctaaatttgtactgttagtggaagtttttattccataacattaaattacataacttggtgagttcatagaaatttgtttcatctaaaaatgagctatatttaattttatatggattttacaagttttaggtacttttcttttataatctcggatttttgtttccaaagggtccactgtcagtgatttgcgaatatgcagaaagacccttcaggttttctaagaataaacccgcagtcctaggcccatatgccattgagtggaaaagttacatattgaatcttggaaaaagtacaaattacccctccgaactatcacggtcgtccgaattaccccctaccataaaaccggacattcttcacccccaactatgcaaaccggacgaattacccccctcgacccaatccgcggtggttttggtctacgtggcatacgcgtggcagtccagtcagcaacttatttattaaaaaataggtggccccacctgtcagttttttttctctctctcctatccccctctctctcttctatccctctctctctcttctccttcagagttcagacgcggcggaggcagcaagcgcgggcaggggcgaggtgaggtgaggcggcagccgctgggaggctgcgtgctgcggccgcatcgacctcgggggcctcccggtggatggcggcggcgcgagacgagggagcggcggacgagcggatggcagcgcgcggggctgggcgatgggcaggcggcggtgcgagacgagtgggcgggcgctggacgatggacgactgcatgcagcggcggaggcgtcggtgcatggcgacggcgcgagacgagggagcggcggacgggcggacggcggcatgcggggcagggcagtgggcagcggcgagggacgaggaggcggcgcgagacgagggggcgggcgcgggcggtcaacggcgcgcgatggcggagcccgacctgggacacagagctggcgggcgcgcgaaatgaggaggcggcggcgacatgggacacagagccagcgtggcgtgggatgcggcagcgacggcggacaggggcgagggcggtggctcgcttgggcggacgagggcggagggaggggaggggtcgcgacgaggagggagatcgtaatggggaggaacatgcacacgacaacgttcgcggtgaaggagctcgacacggacgacgaggagaccgaggagcgggaggccgccatggctagcatcctcgagctctaccgccgcaacctcatcgagcgccaacctcatctaccgccgctaacagccgcctccgcgcccacccgcctccggcctcgtctccttgtctaccgcacgcagccatccttgccgccatccgcccgccgccagcagccatccccaccgccggccgcccgtcggcgtcggctcctcgctagcccgccgcccgcagctatccggcccatccccgccgccatccggcctatccccgccgccggccgcccgtcggcgtcgactcctcgcccgcccacagccatccatgccgccggccgcccatcggcgtcggctcctcgcccgcccaccgcccgccgccggccacccgtcggcagtcggctcctcgcccgcccgccgcctgctttgttcaccgagagagagggggagagaggagtgaaaaagtaatgctgacaggtgggccccacctgttttatttgttttttttttgctgactgtaccgccacgtgtgtgccatgtaggctgaaaaccgctttgaatcgagatcgggttgtaatttatccggttttaagtgtttggggtgtcaaatgtccagtattatagtttatgggggtaaatcatactactgcaatagttcggggggtaattcatcatttttccttgaatcttatagttgtttaaattctcgaaatgaggtccctgtctcagtacagaggcagagcaaccatggctgagctcgatctcgggctcgccggcggcgtttggtggcttggtggggttgaggtcaaaagataaaatgaatagaacgttctcgcgattttattcctcttcgggtggcagtgcatgtgcgcctacagctatgtagtgttcaaatgggtgcatgcatgtgtggctacgaggttcctggagactcactgaaggacacactagggtcggcgatggctggacagtgacgatgacccgagaagagttccggcggcggcagagaatggcatggcgacggcgtcagcttctcctggccttcgggctgtcaaggagaggaggggaatagcttagagagaacctaggatgctttagatgcgaggaattgcgccgaagctctcccaggtttgaggaattgacgacgatggccggcgaccggagttggagaagacggcgatgatctccctcgtcggtgcacgattcttggggattcttgtgggctttagcagaggagttcatggtggtgtttgtggggcagaagctcggcttgagatccaccggattgacaggaacggcgacgcgatccacggcggcgctccaggcttgctccagatcagcgatggcgaggtccgcgttcccgaacgtccactgcatgaaatcgactgaacttaaggggaacggaacctgcactgagaggagacaagggaacggacaagagatcgagacaaccgcggctcaataggcgatgcgacggtcgtcatccttgcggccggcgatggagttatgggcggcggagaagcagggctctctctctcggtttcatcggctcaagagcgagagtgaatgagaggtgacgcggctttgagttttggaggagaagctttcacgctgccacgatagtgaacacgcatcgagcacccttcttgccatcgatctctctctctcgcctgtgcttgccagttgaagcggtggaggaggtaatggacagggttgagctagccttaggcactgtcgagtgggcccagatcgatggaaccaaggctacggagagtgagatgggtagaagtctgagtgaacttgatttttagtttaattttcggaattattttctcctctaactttgtaactccataatttaatgtgtggaccagattaattagtgtagataattagtgtagattttactgatggtagatgtttatatctagattccattttctttggttacacccaagaataatgggtagactgctcacagaaattagacaaagatgggctattcaaaagttagatcaaatttttaggagacctaaacagaagataaaaattctaaaaaatatatatttattcatgataagtaatctagtatttaaataaattatttaccatattcacttatgtgcagttaaatgtacttttggatgaagtatggctttagtcgattaaagtttaatttgatttcttatagttgtctgctttgactgattaatttgacgcatcaaacttagttattaatttgtaccaatattacagtgaatttcttatgctaaacatagtttacataaattttccatgattttatcttgcatagattattttaaagaattagaatgacctttctttgtatatgtgttcctacttcataaatgcatctaatattattatagggttttttattaaacttcttttaagctgagaagatgatatttgagtttaaccttaagtccacatgttatcttctcaaagttagctatagatatgcttagtgaaataattcttttaggttatgctcatgaatcctaacatgagatgcaaaccaaaatccaaatacttaaggacctaagtcaagtcatcctttatgcatatgcgtgcacacatgtatgattgcatttatgctcaggttaggaatgaaaaggctttatttgtttctcaaattttatttatgcaatagcttaggttggtctcaccacctaagttaaaacggaaatttttggctcttaaaattgtagaagttagcttataactattttgccaagaaattttaagtcctaaaatttcaggtatgtgacacataccaggattttcatctaggaaaaattttgaggaaaatttaaaactttttgaaagctaatgcaattgagaatatattagttggtaatagagttaaaatcctgtaaatagaattaaaacacaaagttttgttggaacaagattagagctaagccaaaatttgattttataaaatcttgagttaacaaatctcaattcaaataagttggtttaaccataaaataggaatttaattctttaggttctgcatttctaacctaagcaaaatatttgtgctaaatagaaacaaatggagatataagatttaaaataagcaaaacttaaaatggaaataaatagacttggttgtatgtgcattttattattttaggttttttttggatattcttggtgcatctcataataggtttcatatgcatgtcatttctaaagaaaactcctaaaaataaatcaagcaacaataaattgcaccaaaattctcataaatactaaacaacatcctaagtctacagtaattttagttttaatttatcacatcaattggtacctcaaatagttccaacaactcacctagaaatatggaaaaacagcatatcatttagcctactttacaccttcaccaaaatttaaccataacttatctagctaaaccacttggtcagaatgttaactgtagtatactctaccacctggtgaatgacttaattaaattcaaaatgtaaccatatgaaataagaaccacaagttgcttaaacaatatttagactgcagtcaacatagtaactttactaaattaccatggtaactcaaaaagtaattaaatcttgaaacttggcacattgaaccatcaaatccttgtccactttgcagcaaccttgtctccccaaaattctaaattaaatggaagagagaagagggattaaaaccacatattagaataaattcaacactttgaaaatttaaagcttctaggcctcttgttctatttctctctcttacaagtgggaccaagccattgtgggacccatgtgagatcctcatcacagccaactcatcatctacatacttctcatttaatttatttttcatttctcaaaaggtgagagaagagttaaaatacaattttcaccaaattcataccctacctcactaattcttctaggaagcatctacatggacccacttatcattcacacatcagctatacaccttagttaaaaacactccattgatctttcttttgtttaaatcaaagacaaagaaagagagagggagtataaatcaattttcaccctagaacctaaccatacctcacatcttctcctaggaaatcactaaatgagaccacatgacagtcattataactacattgggtaaggtataagtggtagcacagcctaaaccatgccaactcactcaaaatcgtgtcaacaccacatatggacacctagctttcaccatgccacctcaatcttcaccattaactaaaccgactagccacagcaatattcgtcacaccctcatcgtgttccactaggcaaaacactacgaaacctcggagaagcctagaacatctcattcttctctcaatccgaaggtgtttgatccaatcttagagacctctggtgagcttcgccgcacaataatcatggaaaaatgatctgtaaataatgcctaactcgttcatgtcctttgttttgcctgttgcatggatcgaacatcttgtgtcgagctcgtcggtgtcctcggtgtccagagcgccgccgctcgttgcgccgccgttcccgtcgatctcgtccatctcagagcaaaccgctgcaccatcatcttctccaaggttccaggaggaggccatccaagcgaatcgcgctgaagagccgccgacaaagagatccttactttcttcctcaactccggccaatcgccgccgtcgtcgattccttcttctccggtgagctcaaaacaaattcctcgcatatggagtatccctatgacctagctaacaccgagcaatcgcatgcatggcagctcgttgcgggaattaagctagcgtcgtcttcccggagtttttgctgccaccgccatgtctctacgttgtcaggacctccctagccctgtgcacggtttggtgagcttcttggacacccttaaacacacatgcatgcatcgatttgtccagggcaagctcataacttcatatgtatcgtagccttgaagccactgccgctcgcgctgcctccggcatcaatcccggccatcttcggcgacaaggcgaacatcgtcgggtgcgcaagagcctggcgcacttttctcattttgggtgcgacgtcggcctcgccgccgttcgccgccgacatcgacgtcaagccgccggccggtgaagctctgatgctgctgctgtttcctcctctgccgagcctatgacaggttgaccccacttcattaagcaccaataactgtaattagaaaatagtttaaatcggcggccggtcacatttagcggcggccggtccggtactaaccttctccggtcgtgtgtgttggcgctgtcggtgtgtgggtggtggtttttattttcctttttcctgattacgaccctctagggttgtaatcttgcaattttttccttctctatagaaattcgcaccgtcttgtgcgagccgttaaaaaaaagaaaatagtttaaatcatgtagggttctatttgtaaataactagagcatgacatgtgggacctgaatctaattataaatatacaaaaacttgagcactcttaatgaaaatagaattagacatgtgctagggacgtcgggacctaatcctagaaactccagggactattctgcacattttcctcactgaccggtggacccaatccttttaaaatctggaaaacagtaagaaaaatactcaaaccaataattgttcaacagaaaaatgaccaaacttgtaagatgcatataaaatccattttagcccattttgtgatgaatcaaatttctgtgaactcacaaacttatgaactttaatttagaaacataaaacttggcacttacagtagaagaaatagctctaataattcacataacaattaatgaacatagagcaatctctaacttagaaattcatataaaattcatcttaacttaatttggagtgaaccaagttccagtgtgctcacaaaatcatacgcttgatttacatgaactaaaacttgatacgttctgtattaaaatcatcaccaactatttaattggtaaaataactaggatggtgtaaattagaaactatcaaatccataagtaattcattttaactccaaatgggcaaaactaaaatttttttagtttcatggaggcatgtacattagttctgtaaacaaatcttagaagaaaacatatctagaaacatcactaaaacttgaataatgagttaatattaaagaacggtttagaaacttctgaaattcatatcaaaatgaatacaactgcaaatgaagtgattccagttctgttagattggcaaaatcatgtacttagtttttataaattaaaatatggcacttacagtacccaaaacttgtataaaatttgaaatagttaacaactactataataaatcacttagcttgtaaaattcataataaaatcatgctaactttaaaaattatgaaaccaattttgttgaactcctgtgagcattcccttcactgcagcaagctagaatttcacaaaacttgaccctaaaatgcacctaaggactactagagcttaattgatctagtgctagtattaaactttgaaaatttataactccctaatgcaaagtaataaaatataaattctttcacctaaattcatcttagaccagtacctaaccacactagtaaactcatgcattttagagcattttgaatttttatatgttttggcatttatcgttaccgttatttcttttagatggtgaattcgttatcagtgaggtgattggatttatagctaggaaggtctcatatcaaccaaggcaagtgttgccattcttttgaacatattgaatcctatatttttgggctaaatattttgattgtaaagttgcacgcgtaattctgattaacggtactttcaaaactatagattgtagttctacctttaaaagatgcatgaatcccctttttaaaatcaccccttgctgttttgaaccttaggattaattagattactttaattgtgctcatatgagtatgctatgcttttataaagtgtaaatgcttagccttgcctagtaataaataaaaacatggttatggatcacttattatacttttgaaaacccttttgaacattatggacagaggtgattctctgattatttgtgaaataaaatgagataaaatgtaattttagacttgggcggcaagtggtatgcatatggtagtagttgcataccgatagggggagtgttcgcctgagtcgattaaggaccaaacatgatatcatccattgtgtttaccgtacatccacatgtgtctttatggggggatcttggcctattaagttaagcacttgtctaaccttttattcgggaggccgttgtagtataggtaggggccacgagtgtactgtgggctacctagaggaactacccatgtgtgtgttgaaccttaggacgagtgtactgttcctaagtgtgtgatcgtaggatgataaattccctacgtgtgtgatttccatgaggggatgagtgtactgttccgcctcatggcatgggcgtctaagtctgtccaatacaacgatactgtgccacgttggtgggttcccgttgtgtccactaccacggcgttaagtttaaggcgtgggctcgccacttaatggttctcagtcatataacgtgtatggcctaggatggaggaacacgtatcgtgctcatgcaaggttagaaaatacttaatgtaaaagcctcgttgtgacctctagactagagatgaaaacggtcggaaatggtcggaaacggtacattattttattttttttttgaaaacgaacggaaacggtcgggaaatctccatatttatgaattcatctatttagtgccaacttcaatgccacattgacataaattaaaaaactaaattttgaaaacggtaacatcggtaaaaatattattattatattagttttgccgaaacggtattggtacggtcgggaacttttcataccgttttcacccttactctagaccgtactcaatgtgtagagtatagtggtaccgacgggtaccggacaaactagaccgattcacatcatgtgggtaaagctgtacaaactctgcagagttctaaaaactaatcgattagccgtgctcacggtcataagcgacatgatgatgtgttatgtgtataattttgtgctttctaaatgtttttaaaactaaatgatttgagatgatgataagattgatatatgtgatgtgattgccttacttcccgttatgttgtaagggaatgatgtctatctatgttgatatcatgccatgattaatatgctttacatattgcttaaatgatttgcttaaattgcgttacaaatggtttgccaactaaaattggctttatgctgaaaatagagaccacaaatagccttcctttgacttagagctttcatgtatgtaggttcgatagtgcccttgcaagtaatgtactgagtcttgccatgttttgtctaatttatgttttgcaggaataggcttagtttaagttgagtgatgcgggtttcgactgcttcttctaggatttgaacttaatggggtaaacccctagtcggtgtgcttgaggattgggtagtcaagcttccgctgttctctgatatagttatatttggctggtcggcctattgttggtatttcttaacgacatcactagaaatataatttccagcaatggcgcagaaatacttctggtatattatggttacagagttcatccgcaagcgcacggatataccattgtagcatttcacccgagagtattccaagggtatcgtatttattttatcctgtgggaagatcatgtagagagagcttgactaataatttatatattacttgtgataatcatattctaaacaggggttaagataatccaagggtagagtgacacaccagcattaactactcattctcataataaatcatctaagctaagtggaaagaaaagaggaagaaaatctattcctatacttctaatatacatagtatacatacattctagttaattgatatactagctaataccctttatccgatgctctcctggtacttcgagaagccatccctgactaccgagttccttacgacagcccgttatgaccatacaaccgaggctaaatacggaggaataccctccccagggaattaacttaggattatataccggcgcggaggaatacccgtactgagctgtcaccatcagcggcccacctctcacccacaatatataaccccaaataatgatatcccgtaatctagacaccacgtctaaactaccagatactactctaatatcatcgtcatgacatagagtaattgcataagcaaacaatatacccgcaccaaagcatctcccagataagctagccgtatatttagtataacatgaacataatataaagtaggcattcatatactcggaaagtatttcaataccataaatatatttagaagagtattctaataaaagtacaaagcttacaaaagagaagagaaaagctactagagccatacctgaactcttccgaaggcttccggactcctgatttctactctattcctattccaccagctagatactactaaactaaacttgagagaaatgagagagctattgcttgaggtgtgtgagtgaagtgagaatgagaactccttttatagcctcccaataacggttgtgacggttggaatggtcggaaataccctccaaccgccattgggggctaatccacaccgtccaggcgaagccctggatcggatggcgctggttcggtcgaacctggggccgacccaatccagtccaatttcggctggtagcctcctccgttgttcttctatgcagacttgtgaattttggcccagtttgtcacgtcaattctgagttcttggcccattcatacataagtctggttctcaacatcatccgattgatttatcatttctcctccactttattatcattctctacaaaaggttagtatacctaatactagtggaatattattattctaacaaacatatgcattgcaagcatcactagttctcgtctattttggtaatattgacggtcgaaactgaaagataacgaccgtcaacacctatgtatctatttagtagttgtaatctaaattttatttgctttagatgtattttgctatgtatattcatgcttgagatgaaagtgtgaatctagtgcacatcctgggaactagattcacatgagtatgagttaggaatatttgagatgttgtagatcttttgccatttttgtcaaatctcctgaatgtgtaacacatctggtcgccacctttgagtggtttgacgggcatatctcaggctgaagttgaccggcaggctaaaggcccagcaatgtctccaatattcctctctcgaggcgtcggatatttcattatgcttgtttgatgacttgaattattcatttcatctctcaattataatggaaggtccggagagcctacgacagtttggcccatttggaggtttttaattgggtttatgggtccaaaactccttaagttcggatacgagtttgattctcatcctccttcatgtatatttcctctcaaccttggtagtttatcacctgcatacgaatatacaccaacactcatgaaaatcgttagaaataaaccccaccactatgttggatgttttatatttattgtttatgcagatattgacggcgttaatttggtacttaacagccgtcaacaaacccccacacttagctctttactcgtcccgagtaaaggttacggattaatgtggaataaaattgtccaagatataatacaagtacaccaatcattctaagccatacctgtacctgtgaacttttgaagtgtctaacttaccatattgggcaattgatgaatggaacggtcgtgactcaagtcctccttattcctcctgtcaatcttttagggttttcatatattttcgcaaagtagctatactcctcaaatgaccttctctcaaatcactcatgtggttttatttgttgatcctcaccaaggcatgtttgccgaattgtccctattctaaaggctgtataggtggagctcggtagggatcaatcagggcatacatgcatcacatatattgcaaagccaaaataccggatccaaggagatagcaagtcatactctctgatcaagaatgtgcatgtgtgtgatatgtgtatggttgttttgtgggtagaaaaaggaaaataaaagatgacaactcctttgatatacctcctctaattttctctctttggaaacttgagagagtgcatggctatctcttttttttttctttttctttcttctttttatcatgcctcgtactttgtatgagcaatattttttttcttctctcatttttatcaatgctccatatttgtatgagcaagactttatttttttccctatttttcataaccatgcctttctctctctctttttttttctttgaaagaatttcggaggaagaggcataaatgacatggagtatttattttatggataatggataaaataaatgatagatgagagatgctaacttccagtgtagaagtttagcataatgtgtgtatgtggagtgtgcgtgcgatcttgatcatgaaagtatgaaaagcatctcacacggatcacaataatttgacaaagctcaatgtaatgacatgcagcctaaacatatacaaggtttttgcaatgataatcatatatggccttggaaggtaataatatagtcactgaggagtattgctcgaaaaagttttaattttcacaaaacaaaatcctaagaatcatgacagttggacaggaatttcttttatcataaccatatcacatatatcaattacttagattagcaaggttccctatgatagatggttgttcacaagtgacaagtgttagcaaagaataaaaagtatacatgatcaatcataggaaaattctatttgttgagagttaatgttttgaatttttatttggagtcaaactaaattgtattcaaattttctgccaagttaactcacaaacatgagaggataagggaggagatgcgcaaacatgaccacacgacagaagggtgacagagccgggccatgcaagggtacggtgaacacttagttcagccgacccaaccaggacctggttctgagtgctaaactttgtgcgcggccgtgggctggtgttcatcatattatcatgttgagtcgatgttgttgcgtgtcgggagttcgaaaaagactcccccacacttgttttgtaccttgtctttattcaaaaacatcgaaaagaaaaataggcttccaccggggtaaagtaccggtgagccaaattttattcaagtaactctaggcgtatgaagtgcctaaatttattttattttattccacttttatttttttatttttttattattttttatggcaacaatgagcatggtggattccctagcagggcggatatatgacgcaatgatacacagggtgtttgatatttttaccagatcggacttactaagctttgaaccgaatcgactgtaacaaagtattgcatttgctctgcttggttccctgtgcatctctctcataaaccaaggagcatggtatgggtgttagagttattgtatattgctccttagttgtctctttttatttcctgcaaaaagttagtggatagcaaatacccgagggactacaaatatttgaaaagattttatcatagcctcaagattagttgttcacatccatgctaaaaaggaattggattcaaaacttaataagcatggatcccataaaattgccataattttattttttttgttattatttttttctttttactcgagagacattttttttctttttctttgaaaacaaaattttctttttttttcttttttttaatttcttttttttgttgttcaccaaattttcatttaagcaaaactcatacagggctaaggtaaatttacataacatagcaaaggagcatttggcaatatacataccgtgcaccttgagaggtgatatgtttctcctttgtctgttttggcaattgatttgttcctggcccttggcatacctccagtgtgactcgtgcttgagaactcacccatcaaattgaaaaatttcctgcaggggttagtccacgaaggatatacatctgaagtccgtgaaagtactggctctagggttcatttaagcaaacttgacaccacgtcaaatttgattaaagcaggctatttatcctaagcatcatgcttaatttaaaaagcctatgaatgtcgacgaccacccaaaccatagcatacgaaaatagagtaaggacgcataaccatgtatgatcaagctagactcaattacagataagtatgagtaaaagaaatggtgaatcttttgctgtatacctgagtgtacttaccgccagtatgatgtatatgttgaaatcccttggagcgctggcatggtcacatgtgattgtcgatctctcctccgtcttgatgcggggtgtggaggaggaaggcactttgaccatgccaattcaagcgagtggttcggttatgcacacatctcgggtgcaaaaaccttgtgccttgaaggcgtgttccgttggcacaatgttgtagagatgtaggatgcatctcttcttggcaaaatatgcaagtgccaactggagtgtagcagcaaacacctaggaaagaagaggacatctcctctggcttaaatgcgtgtaggtgctgcgggagcgagacgttgtgcacagttaggagtggatgaagggtaaaccaaaccggcacatgagctcaagagaggggctgggtgcagtcaggcagcatgatcgctactagcgaggagtatagccatattttaaagactcgcacataatgcggtctttgatctagatgtagcccaacacccctcttgctctcttcctcttcttccatgtttcatttctttttttctcccgtctctcttttcttcttagcaaggtagaactaacaccaactacaaagcaagatggccttggttgatggaactcgtcatgcaagctcattggcctccccttacacttggacttttgtgtcgcaaaacattaaaaaccaagtgtgtgatgttagagtcttcataaagtgtgtttcaacaccaaggatcaccaaaatgtacagttgacgtagctcccgagttcttaggcatcatacatccctcgttcttaatgtcaacctgaaatggttattgaccaagaatacccgaaggtgcataatatcctaaaaactggttcttccttttattggaaagaaaacttaccaagataatccaaggtatctcccggcagtgctttgtttatggtcacaagctcaacctttgagacatctcactgcaagattagtgccacaaacacatacgagatttgcaatatttatgataaataaaagtatccacaaccacacttctaatcatgttagaaatgaggaccataaggtggttatggttctcgcacaaggaagtgatactattcggacagaactctgaggattctttatgtgagcatgattcctgaggaaatttgaaagagaaactttcatgctcaaaagtgtcgttctcatcctccagagttgatgtctcaaggttgtccatggcctgcagtttctccttctcaagagatgcatcgtgcaagaatgaggttgtttcttgacaactgtcgagaacaacatcttgatggcaagagggacaaggttcaggctcgataggaggttgtgatggtggttctttggagtgcaattcaagagtctcgccataatctttttgaatgaaatgaagatcatcttgttctagaatagattcaggggactcataaagcagaaccgccattacttcctctatcggcgtattattaggaagatgaccgtcaagattttctcataataggtatgaggatcatccctgaatttagaagcacaacccggagcttgaatttctttggaatccagtgatagctccagggaggactctttagtcagacccgaagctgttgaaggctcgggttcaggctttgcaaaagaaggttcctcccttcctggcacaaatgcctctagatggagttcaacacactgcccgacaaaggatgtattttccgctatgcgatcaagaatttctttgctttcgacgggagttttatgcatgaatgaccctccagccgttatgtcaaggtagaatgcagactccctatctaaacccgtatgaaaatgctgcaatagcatgtaatcgagtatagacagggttgggccagactgaactaaattagtgaatctggactaggctgcaccaattgattctttatttatctgctggaaactcaggatttctacacgaagagtagtaatacgggttactaggaagaaggcaagacagaatctgtctcgcaacttttcccaactaccgtttacacatccaacggtagaggtgtaccattgctttgctctctcttgaagggagaatggaaaaaatttccaccgcacattttcttgtctcatgccacgaatcttaaggcacgagctgacttgctcaaagtctcgtagatgatggtagggattttctagatcaaagccggaaaatggattttccctcaccatactaattagttcgggacgaatttcatagccagtggtataaatgggctccgatgaagaaggtggctcatagaattcgtcccgaggaacagacaactgttggtatttcttatgatcacagatagaatccgcaagtggacggatataccgatgtagcacttcccctacggagtattataagggtatcgaatccaagggaacatgtgtgctcagagcttcctccggttcatccaaggacaccaagcaaatgataggccaggatagagaggattcactagtgagaaacagtgtctagggaaagcttaattttaatcctaacgcaatacttcaggcactggcaacccgctgttccgagatgtcgctctactacatacccggacagggaggacttcagtgatctcgagggctatcaccacctctacacccacctcaacgtactgtgggatacgcaacaattactggataacaattacctacacaccacgtctaagcaattactatctactttagtgtttataactcaccaaagcaatcactatattttagttgattatagtgaacaataatcccgtatgctaattaggaactaaccaagaggttattcactgatgttttgatgaagttcacaacccctccttgtatggatgcaaaattctcctcactttagtctgattttcctcccaacaccaaggtttatcatctgcatacaaatatacaccaacacttgtggaatatgtgagattaagcacctatcactatgttggatgttttattatctgatctttatgcagatgttggcgggccaacacgcggggagcggatcacccggcggcggcgtatgcgatcagctccggaggtgcaagccttcggtcggcaacgtagtagccatcctacgcggggagcggatcacccggcggcggtgtatgcgatcggctcgaaggtgcgagccttcagtcggcaacgcagtagctgtcctgcgcggggagcggatcacccggtgtcggcgagtagtacccaggcaacgaggggtgtcaatgttggtatttcttaacaacattactagaaatataattcccagcaatggcgcagaaatacttctggtatattatggttacagagttcatccgcaagcgcacggatataccattgtagcatttcacccgagagtattccaagggtatcgtatttattttatcccgtgggaagatcatgtagagagagcttgactaataatttatatattacttgtgataatcatattctaaacagggcttaagataatccaagggtagagtgacacacaagcatgaactactcattctcataataaatcatctaagctaagtggaaagaaaagagaaataaaatatatttctatacttctattatacatagtatacatacattctagttaactgatatactagctaataccctctatccgatgccctcctggtacttcgagaagccacccctgactaccgagttccttacgacagcccgtcatgaccatacaaccagggttaaatacggaggaataccctccctaggaaattaacttaggattatatatcggcgcggaggaatacccgtactgagctgtcactatcagcagcccacctctcattcacaatatataaccccaaataatgatatcctgtaatccggacaccacgtctaaactaccagatactactcaaatatcatcgtcatgacatcgagtaattgcataagcaaacattatacccgcaccaaagcatatcccagataagctagccatatattcagtataacataaacataatgtaaagtaggtactcatatactcggaaagtatttcaataccataaatgtataaagaagagtattctaataaaagtacaaagcttacaaaagagaagagaagagctactagagccatactcgaactcttccgaaggcttccggactcctgatttctactctgttcctattccaccagctagatactactaaactaaacttgagagaaatgagaaagctattgcttgaagtgtgtgagtgaagtgagaatggcaacttcttatatagcctcccaatgaaggttgtgacggttagaatggtcggaaataccctccaaccgtcattgggggctaatccacaccatccaggcgaagccctagatcggatggcgccgaggagggttcggccgaacctggggccggcccaatccaacccaatttcagctggcggccgcctctgttgcttctatttgcagacttgtgaattttggcccaattcttcatatcaattctgagtgcatggcccatttatacataattctggttctcgacatcgtccgattgatttgtcatctgtgttgatgtcgattctcctccactttattgtcattctctgcaaaagattagtatacctagtactagtggaagtttattattctaacaaatatatgcattgcaagcatcacttgttctcctctattttagtaatattgacggtcgaaactgatcgataacgaccgtcaacagtcaagcccccgagccagtggcgaagtcggcgaagaccacccggacgatgaatgaggcgaagcccccgagtccgtggcgaggtcggcaaagggcacccggacgatgagggaggcgaagcccccgagtccgtggcgaggtcggcgtagagcacccggacgacgggggaggcgaagctcccgagcctgtggcggtgtcggtgcagagcgcccggacaacgagggaggcgaagcccccaagtccgtggcgggtcggcaaagaacacccggacatcgagggaggcaaaatccctgagtccgtggtgaggtcggtgtagaacgcctgggcagcaagggaggcgaagcccccgaatccgttggtgggtcggcgtagagcgcctggacaacaagggaggcaaagcccccaagtccgtggcgggtcggcgaagaacacccggatgtcgagggaggcgaaatccttgagtccgtggtgaggtcggtgtagagcgcccagagaacgtaggcgtgcaccagacgaagtcgagccgcgttagtcacgcgagggccgaagcccccaggtgtgctgcgtcgtttcccgggtgtagtcgcgtgcgcccggcttccgcagacggactggactttgtgcaggacacgctcgattagcggcacggccaaagcccactgtgctgcggtgaatggcttgatctcgatctccctttgtacatgcgtacaataggataaacataagactgaattagtcatagtaataatcaatctgattagaaatcaatttaattagcagcaaggagattagatgcatatgtcgtatcctggctccctgcttgtcccttggcatgccaggcatgcagatcgatctgacgcattggctgtgcatgctagggccagtgcatggctgtttcatgcgctgacaggtttgcatggctgtcgtggtgatgcaatcttccagggcagcagcaggtccatcccggccagtgcaagcgcgacggcggctcagtcagtgatcacgccgacgaccagcatgcaccatagctccgctcgcgaaagtagccatcgatgcccatgcataattatagatcaatctacgttagttacttaaaaaaacaagatcaatctaatatacaagaattcagaatgtcaaacccggcgaataagggatcatgcgacgaatgccgcatagccaaatccatgtgagctggccggggcaaagcccccggatatgcggtggaggcagtgtagccgaatccatgcgagccgcaccaaccacacgagggtagaagccccgggcatagaggatcgtagatgccgccagcgacatgcatgtcgcttatcttgtgcatggcagatcctccaagcatgcgctcatctcgcgcacgtcgctcgtctcgtgcatgggcatcatgcgtggctgtgcagggcagcgcagtgcggcgcacggggacgaggcggcagtcgacgggctgcgccacacactgtgatttcctgcatcgccttgcgctgcgcacgtcatcaacgatctcatcgaccgtggcacctggtaacgtcgatgattgaagccatctcctccttgaagaacacgatctagcgcccccctacctggtgcgccaactgtcgatttctatgatcggcaatatattttacggggtgcgcaagatcaaggagagatggtgatgcaggtgtttatcctggttcaggccctcgagaagaggtaataccctacgtccagtgtgtttttctctgtatttgggtggaaaaatgaactcagaagccaagagagaagaaggtagaagtctcggaaatcctccggcctagggaccccttccccctcttatataggatgaggggggagggttacaaggaaagtatctagttgattgcaactagatcctcctattccatctataaagatatgcatgatacccgagatttatatcttatcccggaaatctctctttctttatttacaagtatgccgcaggggcctagcacacttggcccaccccatgcgatgcggcccaaggtttgttgttgggtacctgggtatcgtgtaccccacagctgccacggcacacgcgatgggttgctgcttgtctgtgctgagagttctgtagttcggaaaaacacccccaggcagaaaaactgggccctgagtttgatgctcagctatcgtgccgtcaaccatagatttgatcatgtaggtcaaaggtattgaccagcattcccgattggttgaccaaagcatgatgaacggtgtaatcaacctggtcctgcaaaagcttgagtgcctcgagttcttcctcccgattgtcgcctttggccttgtcatcattggcggcacttgtttctgtgtcatccttgtttgacagaactaccttgtatttatgaaccatagtgccggagcgagttggtgcgaatgaatgcagaaatcggtttgcaagtcatctttcatcttctcaaattctgccttctgctccggggtcaacttgtccatcattatcgggatgacattttctggatcgagctctcctttcttgaggtttgccaacagttcacgaaagtcggtcccaccaagcgtgccaagaaagcgtgttgacatgaaaaacatgcactggcctaagagatctgcttaactctagtacaggtccaaagaaattgcctttgggctctgagcgtgccagctggtttgatcctgcaaccaaaaagatagaaaaagaggcaaagagttaaatccatcaacaatagctaatcggctggattgccgataacgtatcgtccgaggccatgcggatgtaacttgcaggtcccaagaaattgccttcgggttctgagcgtgccagctggtttgatcctacaaccaacaagatagaaaaagaagcaaagagttaaatccatcaacgatagccgatcggctggattgccgatgacgtatcgtccgaggccatgccgatgtaacttgcgtcagatcggcagaggcagataaaaacttggagattgttgggtctactcgatcggctgtagatgtcaacgatacgtaatccatccaatggaacatgcttagatagagtgattgggagatcggtcactgcaccaagacaagacagtataaatcacttaatatctaaatgcattccaaagtagggattatgtatgctcacagcatagccgatggggtaaacctaacgtgtatcggctaatactccgataccaccttataccaagataccagcgcagatgaaatatacaacactgaaaccaatctaacgagcaaagtaagctagcaaactgataagaagcttaacatactttaaacggatgagatctcgatataaggggcagatttagatgatccagaaccaaataaggaaacaagaagactaaatcaggtaagatcagctgaaactccgatgctatctctattagtaatcaaagaaagagctagatagaacgtttcaagacagtacttaacagatcgaacctaactgatgcaacattaagcatgaaaagaaacataagatctaatcaaattgatgaaaactcatccaagatggtagatacactgcatagtctaacttgatatcgaagccaaaacctatcgaccgttttcgatgatagaggctagccgataaagcttagatgacgagatcaatctagattgtgtggtatatatgataactcggcggtttgcatagacaggattagagtgtcatgaagatgtaagcactaatcccaagaacgcaagccgccatgacaagatttacctcttcgtcggagatcgaacccgatgcagcccaactcgaaagcaaaaactcgtcgaaacaacaaaaatagaaaagggtggcgatgcaccgaagtaaactcgtcgaaacaacaaaaatagaaaagggtggcgatgcaccgaagtattattgaacagtcgtcacttgatttcatggtatcggatcatatttatacccgaagtacataacatgtccttgctggatacgactcttatctctgacacaacttaaaatacgaatgagtcctttaggtggactcttaccaaaatatctctaaggaaactgaaaaatgtcctaattaatagatacaattgcccaattgcccttttaggactccaatccttcctaagactggttgcatcagcttggctccgctggatctgatgtttagccgatatgtagcagccgattcatgcggtagccaatgctgcttgtaagcgatgcgtgttctgctttctcgaactgaacttccccaaatcggctttgactctagcttcgaatccgtcccatggcattaccaaatttggtcgttaacatagacttcgaaagatcatattttgatcacacgaactctgaatcgacccgttcaagtctcttaatttttgttataacctaaagaaccatgtgcctttcttttatgtactgttattgcttctttataggcttgtagctttgcttgtgtgcttcgcgtagctcctgtcgttccgcaggttcctaaagcgtggttcgtggttgtcgccgaaggttcggaaggccgttctctctaagcaaggcaagtcgcatcatccttgagcatattgaatcccagtttataaaattattttattttaatttattgcattaccgctttatttaaattcccgcgttctcactcttttatttagcattacctattaatccttgttatagcctcatgattgatattgttagtatcaccttgtttaccttaggaaaataaaaccctaactagtgggaacactattcatggttccactagtataaacttaggtagatgcttggctggttaatcaggcaacactaggtggttttataactttagactttgggaattctcatatcatttggacattatggaatggttggcttatgtggaattggacacacacctcccactctattcaaaacccccaaaatggttctaggctgggctatagtagcacctcagccatcataaggaccggtcttcgggcctctgttgcaaagcactaccgtactaaccacatgtctaatgggtaaggcttaactcggtgctcagtctaatcctgaacaaaaaagacacagatggagatggctgaagtcgttgcgatggatatctctgaggcaaatgaaggctacatgggcgggtgttcggtagtcaagatgtcgtggcacaggtcacacccggtggatgtcctgctgctaggggctcaaccataacttacctgtccaaggggttccggccgtaggcgggtgttgggtcggtgcttttgtttacagctaagatgggtaaagggttatgtcacatttttatgacgggttccaaggccatggaatgcggcgtaaagatgtgtcttatgggtaaagttgtacacctctgatcagagtataatctattcgaatagccgcgccctcggttatgggcaggcctagcaatgtatccaagttagtggtttaattcttaaaacttacttaacaactaaaatgaatgtttggtctgggttggtttgggacaagctaggacctgggtttggttgtcagttcggtctaaatcatcgtaggccttgggctaaggcaggttcgtgtgggttcacggacttaattaataacactgtgtagctctaggattgtgtttataaaacagctttgagcaactaagtgacttttaaatgctgtttactgtaaaacctaattactcattgtaccctttgcattaatcatgcatcttccgggtgacttgctgagtaatgtggttgtacttattcttgctctatctttttcccttcagtaagataagctctggagaagaagtcctgggtggagtcctggcttataccccagttaagtgtctgtaaagataaagccgtaggcccactaatctgctgttgtttattttcgttgtcacggggtattttctagttatctgaacatgttatccctctcctgaaccccagccccctcgcgccgggaccttatccctctcctaaacccccaccccctcccccgaccctttcccgttcctccttcctccggccggtgcggcgcccctcccctctccaacaatggattcttgcgctctcttcctctctaccccgcgaccacctcctcctctcgtccccgcgcaccgccgccgacccctcgcgagccgctcaggcctccgccgccgggagggttgcccctgcagctgcgcctcctcctcttcctcctccggtcgtgccggttctcaggaccgcccgcccaggccttggcagcagaagcagcggacgcagcgtcccggccgcggcgaggccatcgacccagtcggcttcctcgccaagcacggcatctccgaccgcgcgttcgcgcagttcctccgtgaccggtacgttctccgagcgtctcgtatggcagggtgcaacctccggtttcccctctgctaaattcgttctaactggtcgactgatgccttgactgggtgtttgtacacatctccttccatatattgctgacagatttgcctgattttccaaaatggttgggatttttgtacgcattgactagctaattccccctaccgtcagaaacaggaggtggaagtggttgtgattttgtcaagaaatcgttgaattgcttccttggtagggtgggcttgatttgcgtgactagttagttatccatcagaaaaagaggtggtacttttttttttcccaaatgagcacagcctgtttgcatgcggtgagggaaagtgggcaacagctgacagccattccagcttcttggtggtgctggcgaagtggcaaaaaaacccagcttcttagcaccagaatcaggctgatggaagttccatagtttcaaattaggtgttgaactgtagatagaattatggaaggaggggcaaggtatggagatgaaccagaaggttgatgaagtacagccagaaaaacaaggagctctgatgaagtaacactgcgagaagggagacaaggaagccaggaaggagagttgctgctaagcatgcaacagaccagcctaaatatagcagtttgtgcattgattccatgatagaacccagcgtgtgcatcataaaagcatcgtatcagtaagatcatatgtgaacagattctctcatcttatctcgctttttattattaggtacaaagctttgaaagaccgtcgatgggagctgcactctcgtctaattgatctgaaagaggcatcttctgggtaattatcctaccatcttggcatctggttttgttgtcattcttgggttctttggtagtgtgatgtgcccattggcctgttcgtgcttcttcttcttttttttttctgtttttctttttgctgatataggtttgagttaatgggcatgcatcgacatcggcagcaccgtgtggatttcatggagtgggcaccaggtatagattatcttggagacaggtctgcattgctagtctgttatacggccataattaatactctctccagtcacaaaagaatgtcatcttaggatgcatgctctcaacacaactttgacaatatgtactgtttaaaatgtaggttttgggcacatgaaaatgatataaccaagtttgtgataacaaaagcttttattacattacaactgtcacttctttttagatttatgcaaaagaactaaatatttaagattctcattgacctttaaaagtccaaggcaacatccttttttggctggatggagtaaccttaaatcttgatatatgtgtatgaagataaataacagaaagcatgtttaactaaatttacaagatgatgtgaaaattgtcatggagctatttacaactcttgtgcgataatattcttaatcctttgctcttctgaacaaaatgatgattgcattttgctgctatgtccccagcagaaccagctttaacacacaaaggctgtcatgatcatctgtatttacaattgtaacacatcaacatgtaatctgttatggccctgtttcaaaggtcggaggataaaaaataggcagctcgtccttggttcgctggccagagcttctccctccactttgtctctaagattctgctgatctagactggactgggtcaatggtctaaccgatgggtcaacagtcggatctcatgagccatactgtacttttaaacagattttagagaatattagcctagttggttatccaatgcagtgtgaagcgacaggtcttggatttgaactgagcctcacacgtaatttttagatgctccacatgctgcatctgatattgtgggtcggcagaaatgacctctctgtttgcttgggtgaaaaaaaagccattggttgaaccgggattttcctgggtcaactgtacaaatggtcctgattactggactggtctaatccaggccatcatgttggtgtggctcttataactatgcctattagagcaggtataatagggccgtaccagtaggccacgtcgattttgatggtggctggaggggagagagagcacaagccggtgactaattagtcactggctgctcgcgcgctcctatttagacgcattaaattttcgcccagtgcagcccatgctgatgctgcaatccgtgtgggttccagccttccaggcagccgacgatgccaagtccgcggtgtcactaccttggactggtcctcgacgttggcaagcaacaagtgaatggaatctcattatctaaaaaacaagagaatggaatcttgaggaggaactgaagaagttgaccagtaaaagagaagatgcgctggatctgagataggaaggacaccacaggttgagggagctgggcaatccagagctttggagctccgcggctcacacccaagcactgtggcagcgtgctcgtcccacttgttaccgagctcggtgactgcggatggcccatgtcccacggaatctccagctcaatggtgctgggctcggaccctgagctagtctgtggcgttcttgtcccctgtctatcaagatccgtgctccaaaactgctccgatgagcctgtaacaatggaggtagaaaaagagaaatggaaggaaagatggagaacgtggtgaatgtgggcccataaagtatatgttggatttgtgctagagctagctgttggagtagttggctgtatgaatatctgtagctgacatggaagtatcacactgccacacagactattacagtaagcagcgggctatattattagacttgctcttagagaagtgggaaatactataggatttacattattcttttcttgctcaatgaaaaaagaaagcatcctgcatactatgcgatgcttgaccttactaagagatagaaatactagagggcataaagtttatgcaaaaagacgacagcatcctaaagaactattagataacttaatgatgtaaacgtcatagttttctttatacactagaaagcttgaaatgctcatttaagcaatacctactattttgggtttctttcaattgtcttatcctccccaaattaggttttccctttgtatctacattactaacaactgctcccttcgtcccttatacactctaattttagcctaagaatttctcccacaaaggctttattaatagagtgggttccactagaactctttaatgctacttcatccttttcttctcgttttagtcatcataccagtaaaactccttcctcttcattctctctgcactaatgaagggcatagtagtcttttaacctcctacttaatctgtctttgactagccgaaagtacaatcttttagtgatggagggagtatctcttctttcatgcaccgtttttatcaacacgaacatatctgccactttaagatataatcttattcgacaatcaagatgctactatgtgatttataattgatatagttctgggtattatgtcctgtttgtgattcttttttgttttaacattaactgagtatgtgttacatttatttacagaaaattgtaatgtcatgtaggtgctcgttattgttctgtagtgggtgattttaatcagtggtcaactactgaaaattgtgcacgcgaaggtcatttgggacatgatgattttggatattggactatcatacttgaagataaacttagggaagggcaagaaccagatgaatattatttccaagagtacaactacgcagatgattatgacaaaggtgataatggtgttgatgtggaagaattgatccacagaatgaacgaagagtattgggaacctggagaaattaagtcacagaagtctcggttagaggtggttgctaagctatatgagcaaatgtttggtccaaatggtccacaaacagaggaggaactaggtgacatacctgatgctgaaacaagatataatgagtggaaagccttgcagaaggatgattcagcaagttcgttgccttgctatgatatcattgataatgggcaggagtttgacattttcaatgttgcaaccgatcgagtgtcatttgaaaaatttcaaggaaaatcaccacctcttgcttactgggttgaaatgaggaaagggcgaaaagcttggttggagaaatatgttccagcaatttctcataaagacaagtaccgtgtttattttaacactcctgatggtggtttggaacgcattcctgcttgggctacttatgttcttccaggttctcccaacttatcattgtaatgatattcttctattattatagattggcttgcaatacatgtattgtcattgttactgtaagtactgcagtttgtctcagtacaatgctgacttaattgaaaaggtagtaaatgacgatacagatttagtaaaagatgttgtcacatttttttttattgctagatcttcataaatggctacaggtttattaatgattattatcattggtaattataaggtttgttgtgataagctgacatgattacacaagttgcatgttgttttcttgcaaagatttttctttagtttgtaatattaatagttctactttaaatagctcttgcactttgcacatacattattagattattttgttaaatgttaatgccatctttacttgtcgagctcacagctctcgtgttcaattttccaatccaggttaaataataattcaaaattctagtttttgtgtagatgctgaagggaagcagtcctatgcagtacactgggatcctcctccagaagaaatttataaatggagatttgaacggccgaaggtcaaaggttcacttaggatatacgaatgtcatgttggaataagtggatcggagcaaaaaatatcgtcatttcaggagttcacatcaaatgtatttcctaacacctgcctttcggtgttttgtggttactcttaacttcattatcaacttttgtttcttccattaggtcctccctcatataaaagatgctggctataatgctattcaattgattggaattgtggaacacaaggattactcttctgttggctataaggtgagaatttactgatttaaacagcatattgtaataatatacaatatttctctgtggtctttttctgtagcaaagattggagttcaaccactcggtagcaataatatcacagaatataaccccataatggattctatcaaaccttgctctcgaacccatcatgcttgtaatcatgtagattcacttatacttgggtggaatcttgttaaaccatccttttccttgttgccatgtaattgtttacccattcttggtaccattttctctgcaatgtgaggtaaccttgttcctgctgtcaggtaaacactttactgctttgagtaagctatcacaaacttcaagtcaactccactggagttccaacaagactataaagggctacccttgcccaaatggaagttaaattcaatgaaccattaaaatgctggctatgctgatcgctgataaaatcaaacgaaatgtggtgtaaccttgattctacaattggaaacatacttatggtttacacctttacacttaaccacactgagcagagtgatgtactttgtagtccaaaacttcaaatatatctaagtgtctgggaatatatacagtgtaaaatgagatttttgaaatatattctgctataccatacagtcagacaataataatgaacatcgtaaacttttacaaactaatatacatgggatctaatgatgcttcagataactttctagctttcaggaggtttcgggagttatggaggaaaaaaactattcgttgtaatcagagaatttatgttgttaaaataactgccacaatgatttttctccgatgtagaattacatccagaagctacactgtaaatgattactgcatttataaacaatagaaatcttccactgtattcaactctttttagaatattccatttctgtatagttgtcttagaaaaaatgtgttgtatttgcaggtcaccaattatttttcagtcagtagcagatttggctcgccagatgacttcaaaaaactagtggatgaggcacacggtttgcttctcaaatataattattttgagcaacaatggaaattcacacagtaatttaaaaactcatgcttattcatgtggtagtcctgagcttactgcacgcgttatatttgaggcaggccttgcacaaaacgttctttgcattaaaatattttctgttttcttgcttttggcaaagttgaatttccaggtcatagtaaaaagagtatcgcattttggtatgtctaactgtgctactaggtagtgcaaagtgcaatttactctaaaaataacaatgaagtctttgtgtttgatatcttcttggtgcttttcatgcattctgttatgcatgcaagtttgaaatatcacaagtggcatatctgtagcaaattgtcctataatttggtagcactatattatgaagtgaaacagtcacaagaattaacatctgtgccttttcacacccttgtggtttgctcaggccttggattagtggtgcttcttgatattgtccactcctatgcatcagcagatgaattggttggcttatccctctttgatggttctaatgattgttacttccacagcggtacgtaacattatatctactgctttttgttccttattgtaaactttgttttactgaggattatatgtagaattatatgtaaactctttttctgcttttttattgtattgtttcaatttgtaaataataagttttcattcaccatgtttgctctatggcaaatgtcttaccacgactaaatgagttcaacttaataaactcaagaaggaccatcatccttgctcataggagccaaatttacagttttgtttacaaacatttataggtgggttgaactgcttaatatgaggaaagcatcctgttcttgtagaccaagattaacttgataaataattgggtaaattggatccatgcaattgtaaatttgcctattcagataaatggcattaccatcgtctatttgtagctgtgccactgaaattttacaaaattaagaccgtgttactgccatcacattttccatgcttctccttttttttttttagttttcttcctttctcccgtcgtcttccctctcctgtcctctcttccttactcgcgccaaacaacgctcggtgtagcgagggccaaggaggcgacggcgatggccaagggcgcggtgacaacgtcctcccggatctggggtggccggggactaggaaggtggcgctcgcagaggcctggcccgcccgagcgtggggtggtgtccagctcaggttgctagaggcggcggcttcaaggcgctcgtgctaggtgccggtgacctcgaaatccaagagcgacaaggtggtctcctccgcttttgtgctcgttggcgggtgactacctctgcttccatgctcgttggcgggcgacctattgtagcgtcgacaaggaaggggacgttccggacctcatgccgcggccgctcgtcttcgatcttatcccgctggccggagaggacggggttcgctgtctggatctgccggtacaaatgggagtgagtcgacgacaacgatgacgatgatggctcttgagccctcgcgcccccagcctactcaagcacaagctcgccgccacctgccccgagctccttccgccggccgaagaggatggaatttgcaagatctagctcggtggagacgccgacgccgcaggagcagagactaagggcaatgatccccggccccatcaaccgccatccttcttgctctaccccttccccttcaacagtcattgctgatgccgtggagctcctccccgagggagccagagcttgccagccagcgtggtcaacgcaagaagatgggaagagagaaggaagaagatggaaaaaggagatggaggaaaacgtgatggcagtggcacggtccgtcttatttgaaaaattttgaaaaaaattaaaaacaaaagtcacgagtaaattactattcatattttatcatctcataacaacaaaaatactaattataaaaaatttacaaataagacggacgatcaaaggtaggcgtggaaactcatggttgcacttataatgggacggaggtagtaatattctagtggcacggctacgaatagatgaattgtaatgacatttatctaaataggcacatttgcaatggcatggatccaatttaccctaaataatttggtccaacagcagtagtaaaagttaaaacaatagcagtcaacatctagcataatatatgataggttacgttggccatacacaggaaaaaaatcgtgcaatttcctctcaacttgatattcatattgtatatattgcatgaatttaatgattagttggtagctgtttgacctgatttgtgccctgtgtacttgcctgttcatatggacaactgattggtagaagtaacatactgatactattaagtaaaaggcccatgaaatttgtactgacatgcctagcattaatgtttgttgtcgaatggacaactatgccacgtcgaaaggcgtggttctctcaacagcagttggaatgtaaaagcaattgtattgattcgtgaaatatttttggggatccccccattacatggccctagaggtttatttatagccttagcacaagcttgcaccttctagtgtttagggttacaggggattttacatggttgcccttatgaaagggacatttacatgggtatgcagtgtcatttgcacatatgggcctttaatgggctgataggctgggcctggtctatggcaaacgggcctaaaaggccgggggcagcctgttgggcctccttgatgccgaactcgtcatggcgaagtctttgtagtttgcccgagatgcctttactttcggaataccgacgcggctttccagccttcgccatcttcgcttatggctttcgccatagggcttcgcctgaatggccttgacgtctttggcttgaatccttgatggtactatagtttcggcaggtccggccgaagggcttcatggcatgcctccaacaagcccctcacgggcaagagtgagtaaggagctttggccgagaccgtgcaaactatacggtatggcatgaggcgtcccctttcggccgatgttcctgccgaaacctctttttagactcctgcagaaaaaatatgaacactggcgttcgcctttcgagaatggcgaagctgtattatgacactgggtgattatattttgccaagtttgtctgctttgcgcgattcttgacttgtatttttttctttccccttttccctattgttttagcggggatttcgccgaaactcatgcgttcggcccccttttggggattggcgaaaagatttgttgacttttcagctttcgacttccgttttcgactcgtagcattttgcgttgggaaaaacgcttgtgttttgcgtaagttgaatgtaacggcgttcggtatctttattccgaaacaagctgtcgcggtttcaacgttcggcgagcgatgcttcggccgattcgtttcgcccccctggcgttttcgtcgatcaagcgttcgccttttatgtagctatgtggttgtcaaaatggcgaattggaggcgaagacatcctggtcgaaccttagaggattacgaccggtgccacatccagcgccacgatgccattgccttactttggttagacttcgaaatgactaatcatcaagttgttatcgcttgacgtcggtgtgtatttcgcttccttccccccttagagtcgtgtatagtatagatgaagaaccgtgttcgcgggacttagtaggggcgaggcaaaaatgttctgaaacggatgatgtaattttttgctcctttgtataacacgtatgtgcttttgcccgacggagcttgtgcgtgtttttatgtttcttttcgctatcattgcattttgtaacttgtacgttcggaagggcaaggcctgtcggcccccttgcgtgttagcgaaaggaattcacattgacttttcagccctcatcattcgctctcgacttttggcatgtgcgtccagaaacgcttaagtatttgcataagtcgagtgtagcgacgatcggtatgttttccgaaaacgagctgtcgcggtttcaacgttcggcgagctgtgcttcggccgattcgtatcggccccctggcgttttcatcgatcaaatgtttgccttggggtttttccacgaaatatcatacacaaaaatggcgaagacacccatgaattttatatgactaagcgtcagtttgccattgcccagcgtcgacgcagcattatccccgtttttccttcttcaccgctaaatttttttttgtgttgatctaacaactagcgatgaagaagatgctcaagggggtagtccttcgccatttgaggactgcttttgttaatgaatcggatgtaaagtccaaatgccttttggcgggcaatggaatttatctgtaactttgctttttggcaaataaatggggtgtggtgcgtgttacggctgttcggctcgtactttcccctttttgccttttggcaaaggtatttttaggtactatgatcgttttgaccgttgccggctttcggtctttttagcacttcgacctttttaattgttaccggcttacggtcatttctttagtgctgctagggttttgtcgttcgtcccttttggctgccccgtttgtctgcgggtgtgcaaccgatgcgaactcgatttcaagttttagcccctcgcacatttccttggacttctcggagtcaaaccgcttgttattgccggtaatgaactctttcggcataccgaatcggcagaaaatgctttttcgaacggatttttacactagtgccgaaggtactgccttagcccatcgaaggcggcttgacactcaggtgtccaattgagtttgccggccccttggagcatcttgaaaaatgataaatctctttcggttgctcttgggagcaactccttaactcattttcgcccctagcccttgtcgccgtacctcgctggtactgtggcgaaaggcgtgggtgtggcgaaacctgtttgcccgcagcccttggcgccgtaccttattggtactatggcgaagggcatggcgtgtggcaaaagctgttcgcccgcagctcttgacgccataccttaatggtattgtggtgaagggtatgggtatggcgaaaggctccagaggctagggtggcctcatagcccctgagcttggaagcaactcattttcgtccccagcccttgtcgccgtaccttgcgggtactgtggcgaagggtgtgggtgtggcgaaaggctccagaggctagggtagcctcgtagccccccagcttggaagcaacttattttcgcccccagcccttgacgccataccttattggtactatggcgaagggtgtggcgtgtggcaatacaccgtgcctcgtgtggcgaaacctcttcgtccgcagcccttgacgccgtgccatattggcactatggcgaagggcgtgggttggcgaaacctgttcgcccgcagcccttgacaccgtgcctcgtgtggcgaaacctcttcgtccgcagcccttgacgccgtgccatattggcactatggcgaagggcgtgggttggcgaaacctgttcgcccgcagcccttgacaccgtgcctcgtgtggcgaaacctcttcgcccgcagcccttgacgccgtgccatattggcactatggcgaagggcgtgggttggcgaaacctgttcgcccgcagcccttgacgccgtgccttattggcactaaggcgaagggcgtgggtggacaaaacctcttcgcccgcaacccttgacgccgtacctcattggtactatggcgaagggtatggcgtgtggcgaaacttcttcgcccgcagcccttgacgccgtgccatattggcactatggcgaagggcgtgggttggcgaaatttgttcgcccgcagcccttgacgccgttccttattggcactatggcgaagggcgtgggtgtggcgaaacctcttcgcccgcaagcccttgacgccgtaccttattggtactatggcgcaaggcgtgggtgtggcgaaacctgttcgcccgcagcccttgacgcagtacgttattggtactatggcgaagggcgtgggtgggcgaaacctgttcgcccgcaccccttgacgccgtacctcattggtactatggcgaagggtatggcgtggacaaaacctgttcgcccgcagcccttgacgccgtgccatattggcactatggcgaagggcgtgggtggacgaaacctcttgatgccgtacctcattggcactatggcgaagggcgtgggtggacgaaacctgttcgcccgcaaccaacctcttcgcccgcagcccttgacgccgtgccttattggcactatggcgaagggcgtgggttggcgaaacctgttcgcccgcagcccttgacgccgtgccttattggcactatggcgaagggcgtggcgtgtggcgaaaggtgtccagaggcttgggcggcttcgtagccccccagcttggacttaactcactttcgccccaagcccttgtcgccgtaccgcgcgggtactgtggcgaagggtgtgggtgtggtgaaaggggttccatttcgccttttcggtctgggttccccacggacggcgccagctgttgtcgaatggacaactatgccacgtcgaaaggcgtggttctcatgtaaaagcaattgtattgattcgtgaaatatttttggggatccccccattacatggccctagaggtttatttatagccttagcacaagcttgcaccttctaggatttagggttacaggggattttacatggttgcccttatgaaagggacatttacatgggtatgcaatgtcatttgaacatatgggcctttaatgggctgataggctgggcctggtctatggcaaacgggcctaaaaggccaggggcggcctgttgggcctccttgatgccgaactcgtcatggcgaagtctttgtagttcgcccgagatgccttcgcccgagatgcctttactttcggaataccgacgcggctttccagccttcgccatcttcgcttatggctttcgccatagggcttcgcctgaatggccttgacgtctttggcttgaatccttgctggtactatagtttcggcaggtccggccgaagggcttcatggcatgcctccaacaatgttgaatgctgcatgtggtttgacatgttgtattatttaaatttcatatgttctacacatcttaaatttcgtatttccctaagactgatttttttttatgcttctttgctactacaacatccttgttgtaattgatccttggcaggaaaacgagggcaccacaaatactggggtaccagaatgttcaaatatgatgatattgatgttctacacttcttattgtctaatttaaattggtaaaatctaagcatatgctttcatgctgctgtcttatgttccgaatactatcaaaatttgattcttttctgttctataatctaccagtaacttaaggacatctggctaattttactaggtgggtcactgaataccgtgttgatggattccagtttcactcactgccttctatgttatatactcataatggcttttctactttcactggtgccactgaagagtaagttctacgctttcactattttcctaaaacattagtcactacatttctgcagtatgttgatgttctacaattttccagaaccatatctgctctttataatcttaaattcttaattgtaggtattacaatcaatacgtcgatgaggatgcgctgatatatttaattatagcaaatgagatgttgcatgagcttcatccagatattataacaatagctgaggatgtaagttgttgttatacttggtttcttttcctgtaaatttatgttcacgtcacataattatcagttttagatatgcagtttggtattgagatatagttatcaccaatgtgcaacttggtactgcccttcggttgcaactattgtaacactgagatgcctgtctaacagagtcataggcatacatgctttctatttagtgactgtaggtcgctatctctacctattaaaatggatactagttgcaatttccaaactaatattgtgttagtttggcatgtgttggtccttcagttttttttacagtgttttgtttatacaggcaacattttatcctgggctatgtgagccaaccactcaaggcggattaggatttgattactgggtcaatctttcaattcctgaaatgtggttgtggcatcttgaaaatgttcctgaagcaagaatggagcatgaataaggtctgcatgctatctaaatatttttgcatgccatcgtttgtgtggcaagatgtcttgggaattcagggtttcagtttatgcattattttccttatggaattccatcttgatgattatatgccaggacaatggttttccaaatctccaattatagtttccctgcatttgttattgttgaagtatcatatttcttatccaatgactatcttggactatgctgtcacagattatgagagtactagtaaacaacaacagtaatatgctatcttacgtcgaaaatcacaaccaggtgatactatttgtctaattttgtctgttgctactaattatatcatgttattattactgtaatctcttcttactgaaagaaacagcacagatcctgcacatggttgagaaaacatataatgttaatatgtattatatcatgcttagaaacagcaaacttctatttcaccatagtgtaatattcttttaccaagtcactttctgagaaacttgaccaatttgattaactgtgtatagtgcattttgctactagcatatggtagccatttttatcctggcatattgggcttaatcgcaataaaagtctcaattatttcactagtgataattcttgtatattgacactgtacctcatttccttaaatttagagatttgttcaattatctctctagggcatggttttttccctgaacgtaccttataatgacatatgttggtgctcttttcttaagatgcatattttggtgctctctgcttagacattgctgaatagctggctgtatcataatattgtgagattggtttgaacaagggcatgggcagatgtgtaaaactcatgcttcattgtcttttgtactgatactatgcttgcgtaatgcatatatgtccatgaatttcagaatcctagttatgttttctggaatcctaatcaaatatttttggaatccttatggagggacactctacgtggttttctgcatgctgcttctttactttataggaatctttagatgtgtattcatgaaagcccaaacttgggaaaaaaaaccccaaatttttttttgagaatatattcattatttattttctcaccaaactttgggattaggttctcacatctaatattttggtacagtcaatatcagggcggaaatcttttgctgaaataattctttatgaaggaaagtgttcaaatagttctgttgacaatgatttgattttcagggcttcctcattgctcaatgtatgactatccctaacttgtaattttaatattgtatactttgattcattattgcacctcttaatttctttggtatagcccctgtaggaaatgatgaaaaatatttagtttacatcgtcagttctttgcatttggtcagttctttgcatttggttatggtagtgtcatgaacttagttcatgacagggaaaacattagttggaggtaggtcggatggcaagaacatgatcaggtggcttctcatagctgcccctaacatgtgatactaatagatatgctaacaaacaagagataagcatttgatctgaactaattttaagatgaggaaatatctagatgagaagcattcttgccttgctgcgtggctggcccagtaactagggatacacataggtcgactcgaggtctgacccatggtacccaaggtgataaattacaggccgggtcaagctgacccacgtatctttgcttgacccattgactcatggaacctcatgcattgacccattgaccctgaccccttgtgcattcaggcgcagcttgcaaatcaacgcacaaaccagcagatcccatgcatgcgagcaaaccaattgatgcggcacagagaaatgcttctgaaaatctgagcagacaaacacaatccgagcatataaactcatacatagcaaaccaattgctctgaattttttcactcaagaatggatctgaatacaatcagatgaaaatcccacacttgacctatagcagatggagaacaatctgcgcgcctagcagtgccaaatcgatccatctgagccaaccctttcttcagtggtagccaggaacaatggcgcagggccgagaacagcgcagggacgaggtggtaggacaaagcactgggaggtgatgcagatggcggcgacggctgagcatctgtgcatactcagtaggaggcaggtgggtcgacccacctctatatggccatggtgggtcgacccatgctgacccatgaaggccctgtttagtacccaaacaaaaatttttcaccctgtcacatcgaatttttagacacatgcatggagtattaaatatggacaaaaaaaaaactcattacacatattgcatgtaaattgcgagacaaatcttttaagcctaattgcgccatgatttgacaatatggtgctaaacatttgctaatgacggattaattaggcttaataaatctgtctctcagtttacaggcggaatctgtaatttgttttgttattagtctacgtttaatacttaaaatgtgtgtccgtatatccgatgtgacatgccaaaaattttcattcgcgaactaaacaggcctgaaatttgatgggtaaacccatgtgagtttgaccccatattcccacgtgcatccctactagtgacctgctacacatagagcccatgctccaagcctatgacagtagcgcactgctgtgtgtcagtgcagatggtgaacattattggccacatgctggtcaggtaaggttgcctgaattattttggccaactttaatcttcatagcctcaaatccaacctagctcatcctctaagcaagctgtagctcagctggactggtatgagataagggacctctgtgtttataggctttctgtatttattttattttatgacattccttatcataggaattgatgagcaataaattttacgttctgccaaaaataatcttctttcacatgtttcagataatcaaactaattacttttacaacaagtggtggtgcatatctcaacttcattggaaatgaatttgcacatccaaaggtgaggtacctacattacattcagaatttgatagccttacttcaatttcaattttgtgagcttgatctctcattttttgcagtagaccttctaagcattttttgttattatttcagagaattgagtttcctatgtcaagcaatgactattccttctgcctagctaatcggcaatgggacctgctggacaagggtgtccataaacatatattcaactttgacaaggtatgtaattacaagttaggaggcaaggaaaacagtctttgctgaaaacatgtgacatctgttaacatgtaatctctgaatcagtactattagtagttcttccttagctagtaagcatagtataggtcagtagaactttttctttctccaataagctagacctgctagtaagtcacgtatgttttccttggtcagcaagtcaagtagtcttacacagtaagctttcttagccaacaaggtggtgtttgaatctcctgaagatgaagattaagtgtttcacgcaaaatgaggtggtaataacgtgtgattaattgagttttaattattacaaacttgaaaaatagattaatgtcatattttagaacaactttaatatagaaagttttcgcccaaaacgcaccgtttagcagttcgaaaagcgtgccacttttatccaaaagtttatctagtttttgttggagaaaagtctagtagctgctgcctccacatgtactatatgtatgccaatatgcaatgcaagctaagcttttcagcagcacataatcaggttttcagctagactttaggttaccaaacatccagttttatcagcgggtcctaaaatatttggatttgtatagagaatcaacaccctttattacagaaaatgagctatacatgttgaccatagagacatttttgtgtttttgttgcattttccccaataaaacaagttctgagttgaaaacttttgaacaaaatggtctgatttatttgtcacaagcgtcaagggtgaccccccacaccccccccccctaaaaatgcactgtagatagtagatattgtacgactcatagggcataggaaaaacaagtcctggatgtcctttctggttcttgataccgaaaataagtttttaatgaatctgatgtttcttcagaatttgttttctattacaataacaaaagaatctcttttatatttcaactattgatggctggctcaaaacattgttgtgctatgaatgtgaatgatttgaactaacacgtaccaatttcatcccaggatatcatgagcttagatggcaaagagaggctaatttctgggggttcacccattgttcatcactgtgatgacactagcatggtatgtacatcttttgttaacagaagatcaaacctattttacaaactaataaaggtgatgctttttttgttcttttattttggtaactttatcattttaatcatagtattaattataaacatgcataatgttggattagggatagagaaagcaaatgtgtgaacaattgtaccttttagccccaaaaatacagtatgttgtcataccagtttaaaagtaggcaatatcagtagaagagaagcagaaaggtggggaaactctccctatacttaggccttgtttagtttgcgaaaagaaaatttttgggtgtcacatcgaaccggatatcggacatgaatgaaaaaactaatttcataactcacctggaaaccgcgagacgaatttattaagcctaattaatccgtcattagaacatgtgggttactgtagcacttatagctaatcatggactaattaggctcaaaagatttgtctcgcaatttccatgcaaattatgcaattagtttttcattttatctatatttaatgctccatgcatgtgtttaaagattcgatgtgacgtttttgggaaaaaaattttggaactaaacaaggccttaaaatgccctttaacaactatcatccctctaaaatgcgtagcatattgcaataccattgcatttgatagggtttccaatcaacataaacaatccgtagtccaaatcttgaaaaattgaaattgttgttgttgtgtgcaactcttagaaaaatttcatgtagatcttttccacttcaaagattattgcagaaacaaacttggtgttatcctagtccatagatcataataaggtgttttacacactgatttactgaggagagtgtttaacatatgctctgctttctttaaagcttccatccataaattatctgctaaactagagtgggttagtatactccgtaccaagtccataaggttataaagttatacctttcagctgctccatattattgagatttgtcaggaatggaatattaaaccactattccattttcttcaagatacttagtcaaagagccaggaattgttcgtaaggtgcattttccaatgacacaataaaaaacatcaaggcctgaaacgggaactgaagctaaattccttctcatggatgggacatagagaacattatttagatgaaggatgaagccgctttccaaactcaatgaaagttatcca

SEQ ID NO: 27833 - DNA, 39818 bp, Oryza sativa
caatataccgagtaaattgcatcgttggtacacgaacttgttaggtgggtttaatctagtacacggacttgtaaaatgctcattttggtgcataaacctgtctggtgcgtgcggaggaaggcgaaaatgacactacattgctaatcttattgatttagggcatatatctgagaaggttgctattagatatacacctcttcaataaaaaatagaatatgatatagtgatactagaaaatgattaaaaaaacgagcaatggtataaaggttagaaatatatgaaattcatcatttccatggtgaagaataaagtagagaccaaatttataaatattgaatgtcctatgcatactcactacacgtgtgtatgccacatcctaatcaacatcacttcataaaattaacattatcaagttattttggttatcattcgcacgaactagacaagttcgtgtactgaaacgagcattttacaagtttatgtactaaattgtacctacctaataagtttgtgtaccaccaatacaatttactcgcaatataccattacccttcttggggagccactgatggaagccagcgcaatccttattgcagaagcgacaggtcatgacagttaggtgtggcgggagacaggtcatgacagttaggtgtgacagttagctaatatgtgtttttagccatatgattttgtggcatttctttgcatgggtggctggcaggtcagcaaagtggctgccctacttgcacctatagcatcaagtgggatgcccacgaccctgcaggtgtgcagccgtgtatgtatgaacttgaacatgtcggattgttgaagcgactagttagcatgcacgtgcaaggcacgttttgacatatactttactaacgattacaaaagtagagcaatgagtgtggccattttctatgcagtaccctccatatgaattctccgtaataacagagtttcatttctacgcttccaagtaaattcttcatgataaagagagtttcgtagtcactccattctaaactccaacaagatataaaatttttctcgatttccgttagtatgttctttaaactgctaaacagtgtgtttcgtgcgaaaactttctacataaaagttgttataaaaaaataaataaatccattttttaaattttttataattaaattttaattaatcatatgctaatgacttgtcttgttttggttgcgcatttaatcttcatccttgttgaagaatcgaatgggacctaaggtttcatacaaagatgcatccacgccaaagaatcacatcatcatggttaagaatgcatcccccacatcatcatatcttatggttaagaatgtaaactgttcaggggaaacgggtgttgtcagtgtgttggtaaacatgaaaatcaggaagcatagagcataaaggtttgagtttcaacaaagttagctcaataattttgctataacagtgagcgtaagcttcaatttttcatgtgaacttatacagtcaattggatgataggcagttaaacaaattatccatgccgggattagattaaaaaaatcaccatatactgctctgtctcactgcaatgattagtcatacaatatatgatagatgcatttttcacacataagtaccagcaaatattacagtggaactggccgaagtgctaaacatatcgtgcatgtcagattatgatgcattctaatatgataggaagtgaacatatgagtagtaaacttgcttgcatatgcctacaatgttgccactgagttcagggaaaaataaacgtttcagttaggatgaaatgatcagaaaaaaaaaaccctaaacaaaggaaagatcaacaaacattgaatgttggaacggtgttgcccactgtaggttgttatgctttctcgacctcaccaaatagacctagaacgtaacaatgctttgctccctatccaggaaagccagagaagtaatataatccaacatctctaattgtgccaagagattgccttggacctggcacacatggaaggatagtaaatggagtattaatccctacagatataggttgtttgcagcaattgaagcctcacatcatactacatttgaagtcccaccgacctacatatgtaatcacagccagagaaagataaaaaggctaaaataataataagcaacacttgcttaatagaccgcagacactggagtttccaaacatggtagcttccttacttgaaacaacatctacatgaactaaaattgaaagttctaacaaagagaattgttcaagacttgaattgtatacctgtagaatgattgagtgctcacaagtcataggagagtcactatacaatttaattaatacctgcaggatatagtactatagtagatcatatgctttcgagacaattacttctaaaagcagagagaagatatcgatactttctgaacattatgagatatataagatatgtttcttaacatagatagatttctccaagtgagccaccatttaaccttgagtatcaatcaatctacacaacgcattgtataagtcagcctaagaacttaggagattaacatgccctaaaattaatggagagataactaccgtagcattacttttttctacaaaagaataacaaatatgaccttcttttctcagcatcagcactacacagaacaaaaatagtttgaagaaaataggtaaaacaataaatctgatctcctgttctataagctgaattcacccaaaattactgcaaaagatgaacatcatcatcatctagtgcattcagtataagtttcattattcaaaaaaaagagagataaagatgtaaatatttgtacaatatacaatttaaatgataatcgtactgaaattcaaaagaccacaatttcatcatttatgttcccacacctaaaaaaacaaattatcagatttttcaaatctgctagctcatattatgcttaaagtgatacaatattgaacaaagatccaatgaaatgagttgtgcatgcccaatatgttgtggcaacacactgctacattcaagcagtaatattttatttagaagagcaaagaacaggggagactgggaaattttcatagcatgaaactttgtaacacttgagatgcaccctaaattttttctcactaaaaaaagtttcagtgtatcatctcagctctgaaattaaccaatacttgatgttaaattaacatacctgtgtaagcatcagaaagcataaaagctatggtagttattcattcatgtatttctagagcatttatttagagcaggaaaagtgcccatatgttatttaattagcatttcacattttcaaaattcaaatttttagtatcgaattacaaaatataagcacataatcttactgtcatcaccaaagtgttcctctccacttaactttttgtatataccagtatagtgtggtgcaattgcagtaaatagttttattgttagcaagctaaagcagaggatgcaacagcaattattttattatagagccagaagccacaatataattctaaaacctaatttggacacaatgtatttttgctctagcataaagaggatgaacaattcacctcattgtcgatattgttgtagtccactcatttccattagacaaaccaattgaatggcattcattcggttcctgtgacaccacaatcagaatgtgggcatgtatgtggttttagtttaattcagcagagaggaaaatcatatgtatacattaccagaagttagcaattgaagaccttccaaaatctaagatgaaaaccaatgggtacatctgagatgcaatccaatgggtaaatctgagattaaaaaatgaaagttaatcagagcccattatccatatcaaaaccattctggactttggtgaagttataaaggaaaatataatttcagctggaatccagcaatatattataaggaatgacatgcatcttttttattatgattgacagagggagaaatcagtgtacgatattgtatacttaactaaaaatcaaaggtcagctaattaaaaaatataaccaaaacattcatgcagatttataccgttggactcaatacttcagcattttggtaatcagaatctgggtatgtatactggctaaatgaaatctgagggatcaagcggactgtaaacctccacatgaaatctgccattggcttacaacaaattcagatagaaatgaaatcagaataatatttgtgcttaccttccaaatccatcttgaaatcagcataatatttgtgcttaccttccaaatccatctcttctaacatcagtgctttcagaatgtgtctggtaggagagctcttttgatattaatgtagaaattgataatatcccagaagagaattggtagcccaaactgagtctgctaacattgattcgtagcccaaactgagtctcctaccagtgagaatcaatagcccacacctttcagaaacccgctgcatatgaaagtctaaatctcacaacaaatgagcaagttctgacatcgatgcccaatcaacatcgaaggtatacacaaaattgcagctaactcatggggaatagctcaggaccagtaggcatggggactggggagtctcgtgaatcccttcgacaccaggcacccctccacagcgccacccctcatccacttcgtcagcgctagagggttttgtcacatcatgagacagcagtggcagcggaaaagcggaacagcgattcggccgagggcgaccggcgcgacatcttcacatggtggcggcggagagcaacctaggatgtggcagagttggatgcggtgatgagggggcgcaacggggtggacgcctcatgacgatggtggcgcagtggaggcggtgatgggtccgacgtcccagcattagggaaggtccctcacaaggcaccatcgtgagacaacggcggcggcagcggcggcaagggaagagtgaggacgacagtgggggatcggcggaggcgacggaggtgggaaaggagctccgtgtcgcagcgtggcacacgggatttggaggatgcggggcagcggtaggagtcatcaaggagcgagcgcgcagagttatcgtgcgggggcgagggtgtgggcggaaagtgtggtggagaggataaggtcgccgaggatggaatcggattgatggatgagattatttggcttaacggatggatggtagggattgatctagttgatttggcctgtaggattggaggggtacaactcctcctttttatattagtatagatgtggggtgctcacgcgatgtgggagcctcatgaactctgtttgtgctgtcatgaaggacaaagagttcccctagttcaacatgggtgttggtagaagctgctatcctgcaaatagtgacacactgctggtagcggctgatttttctccctgatttttctcccttgatattgagttgacggggttaaattggactattttccttatctgaaccggtctttgtacttgaaggggtagaatactgtctcacaggggattaagtagactatttcctcgtttaacaaagtatcaatattctgatccacgtaggcacctgaactgaccggctgatggggcttatcacataagggttaagtacacatgttgcagagggaacaaaagggaaaaatattgtactcttgagttaaatcatgttatgtctgcattcagttccttttttttacttcggtgttaattatagtactcatattgcagatcatatattttactagaggacctttcctttttgttttcaatttcaatcctgacgcctcctatcagctctattctgttggtgtggatgaagctggtgaatatcaggtaactaatgctgtttgtatgaacttattcttttgtaaatatgcaagtggcaggcacatataaaaatgttggagcacctgacactttgataaataaaatgaatatgtaaaaatgtaaaaactactcgtagtgatatttttaccaaaatactctctttttttttaccaaaatactgcaggtgaatttctacttttgtttctcctcactagttttcggtttaaaaatgtattttttttcctcgaaaaagcaggagagctgcatttcatttcactaaggggaagaaaaaaacaatacaaaaacacaacacaaagaaaagcaaaaaaaaaaaaaaaaattacaaagtaggagtacccgagccctcctaccgagacccacacatactagactacccggggaacttagttgcctaggttagccgtcccactcaggagcttttgaaggcaagaagctccagcaacaccccaaagatggccctcgttttctatcacttgcaagactgttgctactctaggattggcgtcgttgaaaatgcagtcgttgcggtgcttccaaatctcccaagctagtaaggttaccaaggacttgatccctttcctcacctccttcagccggttcttggttgcttggctccaccacctcagaaagcggtcggtagagggctgaggcgcagcctcggctaaccctagtctcaagaagattgccatccaaacttggcgagaaaaaacacaagagatcaaaatgtgttggatggattcttcactttgatcacaaaggggacagatcactgagtgttgcagcccatttcaaaaatgtaattacatagggtgacaagagaaactctatcaactcttaattttctacttcttgtacttcttggttttgtgcttcatattttttgttatttgcacccaaatgataatttgctgtttacatttgtcagttgaaactaattgacatgggatagaagtgtgtgaaaggactaaatgcttataatctaggcttgatgcatacatcagaaaactttgccatgatagttaatgacttgatgctttaaatcctgaacagtttgtttcatgcctcgagaaaatcttgaaatttttattagctcattactaatgctgagaataagaacaactattagattcttgaagtacttgagtctgaatttattgaacaattgcgggtgtggattttcagaaccagcaatggcatgtattttatatctgtttgctctttagagttgtgttcccagcactgaagttattgtgcttctatcatttggccagcttatattgaacacagatgaaactaaatatggtggacgtggggagctgacgagcaatcaatatatgaaaagaaccagtgacaataggtgctgtttttcagttttcatatgatatacattgtgagtttattattttatctggaggtatccatattttgcaatcaaataagcattgttactttcatatagggttggtggttgccgcaactccttggaattgacattaccatctaggagtgctcaggtgggtgggtgtaaagatatgtgatgccagaactccttggagttggttgttgccacagctccattacaacagatatgcttctcttttaaaagaatacacacgcttgcaggtattcaagttggtccgaattttgagaatttagattctcaaggatgagcattgttgatagaccaagcaattcgggtcctcagaagacggaacttctctgttaatatctgaactcttgcaaacttaaagattcgcatggcaaaaactgaggtaatgggtacttgcggtcttttccccatgtaattatgatctgcattgataggtttattaacaatgcattttactgcaaacctcatcccagtgacatggaaactcacttatgttttcatatgccctttttgactgaatgcaattctgaccttagctttgtcttaaagagaataaaagaaagtaaaacatttttttttcatattcgagcatatttatcctatcgtccacagactggagatgctttgcacagtgcaatggtaggtatgtcaaaaaattttgcacatgcagactcctagacagacaaaaaaaatacaactagaacagttcacgtcagttacacacttaactacatgactgctacctccgtctcaaaataagtgcactcgtgggaatacgtgtccaacatttgaccgtccgtcttatttgaaaaaaattataaagaaattttaaaaaattagtcgcacataaagtaatattcatgttttatcatctaataacaataaaaatactaatcataaaagaaaatcaaataagacgaacgatcaaacgttggacatgaatagtgcaaaaccgcacttattttgggacggagggagtatagtcccgttcttttctctaacatgagttggagattaagattttcgtggcacgcgtttcaaactgctaaatggtgtgtttcgtgcgaaaactttctatatgaaagttgccctaaaatatcatattaatctatttttcaagtttgtaataattaaaactcaattaattatacgctaataccaccccgttatacgtaataaacataatcttcatcttaatcttcaggggaaaagaacaccaccgtagtgagaggatccttcaggtatgaatgtccatgcagatgcagattgttgggttgatgttcgacgtctctgatttgaccttctgttgtggtacaatatgaagtattgcagtatttatttagacctcaaattgcctgttctgctcactcgtgtaccttgattccatgcctagtgtgggcgtggcaccgtggctagtttaatcaaggatgctatagagtatatagactcatagctccacagtgaaacgctcataaggagtgctattgaaactaataaggctttgtttgttccagctgggaacctcgtaaggagtgctattgaaactaataaggcttcgtttattccagctggttcccagctcctttgccctcattttctctgtgcacgttttccaaactgctaaatggtgtttttttttgcaaaagtttatatatgaaagttgcttaaaaaaatcatattggtccaattttttttaaaaaataactaatacttaattaatcatgcgctaatggatcgttccgttttcggtgcgtactgttcgtgttgggtacacaggctaacgaacgtagcgtaaatataggccaacttgtcatccacaccagaatagatagcgctgtccaaagaaacctgttagagcatcttcaatagattggctattttagactctccaaatgcccatttagccaattggccaaaaatttagagtcatatttgccttttactctaacagtctctccatcccactctccaatctttcagtgggtcccacatgttagtctcttacttttttttccttccctctatcttccccttttcgtgagccgccggcgtgcggacgaggcgtccgtgggaggtggtcgacggagggggccgccgtgcagggacgaggagtcagacggcgctagagatgcgagagacgtggcggcggacacgatgatgtcggcggacgcggtgacgttggcggcatcgctggccgggccttctctagcgcgcacgagcgagcacctccggaggccggatatgccgcccacggcgcctcccaccaccagcgcgcttctctccgtcgccgtgcacgcgggcccgctcggcaccggacctgccacgcgcggccctcccggcgccagatccgccgtcgttgtcatcgagccgccgccaccactcctcctcgtcgtcgatgaactaccccttctcgtcgccgagccgccgctgccactcatcttcctcctcgtcgttgacgagccgccgccgccgccgccgccgccgctgccgctcatcttcctcgtcatcggcgagccgccgtcgccgctcccgcttcctgcatcctccgctcgggctgagacgaggccggcaatggatgccaccaccgctgcatgcgctcggcaatggaggatgtgcgtggagagagagggaaaccggcgtgggtcccctggatagctagccggcttggctggccaagtttggccagtgagggaggcagtttagctagtcaaatggcttagccattcaaatagctagtctgttggagtacaatttttgttcaaaattaccaaattttaacttgtaaagtgagatagcaatgctcttggagatgctcttagtggaggaaggcctcctatggataagaggtatagagctaaagaatactacaactctggtacaagcagacaatgataagttcgaaagtaagctgtggtacaaaaagtttttgttttggtaagaacatataactttaacagcatatggcatgaatatctaattcaaaacttctttgacctgccaagtttctccttttgtgatcttcagattatgtacaaatacagcgaattttgactgtttgagtcctacaatagcgttaacaagttgtacttaagttcagcttgtttcaccatctccggtttgcggtgcctttttaagcttcatatgttgcagctgcgatgtagaatgttttctcatatgtgctaccattaattttgacattttccgcaggcccaattttgttgcattgccttcttgacattatttcagttttgtgcaatggtacttttgcattgattttggtgctacatttctacccaatgttgttttatggtactacctataaatgtgccgtcagctgtaagaaacttctccactaagtaaaagaaaagacgcgaatattagggaagaacctaatataaaaaaaaattagaagggctcagctgtaaaaaacttctccactaagtaaaagaaaagacacgaatattagggaagaacctaatataaaacaaaatagaaggggtaaggcttcgaacccaggtcgtctagcctaccatcttgtggagctagccggaagacccctgggtgtttcgagtaaaagaaaagaaaaaactcacaactgttaatatactctcctctctctctctactttgttcttttgaactccataatttagagaaattctatgccgaagtttctatcagcaagatttatgtttcctttgaactatgttcaatttcctttatcaccatgctctttgatatttatggttgctcttctgggagtgggattaaattcatatggaaatggaacattcatattgtaccatattgttagattaatcctaccaactcctgcgagctggcctccccctatgtatgtataaaaggaggaccagtgtctctaagaagaaggttctaagttacattcaagccacatccaagggtgagtgcaccccttggcgttcaaaacatctaagaacacattgtaaacttcatcatttaacatttaatgaaaaacacaggagtagagcatgctctcaagcggcctgaacctatatatacatttcaacattctctcgcgtgaccctaacacaagctttggggatggggggggggtgggggtttgggggtggggttataggtggtggtggtgctgttaaaaatgtgaaatatgtccggccaagcagcgccgcaaccccatcgcctgtctcatctcgttctgtgacttccatccagacgcacgcacgccccatcctctccttgcttgatccgtgcacctcaaggaacaagcgctgctgttgccccacacgctggcccctcggaggacagcaattcccatgattacaatggcattagctctgttacagcgagcgcctcccctggttggaagtgagggttgttttggcttgtaaccatatcaaaagtttggtagtgctgtattgttgcaactcatttaaattggcaaggtttggtctcgattcaaatagctagcaagtactatttagaactacttcctctgttttacaatataagtcattctaacattttccacattcttagtgatgttaatgaatctaaattgatatatatgtctagattcattaacatcaatatgaatgtggaaaatgctagaatgacttacattatgaaatggagggagtacctaataattggtagggcaagaatcggccttaatggcttaatccaatcaggccatgaacctctcttttctgaaaatggcatggcactgtttatttggccttcaatatgatcagagtttatcacacgcactgtttccgatttgttccagtgcttgcacttcagcggtgtttgtctcagattctttgtttatgggaaagcagaaagatggtgaacttagctatcaatgcaaacggaacacatattagaacatgatgaagggaattgtgaagcagcgtctctctccagcacgatacaaaacacctgatcatgctttccacgcaatgcaaaaaccaaaatttcactactacagatgttggcccccgttttataacaccggaaaccacatatattggtacacacattcatagccagtacaaaacaaatatcaaaatgaatttagtcaaagaattaggacacgcctagggatcgggcgctcgatccggaggacaaaaaatcgggcgcccgtcccagccatcccatccagagagaacatcagagtcctcacagctctgaattaggacaacatgcacgcacgaaaatattatttgtagtacttgcatgcacaaaacaaattaccttttctctcaaattttttaaatgtgtcaagttttttaaacaaactttaaactacatgttctctcaaattacttatccaattcatgatccaattgcaccactaaattcattgtaattaaatctttaaaacaagactaaacatggctataatctgatgaaaaaaatgtttagctttattaatgaattgtttttaatgttgcacctatatcatttaaatgtttcatgtagtattcatatgatgtttcactttttaatttgtaataatttgtaaatgttgcacatgttcttctaggaatgttttagcatgtactttataatattttaataattataactccaccaagtagatcggaatcgtttcactaagtagatcgaaaatgtttcagtcttgtaaaaaaagctgaaacccaaccaaatcacctcataaaacattttactataacgtagtgaaacaacagtttccgaaagaaccagacgatgtttcaccctatataaaaataatgtttcagcaaatagtgaatagatgtttcaattattaaagacagtgaaacgtggtcagatcgctagatgaaacaatttggttcaatgtaatccattgcaacacttaaaccccgtgtacatcaacaaaacattttcagcttttcaaacgattgaaacattttcgatctacttagtgaaatagttctgatctacttggtggaactgcgtgcaacatttaaaaataattcaataataagctaaatatttttttcatcggattatatccatgtgtggtcttgttttaaagatttaattgcaacggatttaatggtgtaatcggatcagggtttggataaataatttaagagaaaaaatagtttaaagttcgcttagtaagtttgcatgacgtcatcatgatgctaggggcagaggttgcatggcataggaggcaccagggctgcggcgtgcagcgtgatagcagtgctgggaggggagcccgatttttctatggctggatcggacgcccgggcgccatcattttcgaaagaattagtacctttacaaggatcaatatggtcttgtcctactcccttgtcctcctccctccgtttcaggttacaagacgtattgactttagtcaaagttaaactgttttaagtttgactaagtttgtagaaaaaggttgtaacattttcaacccaatataaatttattatgaaaatatattcaattatcgatttgatgaaactaaattagtattataaatattactatatttgtctataaaattagtcaaacttaaaacagtttaacttagaccaaaatcaaaacgtcttataacctggaacggagggagtattagataaacaacaacgcaaaccaaaatagtagtaggcctaagtgacatgcccataggcacttgactagacctagttttcgataagcacttcgatcatctgctaagtatgccagcaagctagcagagtcttcctcttctcctgctttcatgtctaaaacaggagaaaatagcaacggtgagtacatagagtactcacaagccaccacaacaacatgattaatgcaaatagggttaaaggaagtccaaggttcatttgcacaaagctaattttcgtaaatatttttacaatcctatgacctagccatctattatttctataaagctaatgcccactaaacaactaaagctcaacatacaaatatagtatttattagaactcctaaaacctacatataagcatgccacatcaactcattaagcacataaagctccacgtgcaagcatatagtaattatatctacaatttatttcataaaaaactaaacatacacatgctaaatcatcattctcaaatcattttcataatatttcaatcaaaatcgtttcattatttctccaatatgtaacatatatcctgtagcaaagcatgggtcatcatctagttttaacttaaaaacaacatcaagttttcttgtttaaccattcattgagtgcacttctttgattactcgcatagcgaatgggcttggggttatacctaatgatcaaattgcttacatttccaccccccgttgatgaaacttatttagtgcaaggtcacatacttaagcatggggcagataactctcttatattcttttttcttggctgtacgaatgaaattccgttacctaacccggggtatcatttgtacaactgtcatgatttaaccattctcctacagacgataaaagaatttcgtgtaggtacattacaccgggatacccgcaacatggcaagagatgaacatgaaggttcaacatcctcaccaacagtgcggatgtatgaggctgactaggatccgaccggagatgctcccagatggacccaagcaccacactatgagttgccaaccatcccgatctagcaaaatgccaaatcaagatgggttttgtagaaagaaaagctaaaacggctatcagaaccgatttagagatcaaaatcagcctctaggctgattcagatcgatataaggataaagtacccatctcgtgggcaaagggaaagtttacgggacaaacctacaaaggtgtaatcgcactctcgcagcgacggcagacgatttacggcgcaaatcaacaaagatggacaaaagctaggataaagtagaaaacatggctagaaagtaaaagtaagagaataattcgattgattgtgtagattgtgtggtaaattgtttgaaccggctttgtcccttatataggggttggtcttgccctctacaggccctcctccacgtccaactcagagtagaaaccaaaggaaacccgaaacatagcctctcgagtaaggaatcccaaggcccgacaaaaacagactctggctcggactctgacagtatgaccggccacatacctgcaatcagactggccctactagccggtcagactgtccctgtgaaggaaatccggtactttccaacctttggcaattttcccctatttcgtccataggtgccaaatttgggtgtaaacaaatagaaccctggcggaaagacaattccattttcgtaggtcccgatgacaacaaagacacagcggcggtgacgacagtggtagtagacgtgacaaaaactcgaaactctaaacgtaccaaacgataagaccagcaacacgactcgacaatgcaacgcaaaattcaacaaagaaaaacataatagaacaatgcaagggcacaaatatggctaggtattggatgcaactttttttatagctatttctggttatgggtagataaaaactcactgagcaacgaaagctctgataccacttgataaaccctgagttccacttgacactcaagattgttgttggcccgatcttttggtgagttcagataactacgatttgggagaaaagttgacgacccgattacaaccgtacaagatgttgtgttgcgcctttgcgatcgatacacctctccatgggttgttgagctagacggtgtagatcaaccttattcctgtaagcaaatcaaaaatccaagcaagaacaagataaaagcaatttaaattgcaaatagaaatgaataaacgagataagttggggatccgaagaacaaggagacggacggttcggctggcacacgcactacaagcaagtagcaatggctaaaatttaatctaacaaaacccgagataccctcaaggggtacctagctatttaaggaggtgggaggacaacctagtggtccctagggtcgtgctccaccagattggggcgcaccccacatgggcgccacttgggctggggtcccagacaaagttacaagcccataggccccgcaacaccttgtttcctcaattgtgaccaactgagatggaattcggtgatgaggctggatccgttggtgctcttcgcatagtccacttaaaagaacctggttcttccaatcaaaacaagacaaactcgagataatatgattagcaataacacgtatctctagcttgcatgttttatccacatgtacaaccgttgctcacatcatggatgaacaagaagatatcaaggtcatgttctccaagtgctggaatccaatttggccacttgctacactactaacatcaaacggccgctgaatctgcatacgacctcggttttcgacctgtgagtacttgatggaaagctctcggagtcctctttccaacggatccatcctaatcgccaaattctacaccagtcatctgaaactgaggaaacaaggtgttgcactagtcatgggcctttgggattgtaacttcatttgggaccccggctgtgggcacccgaaaattataccgtccagtgcaatttgtgatcaccacataattttggatgagtggaatctatacacctataatcgcagatgttggaggcataccacaaggaccttcggccgggcctaccgaaaccagagacgatcaaaggcgcgaattggaagcaagcggcaaagatctgagagacggcatgggcgaaagccatatggcgaaagccgtggcgtgaagtctacaagcctcgccgaagacagacctcgccatgaggggacaagtcgaaggtctaaggcgaatgccttgccacgaagggcacaagtttcgctaggcatcggatctcactagaaggaggcccagcaggccgacacaccctccgaaggcttcgccaaaggctgggccgaaacatttggcccattaagagcccatataagtaaaagacattgtatacccacaaagatgtccgtatcatgagggtaaccatgtaaaatcccctgtaaaccctagaccctaaaagggagagtctgtaatggggctataagtagccccctaggacaatgtaacaggggatccaaaaaattttttttactaagcaatacaattgtctttacttacaactactattgagaaaaccacgcctctcgacgtgacgcggttgtccattcgacaacagctggcgccgtccgtgggtacctccgagcgaaaccactgatgccaccaaagaaggtcgttaaggagagagttaccaagcgaaaggaaggtggcagcgaaggggacatggtagccgaagtgggagcagagccttcggcccccgaaggcgaagctacagcgtcgcctcctcctgtggcgtcgccatctctcccgccttcggcgcccgcgtcttcgatagaggcggagacggcgaaagcggcggcagcggcgaaggccctctggaccagagacgtgatcctatcatctcaagcaccgggggtgcctccagccaccgcctttgcccaaccagccacgacgtcgacagcaatcatcgtctcgcaagccaacgccaatctcgatgctcaaggagaagctgacataggggctatgcatcagaatatggctaaacttcaagacacgcttcgccagatgcaagagcaacagcaagcgtatgaagcagcaagacaaaccaagacccatactcagcagctttacgctcagccccaagtctttcccccacatgctgtaccagcaccagtgtacttcgccaagcccgccacagccgttgccgtgcgagcgaccccacaagtggtctcggcactggttcgcctggtggcacctcaaggccagtacctgaagcctactcacacgccacaaaaaatgatggaagcagctacgaccctacaagcacagtttcaagccttcttgcaacaactcaatcgaccccacaacaatgtaccaagagcttcgcctccggcccaagccaagggaagcccaagtcagggtgcaccagctcgatagttgctgggccagttcgccatgccaagccaagctcaaggggtttcttctcaaagccaactgctacaattcaacccaagcaccgcggcacaagcacccatgactttcgtgcaagccgtgccctgtgggttcggagcggccccaccaccaaatcaagcctggaatcaagccatgttcaacccagctgtggcgatgcaagctacctcgacagaccagcaaaaccaagcgatgatgttcggcacggggcattaatcgacacctgcagctcaacctcatgtgcaagctgtagcttcgccattcgcgcttccatacccacaatttaactggccctctcagttaaacgattatatgatgctggttttattcgtccttgtcgatatgctgagtgggtttctagtatagttcctgttatcaagaagaacggcaaggtcagggtgtgtattgatttccgaaacttaaataaggctaccccgaaagacgaatacccaatgccagtagccgatcagctggttgatgctgcttcggggcataagattttgagttttatggatggtaatgcaggatacaatcaaatctttatggccgaagaagatatccataagacagcttttaggtgtcctggtgcaatcggcttatttgaatgggttgtgatgactttcggctatggtcaaaccgggtggcaaaaagggtctgcccctcagctggggaattaaaagtcaccccatccctccccagttcaagtaccctcccgtcccaaggtattcgggagagacggatccgaaagagttctgtccatctacgaatccgtaattgcagttgctcacggcgatgagaataccaaggcgaaggtaatccacctcgtgctcgacggcataggggaatcgacaagggagtacatgcgccgattctcgcaagcacggtgccaagtacaagacataaccaaagcatccatcgtcaacgcaggttcggccggcttgcttgagggtgaactcacaaggaagatcggacgcaaggagccaaggacgatcgaacacctctttcgcataattgatggatatgctcgaggtgaggaagacaccaagcgaaggcaagagatacaagctgaatatgacaaggcggctgcagccgcaacagccaccgtgcaagctaacgctcaaactcaggttcaagcccaagttgtcagttcggcgcccgttctggttcaccctacccctccggcgaacccagcgcagcattcaaggccaaaccaagccccgatgacatggaaaaaattcaggaccgatcgaggtggcaaggccgtgatggtagtcgaagaagtgcacgtcctctgcaaggagttcgacgcccagcaagcgggcggacatcagcaaccttttcgcaaaatgatcaagaaagacctgtactgcgcctttcacggatgctcttcacacacaacagaacaatgctgaaatattcggcaacaaggcagcactcaagcgccgaggcagcagcaagctagggccgaagaggcgccgtgcgaagcggtcctcaaccaagcacctcaggccgaatagcgccaagacgcacaatgaagagtgatgcaggtcatcacaagatccgatcccccctcgcaagtgtcgaaacgacagcagaagatgcaactttgagcagtgcatagcattgttttggtaggagaaggggtcccaagatacttgacgaagcagatatccttcggaccggaggatgccgaaggagtccttttcccgcactaggaactgttggtggtatcggcagagatggctggttttgaagttcggcgtattttgatcgacagggggcagttcggctgatgtcatctttgccagaacatatgccaagatgggtttgctaacattggcattatctcaagcgccaacttcactcagggggttcaggggcgaagcagtgcatcttttgggttaggccctcctcaatgtcgccttcggcacacaaggaaacaagagagaagaagagatactcttcgacattgttgacatcccatacaattataatgccatcttcggccgaggcactttgaccaagttcgaagcaatttatcatcataactacctcaagctcaagatgcttggcctagtcgatgtgatagttgtcaagggttcccagccttcggctaccacggtagcctccttcgacagggaagttcataccctagaagtcgaagggcaagaaagagccaggccaatgctgagacccgccccccacggcaggttgtccgtttgcagatagatgattctgaccccgccaaagtcatatcactcggcgaagaccttcatcacgcccttcggcaccttttgccatctcagaatgtctttcggcctaaggaatgcaggcgctacattcgctaggctggtgtacaaagtcttgggatcgcaattggggcgaaatgttgaagcctatgtcgatgacattgttgtgaaaagacgcaaggcattcgaccatgcgtcagatctgcaagagactttcgacaatcttcacgcagccggcatgaagttaaactggagaagtgtgtgttcggtgttcgcacgggtaagttattggggttccttgtgtctgaaaggggaattgaagctaaccctgaaaaaatcaatgccattcagcaaatgaagccaccatcgagcgtacgacaagtacaaaagctcacggggcgaattgcagcactcagctgattcctatcaaaggcagccgaaagaggattacctttcttcaagacccttcggggggcaaattcaaatggacgcctgagtgccaagcagccttcgaggagctaaagcagtatctgcaaagcccaccagctctggttagcccagcagcaagaagcgaactattgctctgtcacgccctgaaaattgcctaatttagtaattcattctttaatgcatttttagaaactattttaaaagcttacaagttaaactctaataatctaggaaaaatttcaacataaaattgagctagataaaatttcattaaatactttgcttatttatctattttctagatttttctgggaattatttgagcaaggaaagtatttttaataaatgaaacatcatttcacgaattattttaattgagaaagtaaaaaaaaaccctcttctaagccgttgggttgttcccagcccaacccttttccctccccttgcgcagccgtgcggcccaagccgagccgccgcccctccctcctctcagccgccgacatgtggggcccacatgtcgggcctttcttcaacctccggccggccacagccgagaccgagccgcagccgtcccccaccaaatgcgccccaaccggccatcctcgagtccgattggttgaggtgtttttatccctttattgtcctctatcttttcccccaagaatcagagctaatttctttgtattttatccgaatcaaactcgttttcgagtttatctctccaaactaacccttagagaacctcacccatgatgatttcataagggctgttcaagaacaaatgatgggattcatcaacgagcagattctcgatcccacaggagaattctattacgatggaaagcctattcatcaagccggtccttcttcttccgatgtcacgaagttgtactatacgacataaacaaagattgcaaagtcttaaggaattgtaatacatgtatatatttatataagcacacatgcatttacttttgcgtacttatgttggtaatatatgtgtatatttacttaggtgcaaactcatattttgttaatatatgcatatggcctctaattacttaagtgcatatatttgtatatttcttatatgtatttctacatacgtatgcacattgcatatatatatatatgtgtgtgtgtaaaaacatatagtacacatatatatgcacttaagtaaatataggccatactttacttaagtgcatatacatatatgtgcacactatatgtatctgcatatatatgtatagatacatatagtgtgctcgtatatgtatatgtgtaatatatacatttctatattatgcatatatatatatatatatgtatttaaacatatatatgcataatatatatatatgtatgtatgtatgtatgtatgtatgtacaggcagcacacaacacaaccaaatttttttaaaaaaaatctttagtcccggttggtaacaccaaccaggactaaaaatggctctgtcggccacgtggctgagccaccaactgggactaaagatggagctttactcccgggtatttgaatcgggactaaagaccgccatctttagtcccggattctccctcccgattcgctacctgggagtaaaggggcttgcgaaccgggagagacgagcacttctccagtagtggatatatcattttccagtcttctccaattgaaatgcaatcaagagaacctcaaagaccatatatgtgttcaattgtcgaggtatttccgtatgttcggcacaatcactaaaagataaccagagttaattggtgagcagctaattatgtttcacataaacaatctcatgttatcatccaaataacatttggttgaccatgtgtggtatcagatatctacacagggacatgtacgttttcctttttggagatctttacagatggacatctatcaatctatgggtaccttcgtaagaggttcggtggttattcgaggatctggtatgtcataggctcatagcagaacattcaactaaagatgggactacttgtatgagaatttatcagttaccaacttgtccatcaaacatcagctgacttcagacgtccagaagcttctgcattgtggagtgtggaccattcaatggcgtaagctagaatatcatcaactggactccttgctatggagtaggtttaccttgagatcatgtcatccttaagtattcttcttgccatcagaacgtgacaccgtgaggtctgctgactccagttggtcatggagatgcttattgtcctccactaggtggttatattcaatcattagaccttcagattgcttttgggcagctagggctttagcctctgcatccttggcctcatttgccttttcttttagctgacgtttcatcttcttaatctcctcattcaatgaagctatgtctttctggtatgtcttgctctcatcagagcttccaataagctttgcttcgtctagtgtcttgttcagctttgacgcagcctccagatttcttttgagccctcgtacttctctgatatagttatggagccggtcaatgaccagagcaaggaataaggagtatcctgaaacaatgtagtgctattatgatatgtccgaaaatccattatggaactagaaattgcatgacagtatgatactggcatactaagactgaaaggtgaactgctacagagaggtctgttgcatttggaggtaattactactaccacctctgttcaattttgtaaggcgtattttgatttcaaaagtcatactaaaagattttgaccgataattaattaatatacaagtacaattagaccgtatagcttatgccattacatttagtactttcacacaatattggttttacagctatttgatatatcttttatgaaaagttaatggtcaatgatgaggacatcctccactattacctgctggcaaagacgcaaaagtcgggcggcgaccgtgtgagcctctgaataatcccaccttacttagcttgggaggaagaagccaccttaaaagggagagccactcttcccctattggactagtttttcagggagattgggcctttccccgagtgggtgtgcctatgaactgttgaagtctggacaaccttaagttattggacctcagccaaccccacctggatcggattgttatcatttggtatcagagctaggcccttgttaagggggtgggaatgatgagggcatcctctactattacccgctggcaaagacgcaaaagtcaggcggcgaccgtgtgagcctctgaataatcccaccttcgagctaggcccttgttaagggggtgtgaatgatgagggcatcctccactattacccgctggcaaaagtcgggcggcgaccgtttgttaagggggtgggaatgatgagggcatcctccactattacccactggcctggcaaagacgcaaaagttaggcggcgaccgtgtgagcctctgaataatcccaccttcgagctaggcccttgttaagggggtgcgaatgatgagggcatcctccactattacccgctggcaaaagtcgggcggcgaccgtgtgagtctctgaataatcccaccttcttaaaatggagattgggcctttccaccttcgagctaggcccttgttaagggggtgggaatgatgagggcatcctccactattacccgctggcaaaagtcaggcggcgactgtgtgagcctctgaataatcccaccttcttaaaatggagattgggcctttccactagccaccttaaaatattggactagtcatgcttagctttggaggagaaagccaccttaaaaggaagagccacccttcccctattggactagttttttagggagattgggcctttccccgagtggatgtgcctatgaactgttggggtccgaccccacctaggccggattgttatcatcatagttcagtcttaagactttttgaaattaaaatacacgtaaaataaatggagggagtatagtactccccatgagcatcagaaaatgatgcactaagatttttcatcatgatatatattgaagagaagaagtatttaatctgtaccaaaaaaattccatcaattacaccaaccgatcaatagaagttcgataaaaaaggaggacagcatagtgtacagcattgatgactaatctttttaatacttttctggagcaaagtttagttactgagaatgggaagtcctttcatatatttatttcttgaatacattaccttttattgttcccccgtacaggtttaagtacttcgcagatgtaagcaagttaaccagtttcagggctaatggaaataaaagaccaaaattctacagaaactaacagaaaagcttgttttcaaaataagattccccaagtaatgaatagtttaagaaaaattgggcatgacgtatgctgcattatgaacaaattgagatcattcactggttacttggttggattttgcacattcccgtctacttatttccaagtcagtctttacgatagttgataccattcaatataatttatcatgtaaatatattagtaattgtgatattttgtgtgctggatctgaagcaagtgtaatctacataaatctaaaacaaaacaaaaaaattaagaaaacaaatcaggagacctacatcacaagcatctgttttaaagttcaattggaccaaaatagcagtgttaatcaagaacacccaggacctccatccatcatcagaatggatgtaccaaaacaacatatattaagctcggaattgattcagctatatatattctatctgttgtggttaaaggacatgcagcagcagttgcacaaaagtgcataactgcaagacaaccaactagtcaacaggaggttttggaaaaaaaatcaatattagtagatcaagaaaaccactactcatgcctgtttaagaaaattcatgaattaacaaaaaatgatttgaactagaggagtaggaagtagtgacagtgtatgttaaattcatgtttgtttaagaaaattcagttgagtgcatctcatgttaagaaacttaaccgtgcatttcttacatgccaaaatcaaagtgttcatagctcacactcccagctacttatataaaagcatatgcattgcaatatttgagaatcaaacaagatggaatatttatctgctctattcactatctttcaacccctctagttccaatctatgcttagtaccttcaaatctcgtacacccacttcatgcctccaaagttgggttttccactatgtgatagttattccattgtgaaacaaagtccacatgaactctttgcacaattttttaaaataaacaaaaatggcgaagttccaaaaaatgagcaataaaaaaataatgcaaacatattacacataatagtagatgcatcacgcagaaatttgttatgtaacttttagtggagtaatcacaaagattcgagtcagaacagcaatcacagtttgcacaagcacgttattaaacttgagttacatgcaagcattggacacaaaataaaaatgttccaagcaatgtaaaaaatgttctacatattgttgtaaaattatacattgttgacttatagaagaatgagtaaaggaaatttattgctacagctaatgaatatatcaaactttcttcaatgcttatgccatactttttttaaaacagtaagcagtaagttcataaaaaaaatgcacaagccaaaggaccagaacaatcaagtggctttattaatactcaatttacaaatgcatttagcacgaatgggaaatttaacttggacaaaagaacctgggtgacgaaccacagaacgacagaaggccacaaaaacaattggatttctactacattttatttatgcaacagtgacaaagaaaaatatatctaagacattagcactgcacgatttccttttgtggggaggactctatcgcagtatggcaattaattatagcacactgtggatgcgcaacgaaacacaaagcaggatataatggaggatctaaagatataaccaggttatctctactgcaccgtcgccaaaattcagctcttagaaatcgccgaccccgacaccgaacacagaattatgattaaatcagatcgtggttataccctaaccgaaaatcagttcatccgttctcctccgattcaccgcgacatcaagatgatagagcgcagaagggaggggctaggtgcggtgcggacatacccatgagcgaggcctcgaggaggtggcgggcgaggaggacctggtcggtgggggtgagcgtccccgcccccgcgccgtcgagctcgccagcggcgcgtccgcggatcttgttcatgctgtggacgctggaggcgaggacgacgaggacggtggcggcgacggtgcgcaccatgacgggtccgcggccgcgcttgagacggtcgaggccgagcatcgccagcttccgcaccggcgtcttgaacagcagcgcgatcgccacggcggcctccgccgtgagcaccgtgaacatcagctggatcatcgcgctgccgtggtggtgctggggagagagagggagagggggggctgggatttcgggttttcggcggagggaggcagcgcgccttcacacttgtagcgggcacagtgcgttgcctcggtgtgggtcttggaatgtgtgagaaaggcgttgccgctgccgttggcgttggtgttatggatggcgtgttgcgggaggtattctttctttcttttttgagagaattgctttgttcacccgttttaaagcttaacaattaaactgatatattttttctagtttgcttgtttaaccaagcttttaaaaaagaacatcccatctgactatgtttccactacaccgtgaagtttttatttttttaaaaaatatatataattattattcgtaatgaccaaactgccctcaaaccctatccattcactcccatcccactcactcttatatccggttgaggcggcggcgcaccgggaggacgagccggcacgacagctcgtcgacggaggtaacggcggcggaagcagaggggcgtgaggggaccggacccgtggcggtgcgagcgcggagaaagtagcggccgcggcggctgctgcggcaagcgaaaggaggagcgggcgacagcggctcgacgacgatgaggaggagcaacggcggcggagctcaggttgtcaggatgcgtaggcggtggatccggtggtgactgggcgtgcgagccactgatacagcagcgctgaggcatgtgggctgtggatccggtggcggtgggtcgacgatggcggcgcggcggtggtctcagggactgcgggtcggcaacaacgcatgaccccgcgtcagcaagctctccgcgcgcgtgatgcctccgtcttcctccgtgcgagcaccgccactgggttggtaacgatgatgatgacgccatggctaagaggatggtggctcacgaatacaaaaattgttatactctatttatatttttgataaaatatagtcaaataagcaaagacagaaggggcatttttttctctaattaacaccgttacatgcccttaacataatagagtcagattgtatcttcaattttaaaaagaatggtcatacgaacaaagttgaaaaaaagataatcaaattgttagtaacagggtcaaccccttcatttttctggtcatgtttttgtagcggttgcctactaccggctagaataactgcgggtacacggtttggttgaaccgttgaaggacttgggaacctattcatttgatcaataatttgttggtaataataagggcttctttataacaaagaatatttgtaggatatttaaacgatttaaattaaatataaacttttttatttgtgtctttaaatcaagggaattatcatctcaaaatttttatgatagtaatccctatccttgtaataggaacactttgaatggtttggcctttatccgtcatagggcacctccaacggaggcgcttacataagaaaaccaggttcttttgccaagtaggatcagcgtgactcttaggcctcgtttatttcccaaaatttttttgggtgaatagttaatttagtcccttaagttttaccaaaagctcaatttgatccttcacgtttcattttgtccacatagctcctccaaatatttgttttggcttgaaatcatccttggaccctcttaatatgccatttggctatttctagtcaatatttctattaaaaactatcatttttgcccttaatttgtatacaactatatactagaaaagagaaagtaaacataaataaacaatattacagatgttcttcccattatttcaacatgtgcacatgaaacttaagcaattgctatcgtatacacttgctagtacataatttattttctttttacataatatactatgtattatctataaaacattcaagcatgcaatttttctcttatatatgtgaatgatgaggggtataagtatcatttatgaagagagttgttggttcaaggataagtttgaactaaaatgaaaacttgaaggactaatatggatagattgaaacatcaagaactaaactgagccttaggtgaaacttggaggatcactttagctattcacccaaatttttttcccaaaaatgtcatatcgaatctttgacacatacatggagattaaatatagataaaatgaaaaactaattacacagtttgcatagaaatggcgagacgaatcttttgagcctaattagtccatgattagccataagtgctacaataacccacatgtagtaatgacggattaattaggcttaataaattcataaagcggtttcgaggcgagttatgaaattagttttttctttcgtgtccgaaaactccttccgacatccggtcaaacgttcgatgtgacacccaaaatttttcttttcgcgaacggccttagcatatgaagccactgcttcgtgcggcgccgacgcttggtggcgctacaatcttgatcccaacaaatttttgaatgagcgcttgcatcgttgcaacggtccttgacaaaccaaaaaatttggaggcaaacaaataacccgacaaacccgcatccatattgcatcaaaaagcaatgtttctcaactactccgtccgtttcatactataagtcgttcgactattttcttagtcaaacttttttaagtttgaccaagattgtagaaaaatatagcaaaatttccaatacaaaacaaacatattatcaaaatgtactaaatgctaaattttatgaaactaatttggtgctataaatgttgctatatttttctataaatttggttaaactaaaaactttgactaagaaaaaagtcaaacgacttacaatatgaaacggatggagtattcaaaaaatgcgatccaatcaaccagatagtaccaagaaaatacaaatgagatcaaatcacccgtacacagagaactatgcggggcaatccaacaaactttccacataccaacgcctacaaaaggacccaccctcattgtgggtgaaatgggaactagggtaccctattcccctgatgaattagtaagtaactcataattaagataaatggcaggcataagccatccataaaaatagatggaagacttaggtttagtcacttagggacccgccctatatgtgggtcccgggctttcctaggtactttagcatccactcatcttaaagaaataaggtaaggggtagtccaggatcctcattgtttcggggcccggacacgcccttatccctactcaaagtgctaattccgccccatggagtgtagtgacatacaaaacctatgtattaagatcttaagcgaaagggatcatggatgatcaatctggggtccctgggtctcggtaaactggaacaggcccctctgggatatgtgaagcttacaagaaatatatcttaatagcaataggaagagatagatttagggtcggcctgttccagggccccgggcccactgctgtcgataggggaaccactcttcctaaagaggagtgttgaaacatataaaatctacaatgacccaaaactctgagcacaagggaacgcaacttccttatgtccccattagcaaaggtttgtcttggacccggtcctgccctgggtaccgaacttacctcaatccttgtaagtcctacgatccttaatgagaggagcgtggatgtcacatccagaatattttgtgtataaaatccgtgtctaggattcagccaggaaaaacaaaacgacaagtaaatatacagatcgaaacctaaataaagcgtaaaatactaatagaagaggcacttagtccccagaccgaaaagaaacaactgtgaaaaatagacgatcctagcggtgcttcagctccactccacaggcaaactcgactgggtataagccttggtcctctaacatcatctttagctcagaagcactacacttctgaaaagggggaataattagcaaggctaagtacaaccactgtactcagcaagccacacccatgatgcagacgtgcaaggggagacaaagaagggtttgtggctatttgcataaaggtggttgcaaacatattatagttgaaagcagaaaaactattgattaattaaggcaatattaaatctccactggacaatgctaccccacattgaacagacccaaccaaaccacctgaactacaccagttctttaagttaaattaattaatagaattgagtctaatcacgatggctagttgatcgcccataaccgcgggcatgactattcgaatagttttactctggccaaaggtgcacaactgtacacacaaggcacaacccaatggcatgttattgtgcccattcttgcttatggtaagcgcggtaagtcttctagggattcccgagaaccggtccttaattgccatgggttcaactagaaaaaccatgcacccacaaccctccattatgtcatattttagttgaataattacaaccagtgaaacatggccagatttctcgagctcacagctcatcaagataagtgtgaataatgtaattatcccattttgtgagctagtggtaattaagcatggctaagcatataatagttccagcaagatcaacataagtgaaacaatcacaggtgggcccggcgaccccacctgtcagtcccatccccaacctcagctccatcccaaccgccgccatggccgcccactccaccgccaaatccgccacctcccgtctcctgagcttgcattcaatagcgtggactcggtcccctccatgtcctccaccatttcctccactctccccatgaaaatcggtgccggttaacccgcccaccacccccacgtcggcgccctacttcgccggccgttttcgctcctcccagccacgatttccctccccaagcgctataaaatggccccctcaccttccctcatccctttttcccctttccccgtgctccccgcacatagaaaccatttccccgcatcgctccctctctccgccgtcgccggcaagctccggccgcctctagccaccgctctcgccatcgccaccactggcgtcaccgctccacaccgcaccccggccctcacctttcttcccctaaccgtcgctgaaatcccaccgccaccgccgacccgagctacatcaatgcctaccgcctccgaccgcctttcgccgccgctcccgtccacgccgacccatgccatcgcctccctcggctccgcaaggacgaggagatcctcggtcgccactcctcctccgcagatcatcgtcggagtcccattcaccatgcgaggtgaggtcgccggtttttcctcttgctttcggcaggcgattcacgccacctcgcatctcctctccccctcctaaccctttcatttccttccttaggtacctccgaccgtcggccgccgtttctcgctcgcagaacgccgccgaaccgccgtcaccattgcctccccgaggagcccgccgccggcttccccgttgccgtctcgctgtcgccgccttggtgagcatccctcctctcctccccgctcccttccgccgcttgccgtgccgccgctcgccgtcagtagccggtggccgtgcgctgccgccgccggtggccgtccggccaggccgccgtagccgcgctccgcgcccgcgctactgccggctgtatcggacagccgactgccgcctcccattggtcccagccgcggtcgatctgggccatcggatcggcctcggtctccatccgggctacccgtgtgtccgcatacgtggccgccacgtcggtgctccgtcggagccacgtgtgcgccacgtggtgcactagcccgtgcctccgtggacttggtccacggtaggccgaagcccttgagtcaccgatgggtgggtcctgcttgtgcaccgcccgttccctctcggtgatgtcataaatcgagtttaattgcacaataattcgttaataattctagaaattcatttaaatggcttaaaacttctaaatttcatatctaattcattcgaactctgaattgagccattcaacttgcaaaattcatctaaaattgagatctacatgtttgtttacttttcatgtactgtttccttggtttttattagagtttttcctcgtttagcgtgctagcgtgtagttcccgtcgtttcggaagatcgctttcgcgaggatcagagttcggaaggttgttgtgaagaagtaaggcaagtcacacattctccttgagcattttgatcataatttacaaatgttttatcgtttgcaaataaaattgcatgtcttgctaattacatgggatccgggtattacctatctgtttggttgtgccatgtttacttgatatctggtcctttgtcaacattgggtaataaatcgactagctcatgttacttatgtgacctagctagaactttatgcttagccatgcttaataccactagctcagttgatgggataattacagtattagacctttttagtatcagaatgagctgcgtgctcgagacatctggccatgcttcatggctgtaattatccaactaaaacgcgactgaatggtgggctgtgggtgcatggttttgctagtcgcaccatggcaattaacgaccggttcacgggaaaccctgaaagaatttaccgtgcttaccacaagccagcgtgggcaacgactgggcttgtagtgtatctttcctctagccgacgtacccaggcgagggtgggtgtgatggagttgggtcagccggggtgtccggttgatcggcttccggattcaccgcggcacgagagggggactgcccgttgccagctagggacgggggcgaactctgaggtgtggtgcgatgtcacgccctgaagttcccctcctttgcgttaaattcataaaataaatcgtccaaagaaatggttcaaattaacctagagatgagttccttaattaatcaatgcaattaataatcggaaatggcgtggtggaatatttcttgagttccccatgttgcaatatattaacaggatttttattggaattttcagagccttggaaataattttaaccaattcaaaatgagcaactgcaatatttaaatctcagggaaattcctttttccttttctttttctttcccttcttttttctttgttgggccgtaggcccaacctccctcccgcacgccctctttgctaggccagcccgctcccccttccccgtcccaaagtcctccctctctccctctctccttcgggcaccgacaggtggggcccacctgtcggtcgtccctaacctcccgccgcccacttcgccccaaagccggcaaccgccgcaaccaccccacctcctccgctcctcccgtgcccacgccgcgccgttcccgcgtcctccccacgtcaccgcccatgccccgtcactcccgcccgcgcgcgcgcgctcgagagggcgggattcgatttcggatcccaccccactctctctctctctccaccccacgtcgccggtgaaatcagaggctttcccggccacgtccgcctccccctccacctataaattgctcccccgagcctcctcttccctttttcgctctcgccgccctctcctgtgcctcctaccgagcccgcgccgctcgccgctagcgccgccgcttgccgccatctctggccacgcgccgctagagccgtcgccgtgccgcgcaatcgccgccgtcgcgctcactgagcccgcccgcacctcggccgcctcttggttgccaccaatcacccccgatgccccgtttccctcgctcgctagtgagctctccattttcatccatctctggccggccactttggtcgtcgcggtcgtcctctccatccctaactcctctcctccccttctttaggtgttgttgccgcccgtccgccgtccgttcgccggccgtcgccgccgcttccatcctctgctccggtcgccgccacccctccgatgaggagcccctctcctccctacttccctctttcccccgcgcgccaccgctttccgcgcgctcgccattgcctccggccgccgccgcggggctgtgcgccatccgccaccgccgcttgccgtcgccggtggccgcgcgccccaccgctgccgcaccatggccggccggccggcttgagccgtgccgagccgccagccgccaactccctccccattgagccactacccgtggggcccacgtgctagcctcccccttgtgccgctgacatgcggggcccacctgtcggcgccgcccctcccccttgctgacgtcagccctgggcaatattgcgcaataaattgattaaggactttttctttattagtaaaaacacagtttctcttctaaaattcatatctaattcatccgagctccgtttaagtccattcaagtctcagtaaattcataaaaatccctagaatccattaaaaatggtttggtttcatgtttcagtagtcttatagcatgttttgcttgtgtgctttgtttgtcgcgtagatttcggccgtttcgtcgatccgcggttcctcgaagacgttgctgtggtctcatcagtgcgagagcaaggcaagtcatgcattacaattgatcatgttgtacccaatttacaaatatcccgcatttctattaaatgttgcattcttttacaatgtcatgtgggatgggtcctattactcagccatttattgttcaccctgtgccattgataacttgggtatcaaaatgattagatgttggtttaggaaatgcttagccatgcctagttcaactagtacacaaatggggatcacattattacatagacttattagcatagctttggattggtgccaccgcaatggtgttagttaattaaaatacactgaatggtgggctgtgggtgcatggttttgatggtcgcacccatggcaattaaggaccggttcacgggaaaccctgggagacttaccgtgcttaccacaagcgagagtgggtaactgcttgatctgaggtatagctcgaccctttcctaggcaccggtggcgagggtgggcgtgatggagttgggtcggctgtggtgtccggttgtccagctgtcggattcaccgcggtgcaagaggggaccgcccactgccttttgaggggtaggggtgaaacccatggtgtggatggttaggggagggttatgcggagggtcttgtcacggtttccccctttgcagtatcatggtgatacttcggggcatggcgacatgtgtggaatcgtgtcttgggggtacagttgtacacctctggccagagtaaaactattcgaatagccgtgcccgcggttatgggcgatcaaccagattcaccgtgattagtctcacccctagtttaacttaatgaactggtgtagttcaggtggttggttgggcctgttgcaacgtggtgtagcgttggacagtgattggttaatattgcttaattactacaattgttttactgctttcaacttctgcttttaaatgcctgctttatgcaaaagaacatttagcctcctttggatatatcctgcatcatacctcctctttcggtatgacttgctgagtacagtgggtaatactcagtcttgctctcttttcccccaccccagagctgaagatcttcctagtgggagctattttgtcgatgttggtttcatcgctgccgtcaaggattgcctgtggagtggaatcgcccgctgcaggagtcaagcttccaagtctagctcgttttatcttttccgctgcatttgtaatcttttatattttcgtaagacgtggatctatatgtcaacaattgtcgtttgtgtaccctggctggtcctagacaggggtttaatgcacatccagcttagaaattctggttcgagaatttctgggcttgacatgcaatcggttatagggggttatgcgaagggtcctgtcacggcctttttccggtatgtcgtggtggcatgtcagcgcgcggaaacgtgtcgtggggctgtgtcttgtgggtacagttgtacacctctggccagagtaaaactattcgaatagtcgtgctcgcggttatgggcggtcgaccagattcatcgtgattagtcccaccttaataaatcaactcaatgcactgtagttcaggtgggttggttgggcctgttcaatgtggtgtagcgttgatcagtggagatttaatgttactttaattactcaactgttttactgttttgctcaataaaatgctttacaaccgcctttatataaatagccacaagccatccttgtatccccttgcacgtctgcatcattggtgtgttttgctgagtacggtggttgtactcacccttgctattattcccccttttcataagtgtagtgcttctgagctgaagacgaagttagaagaccaaggctcaaacccctagtttagttttgcctgtggagtggagctgaagccccgctaggatcgcctttttccgctgctgctgttttcgtttcagtgtgaagactaagtgcctcttctgtaagtattttacgctttatttacgtttggaactgtttattacttgtcgttttgtgtaccctggctggtcttggacaatgatttaatacacaaaatagtctggaaatttgggctaaatttctgggcgtgacagcacccccttgctgacgtcatcacgtgggctttattgcgcaataaaattaagtaaggcttttctctttatagtaaaaacacatataatcttctaaaaatcataactaattcatccgagctccgtttaagtccattcaagtctcagtaaattcataaaaatccctagaatccaattaaaatggtttctcttcctatttcagtagacttatagcatgttttgtttgtgtgctttgtttgtcgtgtagtttttggccgtttcgtcgctccgtggcgatttgaagtcattgcaaagatcccatcagcgcgagagcaaggaaagtcatgcttgtcaattgatcatattgcaaatgctctacatttcctttaaattctgcattgttttataatgccactgtatgggatatttacctactgttctcagccatattctttgtatgccattttcctttgttaaccggggatttaatatacttagatgttggtttaggaattgcttggccctgcttagttgaactagtacacaaagggggaatctcattaatactagacattggttattaacatagctttagattggtgctaccgcaatggtgttagttaattaaaatacactacacggtaggctgtgtgtcggcacccgggattgaattcccgaatacctggagcgtacagtgtactagtcccatgatcagtggctagcacacgcatccacaacattgttatcacatccatacaacatatttgacatataaatagataagtggtcctcataacttaacggtgcataggtcttacatagtagttaggccgaccggccaaataaaagagtttaaacgtagcagaaaagataaagtacataagttcttcagtatgcccatctaccaaaagacacaggcaaccgactaggaataaccctagaaagaaccatcctcgaaaactccggtacccggtgcaaagtaatcgtcactaggcacctcacatcctgcatccaagtctaaaaacaacaacaagaggtgggtcaatacactaggtattggcaagtcctacccaaaccttgggaaacataggactattgcaagctgagatcaaggatggctatatttgtggctattaatgaccaaatttggtaattcaagtatcggagatgaagataaaatcgaagcagaatccaagagatagatcgttctgaaaacagaataagaatcggctgcgatcagaatcagtagagttcgagtcggacaaggtagccgattgggccaattccgacaatgtgactcggtaaacgtcgtcgggttgagttaatgtgcttcatatggattgccacgcacggattgggtcctgaaaaggcaattgtatctattaagtaggatattttatgtaatttcattagagataagtttgggcaaaagtctgtcgcaaagacttatggtatcttagagtttgttagagataagagtcgtgtccgacaagaacatattttgtatctcaggtataaatatgacccgaacccgtctaatcaaacaacaatcgttcaatacaatctcgacgcatcgcgaccctttttactttcgtttatttcgacgagttcttgcttttgggttgagctgcaccgattcgatcttccactagaggt

SEQ ID NO: 27834 - DNA, 6393 bp, Oryza sativa
caacaaaacggtgttgttgaaaggaaaaatcgtgttttggttgagatggctagaacgatgttggatgaatataaaactcctagaaaattttgggctgaggctattaacactgcttgttatatttcaaatcgggttttcttgagatctaaacttggaaaaacttcttatgaacttcgatttggtcatcaacccaaagtttcacatttgcgtgtttttggttgcaagtgctttgtcttgaaatctagaaatttggataagtttgaggcacgttctaccgatggattgtttcttggttaccccgcacatactcgtgactatcgtgtacttattttggggactaacaaaatcgtggagacttgtgaagtttcttttgatgaggctagtcccggtactagacatgaaatcgcaggtacactgtcacaggttcaggaggaggatggtcgtatttttgaagacgagagcgactacgacgacgacaacgaggtcggctcggccggtcagaccgggcgccaggccggtcagaccgccggcacaccttcggtcaaaccggcgcatgacgtgcggtcagaccggccagggtcgtcggctgagggatctgttgatgctgatcgagatggtcctccggagattacaacttcgaccagtacggatacagaacgtggatcaacttcagaagttgctgctcctttgcacattcaacgacgacatccaccggaacaaattattggtaatataggtgagcggactacaaggtctaaggtaaggactcatgatgtttgtgcaaattctgcatgtgttgcttcttttgaacccaaagatgtgtcacatgcattaactgatgaatcgtggattaacgccatgcatgaagaacttgaaaattttgagagaaataaagtttggactttagttgaaccaccttctggacataacattattggaaccaagtgggttttcaaaaataaacaaaatgaggatggtttgattgtgagaaataaagctagacttgttgctcaaggttttactcaagttgagggtttggattttgatgaaacttttgctcctgttactagaattgaggcaattagacttttgttggctttgctgcttcaaaaggttttaatttgtatcaaatggatgtgaaaagtgcttttctaaatggttttatacaggagaaagtttatgtcaaacaaccaccaggttttgaaaatcctgatttttccaaccatgtttttaaattgtctaaagctttgtatggtttgaaacaagctcctagggcatgatatgataggcttaagaactttttgcttgcgaaaggttttataatgggaaaggttgacaaaacgctttttgttcttaagcatggtgataatcaactgttcgttcagatttatgtggatgatatcatctttggttgtttgactcacgctttggttgtagattttgctgagactatgcgcagggaatttgagatgagcatgatggatgagttatcgtactttttgggattgcaaattaagcaaacacctcaaggtacttttgtgcatcaaacgaagtatacgaatgatcttttgagacggttcaagatggagaattgcaagcaaatttctacacctattggttctacagctgtgttggatcctgatgaagatgaagctgttgatcaaaaggagtatagaagtatgattggatctttgttgtatctaactgcttctaggccagacatagaatttgctgtgtgtttgtgtgcgtgctttcaagcttctcctcgtgcttcacatagtcaagcggtcaaccgaataatgaggtatttgaatcatacacttgagtttggaatttggtattctacttcatcttctatatgcttaagtggatattcagatgctgattttggaggttgttgaattgataggaaaagtactagtggaacatgtcattttcttggtacatcattgattgcatggtcttctaggaaacaatttagtgttgctcaatcaattgctgaatctgaatatgttgctgctgctagttgttgttcacagattctttggcttttatctactttgaaagattatggttttaattttgagaaagtacctctcttttgtgataatactagtgctatcaatattgctaagaatcttgttcaacactcacgcacaaagcacattgatattcgctttcactttttgagggatgatgttgagaaaggagatgttgtattgcagtttttggacaccaagttgcaaattgctgatattttcactaaacctttggattctaatctctttgcttttctttgtggtgaattgggcgtaattcatccttttggcatggtttgagggggagtttgtacctcatggttttatcaagcaataatatgacaatgagaaaaaaatgagaaaagagagctttgttagcagtatgttgaaggtttatttgtctctagcatagtgtcacgcccagaaattcacaagtaatttctgaactaatttgtgcattaaaaccctcgtccaggaatcagccgaggaacacaaactgacaatttaatatacagattcatcaaaataactaaaatgatttatggcttgagtcttgtaattagtgtggaggtcatcaatagcatccaaccttgtagtcatctgcaccatagtttgattctctcctccccgactatgtgcacaaatcatccaaaaatcatcaccatgttttagatggtagtgatatataggattctcgagacgatccttgagatgatgccggagacgacacaaagcttcgtaaacaactccttcacaagcatagaagaaacaattggcctcactagtaaatgatagttggagaagatcttccttgtcaaaaacgagagtaccggttgtcttgcaatgcaattggtctccaacttgaatagatactttagtcctttagaaaaatgccttgctttcttgtgttgctcctctcactaatctgaccaatcttcttgggcacatcaccccagatttcatcaaagcgtgccatcatattttccaacctctccttgtagggattcatctaaagcaagttgaaagacggggaagggaggatgggaaaagcttttgcaaggagcaatgggataaggaggaaaacaaacttttgcaaatagatttttgtttttgcaaagactcgtccttatgggtttaaccgtttggcttgacctacagtcgagatggctctgataccaacttgtcacgcccagaaattcacaagtaattcctgaactaatttgtgcattaaaatcctcgtccaggaatcaaccgaggaacacaaactgacaatttaatatacagattcatcaaaataactaaaatgataaatacttacataagaggcacttagtcctcaccatgaagaaaactgcagcggaaaataaaatctagcgaagcttcagctccactcccacagacagcgcaactgggatctaagccaaaggtctgctccttctggatcctttttcttcaactgaggtttgataattattgcaagaatgagcatatgacatactcaacaagccacacagcaaatatgcaagtgcacaaggataccaaaggatggcataatataggctcatttgcgaaagcagcatttagcaaagatttaagagaagtaaaacagtagagtaattaatcatcaattttaatcaacactgaacagcaccccaatgctgcacaggcccaaccaaacctgaacaaccaaccccgatcgtacagatcaaacctccaaaccaggaattatccattccaaactaggagtcaagttaattatcacattattaccattaatgagtagtgtgggactaatcacgaaaaacattgttagacccgcccataaccgcgggcacggctattcgaatagttttactctggccagagatgtaccactgtacccacaagacacgattccacacttgttgccatgccctaaagtaccaccacagcactgcaaaggaggaaattagtgacaatacccttcgcacaacacaactcaccataatgcaccattcctggatcataatcaccccctcaaaaaccagaggcatggactccccagcgacccccacggacttctcgctgcttctcagtctggcaccccgtaatgaactatgctatacaaaaggtaaagccgttgcccacgctagcttgtggttggcacggttaatgtctcacaatagtagctcgcgaaccggtccttaattgtcatgagcacgaccttcaaaaccatgtgctcacaatccaccattaatcatattttaattatcaattaattatcataacacgattgaccatcgtgagctaccattcaatataaccataagtaataatgtagtatatatgattcatcccattaatgagctaatgtttctaagcatggctaagcaattatatatatatatatagcatttagctgaaccaatccaatctataaggtccaaactaatcaaattataacccataggaaaataaagtcatcttcggccataatcaaatcggaaggctcaccacccgatgacattcgaaaataatgcatacgttgaaataaaacaatagctttaaatgggttcaacatgctcaaagggttgtttgggatctgtgtgacttgccttgcaaacaagcatcttcaattcatcttcaagaacttctccaacgatcgaacgatcctccgaaacaacggaaaactaaacctagaacgcaaaacgagaaaaaacactaataaaaaccaaataaacagtacaattaaagttcataaataggtagatcttgaatttagatgaattatgagacttgaacgacctcattccgagttcgtatgaattagatatgaattttagaagatttaattccaattaaacctattaaagaaaagactattccaaattgattaaacaatttacaaatgacttatagctgagtcaaaagattaaaaccggaaatagattagatcatatttggtagatgacatatattaaaaaggaataatatgccattgaaaagaaagaacggatttatatcgattttggacggctgagattaatctcgaccgagtcgaccaagatcggatggcttggattgacacacagcagcggcacaacagcggttgcggtggcacacctacagcagcagcgcgacggcgacgtacaacgactaaacaacgacgtggcggcaacaaggcagctagcgcagcggtgacgctagggcaacagctagcgacacagcaacggctgcgctagggttagagcaacagcggcggtgacacgaccgagggattgaaacctaacccgaggggacacggatagaagtctcaccgaaccaaagcgaccggagagggagggtcgacgatgacgatccggcgacacacatggaaacgatgacgacgctagggccaaacaacagattagattagattagattaaatccctagggataaattacaccggtaaacgacatgggagagaggagagctcaccggagaagacgacggcgacgaccaagatgacgacggcgaggggtgacggctagcggcagcggcgactagggcagcggcggctaaacaggaggaggaggctaggggcggctgaaaaaaaacaggaaaaagatggggaggggtcggcttaaataggggaagattgaataggattaggtgggccaagggaagcacgagaaagggggagagggagggactcggaggggagagggcagggtaggcgtgcacggctgggagaggccgagagggggaggggaaaagatatgggaggaggggttgcctagaaaggaaaggtgggggaaacagatgcggtgccgttttgggaaaggaaaaggaaacgataccggaaagagaataagactcggctcttcatacaaaacgaaatcgtggcggcaaagaggtcagcggatacaacgaacctcagacagggagagtgaaccgggaatgattcacaaccaaaggaggaaaaagaaagaattattaattacttttccaattaaattaatcactgaatgatctttcatttattaaaaatacttccaatgctcaaataattctgggaaaaatccagaaaatacttggacattaaaaatatttaatacaattttatctatatcaacttaatgttcaaaattttcatagattttattcacacacttgctttaatcattaaataatttctaaaaattcctttttcacaacgttttataatttagcgatttcagggtgtgacacatagcttgtatgtattctagtcttttcatgagatttagattttgcttttaagggagatgatgcatgacatctaaattctacttgaattaagaaaatatgcaatgttgatgctagcatatggtttgatctataaatgctatatat

SEQ ID NO: 27835 - DNA, 59897 bp, Oryza sativa
  unsure (1)..(59897): unsure at all n locations
tttattactttgtggtttagatgaatgcgaagaagctaaagaattgaggtttttatgtgggcttaacaaagaaattcaggacatgcttgattgtcaaagatatacatctctttctcatttgttacaacttgcttgcaatgctgaaagtaaaatagaggaggatatgaaaaagaaacacgctatgtctttgcctccaattactaactatttgcaggaagtgcgtaatcacgaaaaggaggagagagatatgaaagagccaccaattccactgttcacactcaagttcgagacacctccatcatctaaagaggacatccaaggtaaagtaaatggtactgaaattaatcaaggtgagtgcattgttaacgaagtaaatttgtccacttttcatgcaaaagtagagcaaccgttagtggaaccaaatgctggaattcttttgtcacaagttgatttactcgctgttcctggtgataaagaaaagttgtgtgataatgcttcacttatatccatgccacaactagtgaatgaacatgctattcctagtgtttccttgtgtgctaattttaagcatgctgttcatattgttaatgaagttgaggaacgtaaattgctatcttctttaaatactttgggctatgttcagtttgatgattttggtgagctcgataatttgaaggagaaattatttgctaagtatgatttgccatgtctaactaatgctatttttcatatctttggcaaatataatgatagaggaatatatttggtgcatagagttttcatttgtttggatttagagaaacatgttattgctaatcacactatttcgagtttctctagttttgattggatgaaacaggttattttgaatggactatatgaagaacaccatatggaaaaaccgaggacggttttccgtgaagaaggggaggatgatgtgaccatggctactacggatacatccgttgctcacatcatagatgaacaacaagatatcaagttcgagtcctccaagtgccaaaatccaattcggccacctgctacactgcagacttcaaacggccgccgaagctccatacgacctccgttttcaggccgtgagtacttgatggaaagctctcggagtcctctttccaatgcatcaagcctcattgccaaattccatctcagtcggcagcaactgaagaaacaaggtgctgtgacacctgtaatgggcctatgggcttgtaacctcatttgggaccccggcccaggtggggcccatgtggggtgcgccccaagctggtggagcacgaccctaggcacccctaggtcgtcctcccacccctatatatagctagttaccccttcagggtttcttgggttttgtttagatgaaagtttagccattgctacttcgcttgcagcgcgcgtgtcggctagaccgtccgtctgcttgtattcgaaaccccaacttatcatttgtattaaattcctatttgcagtatcagattgcttttatcttgttcttgcttgtttcttcgatttgcttgcaggaatagggttgatctgcactggcaagatcaacaacccacggagaggtgtatcgatcgctaaggcgcaacacaacgtctcgtacggttgtagtcggatcgtcaacgtttctcccaaatcgtagttatcacaactcaccgaaagatcgggccaacaatagccttgagtgtcgagaggaactcaaggttcatcaatctccctctctctccccctcggcccaagctgagccgcccactcgcgcgtgcgcgtgttcgcccgctgacaggtggggcccgcttgtcggggtcgtcgtcttcctcgcgccgaaaccctagccgcgccgcaccgccgccgcctttccaattcggccgcacctttcccgatccggtgaaatcgattgaggggaaatgcttcccgagatctcctctacctttttccttttggaatctatcgctatttcgctttggaaatcgccggattcgagctcgaatcggattcgtttctttccctttaaccctaacctttccatcgcatcgccgaccgccgtgggccttcgccgtcgcttcctagcctctataaaagggatccctaggcccttcgctacccgtcgccaccctcgctttcgcctctcgtcgctggtagagccctagcgccgtgccgcttagcgccgccgttcgtccagccgtgcgccgccgtcgctctggtcgtcgctcggggaagccatcgccgggttcgccaagtcgtcaccgtcccagtcccgccctccgttttcaccgaggatcgtcggagcaccgccgtcgtcgtcgacccgatcgtcgccgccgcttctaccttgacgccgatgccgtccgttgatcttccgccgttgatttggtcaccggtgagttcgccgcgtcgcccgcatcgttttggtgcccttcgttagcgctgtcgtgccgtagttcaccggcgagcttgcgccgtccggtcatcgccggtgatgacgtcatcgccgacgtcatcgtcgccgtgtctcgtgcaccggtcgtgggccgatggatcctggccgtccgttgtggataggatagatctcggccgttcgttccgtgagccgcagccgtgcgcccggtccaccgtgcacccgaacccgctgacgcaataatcctcttttccttttcaaaaataattctttattgcgtcataattcaattaaaatccatataaatgctttaatccggtttaatatttaaaaattcataactaattcattgtaactcggtttaatgtggttccagttgcaaaagttgaataaaataaagatctacatattaaaattatccataaattgaattaaatttatttaatcctttttaaataggctgtaattagatttaatcttgtaaaattcgtaataaattcatatgaagtcagaatgaggctgttcaagtctcatgtttgtttactttatatgtattgtttatttagtttttattagtctttttcctcgttttgcgtgttagcttgtcgtttccgtcgtttcgaaggttcgcgagtgcgccggaagtgttcaagaagattaattgaagacccgttattacaaggcaagtcacacagatcctaaacacaattcctttgagcatgttgatcctatatttaaattctctatttgtttcaactgtgcatttattttttaatgtcaccgggtggtgtgaacttattcctttgttatggcctgtttgcattgattactctattccttgataccttgtgttattataatttgactagttgagctttatatattggttcagctagatgttagacataattgcttagccatgcttagaaacattagcacacaattgggataactaatgcttcactattatttaatgatggcttaatgatagctcacaatggtcaatcgtgattggttgattaattaatgtgccaactaaaacttgataatggtgggttgtgagcacatggttttgatgatagtgctcatgacaattaaggaccggttcatgattttcggttgtgaatcatttaccgtgccaaccacaagccagaatgggcaacggctggacactttgtataacaaggctcactgcggagcaccagactgagaagtggcggagataagcccacgggggtcgctggggagtccatgccttgtttaagagggtgattatgatccaggaacggtgcactgctttgggttgtgttatgcgaggggtcttgtcacaatcactcaacatggtgacgtgtctggccgggcacggtaacatgctggtgggttgtgtcttgtgggtacaatggtacacctctggccagagtaaaacaattcgaatagccgtgcccgcggttatgggcgggtcgaacaatgtctttcgtgattagtcccacactactcattaataataatgtggtaattgatggtaattaatttagctcctggtttggaatggtacattcctggtttggagataaatctgtgcagccgggtatggttgttcaggatggttgggcctgtgcagcatgggtgtgctgttcagagttgattaatattgatgattaattactctactgttttacaatttttactatttgctaaatgcttcttttgcaaatgaaccctatattatgccattctttggtatccttgtgcacttgcatatttgctgtgtggcttgctgagtatgtcatatgctcaccttgctataatcaatcaaacctcagttgaaaacaagttgcgaaggagaagacgtttggcttataccccagttgagctgcctgtgggagtggagccggagcttcgctagaccgtaattccactgcagttttcttttcttttgtaagtatgtaacgttattatattgatgaatctttatattaaattgtcagtttgtgtacctcggcttattcctggacgaggatttaatgcaaaaattagttcggaaattactagtgaatttttgggcgtgacatagctaccggaaagtccaggccacccgcccgaagtgtctgacccaccgattggatcgccaatcgctttcgccgccatcaacccgagcaccacgtctggtcgtctccctgttgattgcagccatcgaacggtttagaccgccgcctgaagtgtccgattccaccgatcaaaattccgttgatcgccgccatgctccaccttgcgtccatgtctgtccctggacaccccgtgtagtcgtcgcggcgtggagcacctccctcgcacctctaccatggatctcccgtaggctctgataccacttgttataaaactggccttgaaatcacatcggaaaccaaacgcggaagaaacgctataggagatccaaacatgatgacgacaccgaggcacgatatttgataacggacttcagccgaggcctacatctccggggcactgattacgggcgctcctgtaacgccccgattttcgttcgggattaaaaatcatttaataatccatttcctagaaattaaataaaagttaaatcaattcaatcaagtgaaattattgggagagttaaaattttcctttaaaaatcattggtcgggaatattttgtaatattccttctgccctaaaatactcggagctcaagaagtaattataataatacaaagttcatttaatcaactgaattaaaaagaaaacaagttaaaatctccctttctttgtctttgggccgccccggcccaattccccttttccctcccatggcccgcgccctctctctctctcggttagcctcccactcctctcttgggccgtcggcccgtttccccactccctcacgaagtctgctttgcctccaccttccaactatccctccctctgtccccgacaggtgggacccgtggaccctacctgtcatctcctacctccggctcccctctcccaacggccatggccgccccgtgctccccacatcgccgccaatcccgcacgccccgcgttcaaatccgtgcggacgtggttaccgcccactcctccaccccttccccctcttctcccctccaaaaccgccgctgaactgccccacttcaccacgtcgccggagcccaccccatcgtcggttgccgcctctcccgggatcgatcccgccttcccgagcctataaaagggatccccgggctctcctcttccgtttcctcctcctccccgagctccccgcgctctctcccactttccccacgcgagcccaagcgccgccgctcgccggcgaccctccaaccggccgccaccgctgctcctgccgccgccgctccgcacgaccgccaccaacgtcttcgccacgtcgtgccgtaacccagcatcccctccacttccccattttgtcgccggaaccacctccccacggtgctcccactccccaccactcaccggcgtgctccagccgccgcctcccgccgcactagccaccaccgagccgcgatgacaccaccatcggcatcgccgtgccgatctccaccccggcccctactacattttcccattccgtctccggaacgccgccgccacgcgcaccacctctcttcgtcgccattgccacctccagccgcgtcacaatgccgctttggtccacgccgacccacgccgtcgcctcccttggcttcgcaaggacggggagatcctcggccactggccctcttcgccggaaatccgctcgagctccacccccctcggtcaccggtgagatcctcctaaaattgtcgtggtcggtagtcgtttccggttacctcgcaccagtcctcacctccctaacccctcaatgatcttccttagatcaaggctgagctcgtccgccccttcccgagcgacgcccgtcaccggagctccgtcgcgccgtcttcccgaggagccccgccgccgccgttccttgccgtcggccgctcgtttgccgtcgtgccgctcggtgagcactcccttccctctcccccttcctccccttcgtcggccacctcctgtgcctgctcgtgacgcgccgccaccacttgtggtcgtccgaccgggtcgccgtcgccgcgctccgcgctccacgccgctaccggttgtgtcgggcagccggatgccgcctccccttgtcgcgccgcaccaccactccctagcgtgcgtcgccgctccccgcaccatcgccggtggccgcgctgccgcgtgctgtcgctcggtcaggccggcctgagccgtgcctgtgtcccggctgcgccgccccatggccgcccgatcggctagggccgatccgggccgtcagttcccgtggaccggcggtggaccgcctcgatggtcccggtccacgatggaccggtgcccttgtgttgccgatcggtggggccagcttgccggcgccgcccctcccccttatgacgtcagcaacccccttttcctttggaaaaataattaataattgcgtcataaatcatatttaattctagaaattcatttaaatggctcaaaacttctaaaattcatatctaattcatttgaactccaaattgggccattgaacttgcaaaattcatctaaaattgagatcaacatgtttgtttactttttatgtactgtttcctaggtttttattagagtttttccttgttttgcgtgccggcatgtagaatccgtcatttcagaagtccgcggtcgcgaggatcagagttcggaagatcgtttgaagaagcaaggcaagtcacacattcgccttgagtattttgaccctactttacaaattttttccgtctgcaaataaatatgcatcgttttgctaattacatgggaataggtttcacctatctgcttgcttgtgccatattatttgatatctgtcctttgtcaactttggatgatagatcgactagcttgggttactatgatgacctagctagaactttatacttagccatgcttaattaccactagctcagttgatgggataattgcagaattagacatgttagtatcatgacgagttgcgtgctcgagacatccggccatgtttcatgctcataattatccaactaaaacatgactgaatggtgggctgtgggtgcatggttttgctggtcgcacccatggcaactaaggaccggtttgcgggaaaccctagaagacatacagcacttgccacaagcgggaataggtaactacctaatttgaagtatagctttccgctggctgacgcatccaggcaagggtgagcgtgatggagttcggatgggccctgcgacggcctatgcggctttctgattcgcctaggcacgagaggggactgcccaccgcctgttgggggcgggggtgaaacctgaggtgtggtgtgcttggtcagagggggttatatggagggtcttgtcacaatcactcgacatggtgacgtgtccggccgggcacggtgacatgccggtggattatgtcttgtgggtacagttgtgcacctctggccagagtaaaactattcgaatagccgtgcccgcggttatgggcgatcgaccagattcaccgtgattagtctcacccctaataaatcgacccaatgcactgtagttcaggtgggttggttgggcctgttcaacgtggtgtagcgttgatcagtggagatctaatttactttaattaatcaactgttttactgttttgctcaataaaatgttttacaaccgcctttatgcaaatagccacaaaccacccttgtatccccttgcacgtctacatcattggtgtgacttgctgagtacggtggttgtactcagccttgctattattccccttttttagaagtgtagtgcttctgagctgaggatgaagttagaggaccaaggctcagaccccagttgagttttgcctgtggagtggagctgaagccccgctaggatcgcctttttctgctgctgtcgtttcttttcggtgcgaggactaagagcctcttctgtaagtattttacgctttatttacgtttggaactgtatattacttgtcgttttgtgtaccctggctggtcctggacagggatttaatacacaaaatagtctagaaatttggtctaaatttctgccacaccctaaaaatcccaaatataaaaattgttgcttaattggaattattagaaataattttaaaagcctagaagagaagatctaatttttaattaataaattccaatataaaatttggctagataaaattttattaaatactttgcttaattctatagttcatagatttttctgggatttatttgagctaaggaagtatttttaataaatggaattgcttttcatgaataatttaaaatgaaaaaggtttaaaaatctctcttttggctttgggccgaaagtcggcccaaacttctctctctctctcccttggcccaatccggcccgcagccgagccgccgctcgcgcgcgcgcgctcgcccgctgacaggtggggcccgcttgtcggggtcttcgtcttcctcgcgccgaaaccctagccgcgccgcgtcgccgccgcctttccaattcggccgcatctttcccgattcggtgaaatcgtttgaggggaaatgctccccgggatctcctctacctttttacttttggaatcgatcgctaaatcggtttggaaaccgtcggattcgagctcgaatcggattcgtttctttccctctaaccctaatctttccatcacgtcgctggccgccgtgggccttcgccgccgctccctagcccctataaaaggttccccaggccctccgctacccgtcgccaccctcgctctcgtctctcgtcgccggtagagctctagcaccgtgccgcttagcgccgccgtcgccgttgttcgttcagccctgcgtcgccgtcgctccagtcgtcgtcgtcgctcggggaggtcaccgtcgtggtcgccaagccgtcgccgatctcgtccgcccctccgttttcgctgaggaccgccggagcaccgccgccgtcgtcgacccgatcatctccgccgcttcgacctcgtcaccggtgagttcgccgcgtcgcccgcatcattttggtgcccttcgttagcgccgtcgtgtcgtcgttcgccggcgagcttgcgccatccggtcgccgccggtggtgacgtcatcaccgacgtcatcgtcgccgtgtcccgtggactggtcgtgcgccgatagatcccggccgttcgttttggatggatcgatctcgatcgttcgttttcgtgagccgccgtcgtgcacccggtccaccgtgaaccctagccgatgacgcaataattccctttcccttttcaaaaataattcattattgcgtcataattcaattaaaatccatataagtgttttaatccgatttaatctttaaaaattcataactaattcatcttagctcggatttagttggttcaagtctctaaatttttctaaaattgagatctacatgttaaaaatatccacatgtactgttcatgcttgtttatgagctgttttggtgattttgttcttttctctttagattccgacgttccgggagagtccgattttgtaggagaagattttgaggaattccaaggctagcaaggcaagtcacaaaaatcccaaacaaccctttgagtatgttgatcccgtttaaagctattgtttctattcaactattgcacttattttcgaatgtcattgggtggaattaagctattgcttgttatggccctttttgttcttgattactttattctttgataccttgggttattataacttgactagttgagctttatatattggttcagctagatattagatatgattgcttagccatgcttagaaacattagcacactattgggataactaatgcttcactattatttaatgatggcttaatgatagctcacggtggttaatcgtgattgattaattaattaatttgccaactaaaacctgataatggtgggttgtgagcatatggttttgatggttgtgctcatgacaattaagaaccggttcacgattttcggttgtgaaacgtttaccgtgccaaccacaagccagcatgggcaacggctttactttctgtatagtatggttcatagtagagcaccagactgtgaagtgtcggagataagcccacgggggtcgctggggagtccataccttttttataagggggtgattatgatccgggaacggtgcactgctttgaattgtattatatagagggtattgtcacaatctctattcgggtacttgtcaagtatcgcgacgcatggttgacatgatgttgaggttgtgtcttgtgggtacagtggtacacctctggccagagtttaaactattcgaatagccgtgcccgcggttatgggcgggtctaacaatgtctttcgtgattagtctcacccctctcactatattaaatgatgatgttaataatttgattaactcctggtttggaatggttaattcctggtttggagattgaactgtacagccggggttggttgttcagaatggttgggcctatgcaacagggtatgttgtatagcgttggattaatattgtttaattattatttaactgttttattaaattctgaagtatttattaaatgttgtttatgcaaatgagactatactatgccatcctttgttatcctgtgcacttgcatatttgctgcgtggcttgctgagtatgtcatatactcaccttgcaatcattcatcagaggaggagttctacagcgatgccgatggagtggatgattaggcgtagccctggtcaagctgcctgtggaggggagtcgcctgcgctatttatttatttttccactgcttagaactttattgattgagaggaactatctacctctgtaatgacattttattcgcttattaattagagtaataattgtactctattatcaatttgttattgtgtacctcagctgattcctggacgagggtttctacacatgtaagcgtttggaattttggatagaaattccgggcgtgacatttctgggcgtgacagctcctcccggatccagcatattacagcgtatcagagttacaatgactcacggcaggtcgccgccggcagccgcttcctctcgctatgctatgttgccatgcggttacaacaggcatgcccctctatttatgagagagcctaggatagagtccgactcttactctagtcctaatacctagtacaactccaagtcctaaactgtaaccgactacgtacatatatttgacacaaactctaacagtatggtccctgctctggccctgcaagatctgattttgttacctggatgaagaatgtgcatattggtcagaaccaaaatttctctttttctaggggactttaatttttacatgtcggtggaggatagaaataagtctagggcaaatataaatgatattttcatctttaatgatattatcagctttttgggattattagagatccctttgaaaggtagaaggttcacatggagcaacatgcaacagagcccactcctagagagacttgattgggttttttgttctgcctcttggactctgtcttttcctaatacaactgtagttcctctcacttgaaacatttctgatcatgtgccttgcgttgtcaaaatcgacaccaagatccccatgtctccaatttttagatttgaaagtttttgggtgcaagttgaggggttttttgacattgtggctcagatttgggctttagatcctgggtttgatgatactgccaaatgtatatcttataagctcaagttgcttaggaaaagacttattcattggagcaaaggtctctccaaattagcttccctcctcacaaattctaacagagttattgattttttttgatctaatagaggaaaccgggcagctcactgttcaggagtggaatttcagagaaattgtcaaagttcagattctcaagctcttagagtttagaaatcaatattggaaaaaaaggtgcacacgtagatagatgctattaggggaggaaaatacaaagttctttcaatccattgccactgagagatttagagcaaactcaatttctcatgtttatgatttcagtggtgttggcggttgttaaatgccgattctataccgccaatatctgcataaaatccagataataaagcatccaacatagtaataggtgttaaatctcacattttccacaagtgttgttgtatatttgtatgcagatgataaacctagaaggtaggaggaaaatcaaactaaagtggagaaggaaacatatccatacaaggatggactttgaactttatcaaaacactagagaatcagcccaaaaactccgagaattggatagagcaggatcagaggaggagatgggccaaaggccatgctaggaggggccagccatgcaaagaggccgaaccaacatctcagccatttaggctggggtttggcatggacgctcctcatcactccctgatggcagttgcagggaatttccgacaattcgtatagtgattaccgtcgtaaatgtccaatttaaggagcttcactccttcacttctccacacacttccaagcttgagctaaactataagagactattgtactatttgtatactataattaggaagagagtagagtagaagaagtcggaagaattctggagctatcagtaatcttctcctatttcttttattctgtttattacactaatattaatagaattatcttcctgaataatttaaatttatcctgtgagaattatttcttggttagttcctaaatagcatataggattattgttcactgtaatcaactaaaatatactgattgctttggtgagttataaatactaaagtagatattaattgcttagacgtggtgtttatgtaattattatccagtaattgctgcgtatcccacagtacgtttgaggtgggtgtagaggtggtgacagccctcaggagcacttaagtcctccctgtctgtgtacggagtagagcgacatctgggaacagcgggttgccagcgcctgaagtattgtgttatgattaaaattaagctttccctagacactgtttcccaccagtgaatcctcactatcctagcctacctttgcttggtttccttggatgaaccggaggaagaattaatcacacacattcccttggatttgatacccttggaacactccgtaggggaagtgctacatcggtatatccgtgcgattgcggattttatctgtgatcgtatgaaataccaacaagcatttatggcaccgttgccgaggaacggttgctgattatttccgaacccagttcatcctcgtatctctttattttcatttttattctaccttcacccctgctacctagagaagtattcatgttcaattattctcaaccatggagcaacctctctttgagctgtctgctcctagggatgaattctatgagccacctccttcatcgtagccaatttatacaattggctatgaaattcgccccgaactaatctgcatggttagggagaatccttttttctagtcttgatctagaaaatccctaccatcatctgtgggactttgagcaagtttgctcatgccttaagattcgtggcatgaagcaagaaactgtacggtggaagttgtttccgttctcccttcaagagagagcgaagcaatggtacacatctaccgtaggatgtgtagacggtagttgggaaaagttgcgagacaggttctgtcttgccttcttcccagttacccgtattaccgcccatcgagtagaaatcctcagtttccggcagatcaataacgaatcaatcggtgcagcctagtccagattcactaatctagtgcagtccagaccaaccttgtctttacccaagtatgtgcttttacaacattttcatacgggtctagaaacagagtctgcattctatctggacataacccccggatgatcattcatgcataaaatgtcgtcagaaggaaaagtaattttagatcgcattctagaaaatacttccttcatgacgcaatgcgatgaacctctgctggaggcattcgtgtccaagatagagaagccttcgacagtcgaatcacaacctgaactttccacttcgaccgactcgactgatgaagtagttcccgagccgccatccattcagaatgaagaaattcagacttcggattgtgctccaattttattcagggatggccttgatgaagactacggcaacaccctgaattatttcagtaaaaagatgctgattgttcctttgccacctcccgatcctatggaacttgcattcctaagacaaactgtctgggacgttacatccataatgagtgacgaacggctaagggaggcagagctttcatccgaagtaatttggataaataccgctccctgagttattccttatcgtctagaagggaacggcattggcattctttacagtcaaactatcggggttaatctcatttctgagtcatttgcatttgtttacctaagcgataaagcaataaccccgacatacaaattcttcaagcactcaaatggaaaaatcattgaaggatttggaattgtgcaagatgtacatgtccgctttcaagatagggaggcagtcttggattttcatgtctttaaaatccaagactttgacattttggtcgggtgccaattgagcaactcctcataaacacgctcgattaaacagcctcaagataactttgggagggaacgaattttcagttccattctcgcaggcaaggtttgcctcgaccgactctctcccagaagatgagtatgtggtggaagtaacggaagttctctctcacgagtctcctgagacccttctggaaaatgaagtccctaacttcataaaagaggaagcggaacccagtgagactctcgagcttccaatcatagaaccgccgcctcgacctccgattgcgctgaaacctctgcctcaaggcctacgctatgctttcctgcacggcaataaggaagctcatgtcatcataagtaacaagctttctgaagatgagactcaacgtcttctagctgtgttagaaaagcatcgctctgttcttggctactctctctaggatctcaaaggaaataatcttgcgctttgcactcatcgtatccctattgagcccgagagtactccctccagggaaccacaatgacggctcaataatacgatgcgagaagttgtaaagaaagaggttctaaaactcctgcacaccgagattattatctcgtcccatacattgagtgagttagcacagtccaggttgtgccgaagaaaggacgaatgacggtcgttgcaaatgctcaaaataaacttattccgcaacgaaccataactggatggaggatgtgcatagattataggaagcttaacaaggctaagcaacggatcatttcctgctatgtttcattaacaaaatgttagaacggctggcaaatcattcctttttctgtttccttgatgggtgttccgggtatcatcaaattcccatccatccagaggaccagagtaagaccacgttcacatgtccatacctatgcttatcgtaggatgtccttcggactgtgcaacactcctaaatcttttcaaaggtgtatgatgtccattttcttggatatgatcgaggacattacggaagtcttcatggacgacttctcggtctatggaaaaaccttcggtcattgtctacagaatttggataaggtcttacaacaatgccaagaaaaggacctggtactcaattgggaaaagtgtcattttatggtccttaaagggattgtacttggtcatagggtgtccgaacatggaattaaagttgatcgtgctaagatcgatgtgattgatcaacttcctcctcctgtgaatatcaaggggatccgttgtttcttgggtcacgccggcttttatagaagattcatcaaggacttctctacaattgcctgactactgacaaacctgctagctaaagaagctccctttgagttcgatgacgcgtgtctaaaattctttgaaattctcaaaaaggcactcatctctactccaatcatccaaccccctgattggacactaccctttgaaattatgtgtgatgcaagcgatttcgctgttggtgtggtcttgggccaaaccaaggataaaaagcatcatgcaatctgctatcctagcaaaactctaaccggagctcagtttaattatgcaactactaaaaaagagctgctcgcggttgtttttgctatcgataagtttacactgatcatgctgctctaaaatacctgctcactaagaaagatcctaaaccacgtctcttgtgatggattttgctactccaagaatttgacttagaacttaaggataaaaagggagtagaaaattccatagcagatcatttgtctaggctgcaaatcactaacacgctcgcaggaacagtcgataaatggttttctaagagatgacatgctgatgatggtgcacgactccaactcatggtatgccaacatagtgaactacatggtgttaaagtacataccacccggagaaaatcaaaggaagctgaaatacgagagtcaccgtcatatatgggatgagccatacctgtatagggtttgctctgatggtctattgagaagatgcgtgccaactgaagagggacttaagatcatagaacgatgccacgcctcgccttatggtggacattacagtgcattccgcacccaggcaaagatttggcaatgtggtttcttctggccgacaatgtacgaagactcaaaggaatttgtcagaagatgcccaagctgctgtaggatcgagatgtcgactagaggggggtgaataggcgatttaaaactaagtggcacgtaatcaaaactaacctatgttgctagggtcggtgagagacaagtctaactaagcaactaagttatgttttgcaatcctagggtgaaagtggttcaagtgtatcactaggaaagtaaatcacacaactaaattaagttttgcaatcctagggtgatatggccacaaataagtttttatgaaatataaattgcacaaatgtaaatgcaacaaataaatgagacaagagacaaggaatttttcactgaggttcggaaactcgccgatttcctaatccccgttgaggtgagcccaactccaccactcaaccacgaagccgccgcacgcccccttcgtcaaggggtgggcagggcaggagttggcccaaggagaggactacccaagcctcgatcactaggggtagttctttcttcactccgaaggtggtgaactccaaaccactcacaaaccagcgccgggcctcctccacgatctcctcggagaggtcaccggcaacacctccacaagccgtctaggaggcggcaacctcccagagtaaaaagcgatgacccggctcggagatgatcaagtgccacactagctctacaatggaagcaaatgcacttgactcttggctaatcaaccctctaacacactaagtggatgaatacaaagctcaagtgagtgtgggagaggtgcaaggggtgtatgcaattgaagtgggtgccaagagagtccccttgctgctggtgggggaggtaagtccactcgtgatccgccatttcctaaccctgcaggaactaatgggatgtcaaaagaaacgccatctactgactcggctgacaaggagatttagccagagaaaatcgtgccgcaggactactgcgacacacggttgctgccattccctcagcggagtaggaaaccgtcagtggacgagcagttcactcgttttgttgaagtaatccagaagatccacatcaacatgccgttgttcgacactatgcaagtaccaacatacgcctgttatctcaaggacatactcaacaacaagagaccgctcccaacaatggaggtggtcaagctgacggaacactgcagcaacgtcatactccacaagctcccagagaagaagaaagatccggggtgtcccacgatcacctgctcgatcggggcacaacaattcgaccaggccttgtgcgaccttggagccagcgtcagcgtcatgccaaaagacgtctttgacaagctcaacttcacggtgttggcaccaacaccgatgcgcctccaactggctgactcgttagtccgttacccggcggggatagtgaaggatgtgctagtcaagatacgggatttcttcatcccggttgattttgtggtgctagacatggacacagggaaggagaccattcctggggcatccatcctggggcatccattccttagcaccgcaagagccaacattgacgtgggaacggggagtatctgtttccatatcaatgggaaggaggaaaagtttgagtttcaaccgaggatggaacaatgctccatggtcagaatcaagtacgggccaaacccacagaatattcaagtggtcgaagtggagccacccaagacggatagcctgataaagttcatgcagaacttcctggaaaaggaaacaacaatacccaggaaccgttattggaggacgccggtaaaatcacctgtaccggccaagaagttagagcagccggctcagaagaagccgtcttccgaaccgaaatcaaagaaggtgtggaaggaaaagccaaagacgcccgctccatcacctctggagacgggtggaaaatccgtgcactgaatcgaaaggaggtacggtcttgcacgtcggactttaaatgacgcgaccttccccaacaggtaaattggaatgtatccgcacatttgctttcaacaatttgaatttttgcatcaccacatgtttgaatttcaaaattgcatttagggtttttgaaatttaaggaaatccttcaaatgaatttttcagagcaaaccaaaataaaattttcaacgaaaattcactgtgccacgaccgcactgaccgttggattccaacggccgaaagtggggccgattgggcccacaaggggttcggccgaacaccctggttcggccgaaccggccaggccaacggtcggctccttcctcttttgaggcaacggctagtgggtcccacaggtcagttttgaccgttatgggtgcactacttaagccacccggccgagagagggaattccaccctatttcaatacattttcatgacgagtctagtactcgctcatcagccgatgtcttgacggaagacgccgacgctctgcgacaactcctgagcgacgttgacctttaccttatcagtaatcgggagagacaagccaactacatgctgagcgaccgggagtatgctcacacacgagaatactcaccggagttgctgaaaaagataggtatggatgttgaatttcgttctatttggaaatctgttggttggcagaaatttgttgtggtagatgagcctggttctcgtttgcttactttgaaagaaatataagatggtatttcttttcgcattttccgtaaggagttcacgctcacatggaaaggcttgagtatacttcttggtttcacgattcctgtaaaatcgatctctagaaaggaatttctgggttcgagaaaaataggttttgggaagatatttctattgctccaatttgcaagaaacctagaacgaatgatatccataattctacacttaggctcatgcacaaatggattgctatgactttgtttcctagaggtgatttaagacccattaggggagatgaattaattatcatgtttgccatggttagaaagtataaagttctctgctcctgttgaatgcacttctctgattactcagaaagaaaaaggcctaggggtcgttagcgaccagattgcttttatctcagccgctcgtccgtgtattgatgaggcctatctagtgcaagggcatattttgaaacatggagcagatggatatttgaaatactttttccccgattgtacaaatgaaatcatgttgctaaatgcgaggtatcatttgtacaactgtcatgaactaaccattcccctgcagaccatagaagaatctcgtgcaggtggaacatacacggagacgcgcaacatgacaaggaacgaacaaggaagttcatcatcctcgacactcgtgcagatgtatgaggcaggttgggcaccaactggggatgcaaccggatggacccaagctccacgccatagcatcgtagtctcaacctgggcaagcgccagtgaggaccggtggcatacgcctcgtgacatccactgggggaacaaccaaccctccagatcaagtggtgtgcctcaatctccaaatgaatggcgctcaagttcttctcgttgggacttgggtgaaatcactaggagaatggacacccttgatgtgcagacgggggagatccagtatgacctcgcggaacacatagctcaaacgcaagaatggcaacaatctgctgatgctcagttcgccaacatcaacaacaagatgcaacaacagcatgctgacctttaggcgtactttcgctttcaggggttcaatccttatcaaggaccctaagcgaaagccaagcttggggggagacctcgctccccccactaaggtaacttgtatcacattgcatattttcgtttccaattgcatcctataaaacttgaaaacaacataaaaatttgcaaaatagaaaataccaaaaagataggataggtttgagtcatgctaggtaagacaagctagttcactttgttgaaatgatgaatagttgctctattttatatctctgatatatgggttcttggtaagtgctctctcaaagattgaataaaagtagccaacaattatccgggaacctgaggtaaatgtgctacacttactgatctaagtctaagctgttgcaagatatgagatagtaaatatgagtagctacgatcctgatactagtttgacttgaattccggatgttttgtttttcaaaatgataaaattgaaagttccttatttgatataaattcctaccagagccaaaaatgtgctatcatgattaaacaatatacattttggttactttccattccattgaactttgtcaaactcttgtgacttgtgtagatacttctcatgctctatgatcaagatcgtatacccacatatatgcacatgctatactcctacactgggagctaagcaatattccattccatttccatattaccaccaaaataaattctccatgttttcatatgctttcttctcctaaaagaaaagaaaaatcctttttaaaaaaagaaagaagagaaaggagggaaaggcatggttatgaaaaaaaaataaagttatgctccatcaagcatgagcatgattgaaaaaaaaatgtaatcatgccctcccctaatcaataaaagaaggatttttgggagaagaaagtaagcacaaaggagaagcatttttcttttatttttcctcatataccatttccatcatataccacacacacattatgcacgatcttgatcttgagtatgtttagttatctgctctagtctaagtttttgacttagtaataaatgtgaatgcgagtatgccatgtttgatccttaccaagctccacatatcaaaaaccttagagtaggaatcaataaggcaacatttggtgaggaattcattttgatacacttagagagactgagtgaatcacttgaggaacttggttttcttttccaaaatcatttgaaaacttccggaacaagagttgaataaagatcgggtgattggtgctctaattgctgttctgtctttcaaccgcccaaggcaaggagaagcagtgtctcgtgggaatcaggggtaagggtaagccaccatgccaaacattatttaacctaagagagagtacatatatcttgcacctgtatctttgagatatgtagcatagtagcaactcctgatcaacaaccaagtctatgtttcctttcgtccttcactcgggacgagcaaaggttcaagcttggggggttttgttgacggtcgttatcgatcagtttcgaccgtcaatattactaaaataggagagaactagtgatgcttgcaatgcataaatatgttataataataatattccactagtattaggtctactagtaaagaatgatcgtaaagtggaggagaatcgacatcaacaccaatgataaatcaatcagacgatgtcgaggaccagacttatgtatgaatgggccaagaactcagaattgacaagatgaattgggccaaaattcacaagtctgcggagtggagcaatagaggaggccaccagccgaaattgggctggattgggccagccccaggttcggccgaaccaatcctagcgccgttggatcctggttttggcgtggacgtccaggactgcatcccaatgacggttagagggcacttcggacaattccccttccacaaccgtcatacctacctctatataaggagctcactctcttcacttcaacacacacctcaagcaagagctctctcattcctctcaagtttagtttagtagtatctagctcgtggaatagaattagaataggaatcaggagtccggaagtcttcggaagagttcaggtatggctctagtagctttcctttcctcttttgtaagctttgtacttttattagaatactcttctaaatacatttctggtattgaaatactttccgagtatatgagtaccaactttacattatgttcttgttataatgaatgtacggctagcttatttgggagatgctttggtgcgggtataatgtttgtttatgcaattactctatgtcatgacgatgatattagagtagtatctggtagtttaggcgtggtgtctagattacgggatatcattatttggggttatatattgcggatgagaggtgggccgatgatggtgatagctcagtatgggtattcctccgtgcctatatataatcctaagttaatttccgagggagagtattcctccgtatttagccccggttggatggtcatgacgggctgtcgtaacgaactcggcagtcagggtggcttctcgaagtaccaggagggcatcggatagagggtattagctagtatatcagttaactagaatgtatgtatactatgtatattagaagtataggaatagattatccttctcttttctttccacctagcttatattatttattatgaggatgagtagtaatggttgtgtgtcactctacccttggattatcataacccctgcttagaatataattatcacaagtaatatataaattattagttgagttctctctacatgatcttcccacgggataaaataaatacgatacccttggaatactcttgggtgaaatgctacaatggtatatccgtgcgcttgcggatgaactttgtaaccataatataccagaagtatttctgcgccattgctgggaattatatttctagtaatgtcgttaagaaataccaacaattggcctcccatagcgccaccgctggtcaccaagggggccggttagaccggcatagtgcttgtggtcagaccggccactacctgccagtcagaccggtatacaagccgcgatcagaccggatctggtcagtcatcccagtgacagcaagaaatgagaaaattaactcaagtcaacatgcgcgtgacctaatgtggcaatatgaatcatctctttgtctagatcattacccttcttaatagtacggcaaagctaaaattaaactagcaaattttgatcgctcaactcctcgatcaatttaacattaaaacactagttttaccgtcttcctttccttttgctttgcgccatcaattttagtccacaataatcatctatgcgcacacataatgtgaacctaacttaaaatatatagctcaatagaacggttagtccacaaaaacaacaggggcctagatgcttcagctgccagaggcaaggaagaatagctgctcgcgacgcaatgcccctcacatacaacctacaagtcgagatattcgatgtgtggggtattgactttatgggaccatttcccaagtcccgtaattgcgagtatattctggtggcagtcaactatgtctccaagtgggttgaggctatgccgtgcagcgccgcggatgcgaagcatgccaagaagatgttcacagaaatcatcttcccgaggtttggtaccccaaggatggtcataagtgatggaggctcgctcttcgtcgacaaaactttccgagacctcctgtgagacatgggagccaaacacaacgttgctacaccttaccatccatataccagcggtcaagcaaaacgtcaaacaaacaaattaagaacattctgcaaaatacggtcaacaaaatgggcataggatggaaggataagctaccagatgcactgtgggcatacccgacagcttacaagacacccattggaatgtccccctatcagattgtctacggaagtcatgccgactccctgtagaacttgggcacagagcatacaaggccatcagaaactagaatatggattttgagggagtaggagattggaggaaaatgcagttggctgagctagaagaatggagagaaaaagcatatcacaactctaggatatacaaagaaaggatgaagcgctggcctgataaaagaataaagatcaagaaattcaagccaggagacaaggtcctaatgttcaactccagagttaagcttttcggccatggaaaagtacgaagcaattgggaaggaccgtttgacatcatcgacacctcttcgcacggagcgataacactctgcgacgactcaggtaacatatttaaggtaaacggtcaacgtttaaaaattttccttgagccgaataaaacttcagatgaagaagtggatattattgaattaattgattatgaaccatgatgatctcatctaaagcatgcttagttgtcatttttgtgcctagaataagattgtgtgggcctaggaagaaaattggcagccagccggacccaccagggttcggccaaaccccgaaccagggtgacgcccaactggacccgttttcgaatgacagcccccccccccaactcgtttgtagtctgttgtgatgtgcattcggaggtagatcaatcggatcaagcaccagagctctagttctttctcctcctccacctttgcaaaccctcctcttcacctcactcaattccttgctccctctgctcaaaccaccaatggctggcaaatccttaatgccatacattggctcttcctcaaactccacatataaccttgaaggagagccaacaccggccaatcaattgatcccggtggagaattatacaatggaaggggtgaacgcactctgggctcaaccccttgcgacggtgctgggctcccctgcgaatctagagcccatcggcgagctccctagttcttctgaaccaggggttcggccgaacccatctcggccccattcagcagcacgctccctctccccgatgcacgtcacatagacaaaagtacagggtgattcgcctgcgcgacggccgacaatgggcgagctcagccttttgaaggcgaggcgtctattccaagatgacgagaaggccgctccgcttcccgttgagtaatatgtggtcactctctacaccaaggcaggggatgaggtgctccacaagtataccacaaccactgctgctccgtccacccctaagagggatcgcttttgcattcagggagtgcgaactcccggcggtggatatggtaaaggcttgctccgtccattgacggcatcggagaagaagggggtagcggaatcctgcatccctccacctatgaaggtgaagcgtcatttgacgcatcctcctatcattagggcgcccaggcaattccaagaagatgaagtaaaatcgtcggagccctcggtccacaagctcgccgttcaagtgaagaaattccgtaaggagaacatagagcttagggatcgcaatgcgaagctaggggtagaactcgctgaacttaggaacaatatagacacccttagttgcggtttgtgcgctaagatcaatcgcgcattcctagaaatgggaaaggagaataaatactatgctaactacatgtctccttttccattaataatgtagttagtaggtgcttagtttctttattacttcttgatcgttgtaagcatctgttgtcaataatgtggctcattggccttaaccccaatgattgccgattttattttatgatgattaataaagtttaggtttcaaataagtgtgggggagataccttggctttctgatgtgcaaactctgaaaatgtgactaaatatctgaactcctgtgaggcactgaactctgtagaaaattgcagggtgattgggcaccagggtggttcggccaaacccaaaccagtgctggccacaatcaccctcagttttcactagtaagcaggtcagcacgtccactgcctctatatctccaccattgtatagtacaagagctaggaattcagagaataattggttcaagcataattgaaaagataaaacttccaactaatggaatttccgatgattaatcttgtatatattttattctcagctgaacttgttgcttgtgcacaaccatccatgtttagagaaccttattcatctaagtatttgttacatgagagatggttaaagatcaaagaaattcttgcaacatttgtcatgactcttgggaatttgtttttcgaaataaaaattctttcaaacctcacttctctaaatgatttcataattatacctaccaaggccatatgcaagtatatcaatgatgaaccatattgcgcatatgactgtttgacattatattgagctttgccaaatttatgtgactcgtgctagatatctttcatactctcatgatcaaggggtcatatccactttcatttccatataaccacataagctaagcttctacattggaagttggctttccacaaaaagttttattcaaataaactcctactttagaccatgctttcttctcctggaaaatcattggcaacaagaaaaggtggaaaaggcatgactatgaaaaaaaaagagaaaataaaaatgcttgccttcaaagtgcggagcatgatgaaaaaggtagccatgccccttccttatgtatgcaaggaaaattgaagaagaaagtataggaaaaaagagaaacattttatttcatcattccacgaaaatattttacactttccaccataaataaagacccttgatctaggagtatgattgatgatcttcttgagtccatgtatttggctttgcaatatatatgatgcaggtatgtcacaatttatccctaccgagccccacataacagcctgtagaatagggtgaattttggcacaatccgccttggagaggatccacaaagtcagaaacacttgagtgacagagagaaagtcagtaagaggaaaagagctattttgtgaaaaattcataaaaccccatgagtctgacagaggaagtaggaaggactggaatcatgaccgttccatttatcaattacccaagatgataagataaccactgataaagttcacaggtacaggtatggttttgaataatctatatgcttgagttatatcttggaaaatttcattctacactgacctttactcagggacgactaaagagctaagtgtgggtggttttgttggcagctgttaaatatcgattctataccgccaacatctgcttaaagtacagataataaaacatccaacatagtaataggtgttaaatctcacattttctacaagtgttggtgtatatttgtatgcagatgataaaccccgaagttgggaggaaaatcacactaaagtggagaaggaaccatatccatataaggatgggctttcaactttattaaaacatttgagaatcagcccaaaactctgaaaattagatagagtaggatcagaggaggagatgggccaaaggccaggccaggagggcccagccatggtttggccgaaccaacatctcagtcgttcaggctggggtttggcattgatgctcctgatcactccctgatggcggttgcggagtatttccgacaattcgcatagtgataaccgtcataactgtcctatttaaggagtttcactcattcacttctccacacacttccaatcttgagctgaattataagagactctattgtactatttgtatactataattaggaagagagtagagcagaagaagtcggaagaattccggagctgtcggtaatcttctcctacttcttttattctgtttattactctgatattaatagaattatcttcctgagtaatttagatttatcttgtgagaattatttttgggttagttcctaaatagcatatgggattattgttcactataatcaactaaaatatagtgattgctttggtgagttatatacactaaagtagatattaattgcttagacgtggtgtttaggtaattattatccagtaattgttgtgtatcccacagtacgtttgaggtgggtgtagaggtggtgacagccctcaagagcacttaagacctccctgtccgggtacgtagtagagcgacatctgggaacagcgggttgccagtgcctgaagtattacattaggattaaacttaagctttccctagacattgtttcttactagtgaatcctctctatcctggcctaccactgcttgctgtcctttgatgaacaggaggaagaattaatcacactcgttccctttgatccgatacccttggaatactccgtagaggaagtgttacattggtatatccgtgcgcttgcggattttatctgttatcgtaagaaataccaacaagtggccaagtggtttctttgtatgaacagaaggctgctttgttcttatcaaagttttaaaaatagaatgggagtttctacattccccacaatgatctttgatctgcaaaaatttcttctttgctaatcataacttggacagtcttgtagatcctttctctacacatgaaattgacaaccttatcaagataattgctgtagacaaggcccctagtcctgatggtttcaatgggctctttttgaaaagctactgtcctattattgcacaggattattacagactagctgctcattttcatgctgaatgcactgatctacagggtttgaataattccttcataactctggtgctaaagaagacttcccctaaaactgtgaatgacttcaggcctatttcactcatggggatcagtttaaagttcataacaaagttgatagctagtttaaagttcataacaaagttgatagctgatagattgcacggggtgatcttaaagttaatcagtgaaaatcagtatggttttatcaatgtcagtaatccaaaagagagaaaaatatactaaaactggactttgagaaagcttttgacataatagagcattctgtcataatctcagttatgcaacatatggattttctagaaaaatggcttcactaggttcaaatggtgttctcaacagctaactctgcaatgctcctcaatggtgtcctaaggaaatcattcagctgtaaaagaggggtcaggcaaggtgaccctctttctcccttgctatttgtgctgggagctgggctgcttcaaagagtagtgaataaagcttttcagatggatctgttatccaagcctatcaatgaaaatggtggcactagtttcccaattatccaatatgctgatgatactctggttttgttgatggcatcccttttaggttttttgtttcaaagccatccttaattcttttgctcaatccactggttttaaagttaatttcaacaagtctagcatgtaccctctcaatctcactgctgagaaatctgacttgatggctggtttgctgggttgttctattggaactctccttttcacctacctggggctgcccatggggaaagaaggctcacagcaagttcaatgttcctcccctaaggtggtaggctgaccttaatcaattcagttctttcagcaatccctacctactatatgtgttccctacagtttcctattacagttgtcaatgccattgatacagcaaggaaaaattgtctttggagaggaaacaacccaatttctacaaggaaatctttggcatcctgggatctggtctgtaggccaaaggataagggaggtttcggtatagtgaatctcaaagtgcagaacatagcattgttgctaaaacacctggtgaaactttacaaaggtgtaaatctgccatgggtcaatttggtatggaattattacttctctgtaaaggtacctcatttggtttttaataagggttccttttggttaagagacatctaggccctctcagccttgttcagaggtattgcaaaatgttccatccagtctgagaaatcttatcttttttgggatgacttgtggaataaggaactgcatagctccaaatttcctgctctgcatgctctagctttatataaggaggaatcaattagctgaatgtgatctaggactttggaggattgtttcatgatgcctctttctacccaggtttatggggattttttgcaactttaggacttcttgaatcctctgaatttgaatgatgcacagggtgacaattggtgttttatttggaattcagagatatatacctccaagcggttctataagcttaacttcatgtctttgagcccttctaggccttttgtttggttatggaagaccaagtgtgttatgaaagtcaatgattttgcatggcttttattttgtgacaggctgaacatacgagatatgcttgatagaaggcattctgcaaaggaggatgatgatctcacctgccccttatgtcctgaaggacggagggaaactcggctacatctcatttttacattccctttcagtatgtgatgttggcaatctttgggaattgtttggaatcataatttggagttctttcacctcgtaattcttgcaaaatggaggttcagtagaaatgacagaaagagcttcttggaaattttctttttagcatcatggcacatatggaagcagaaaaatgggctcattttttataatattattccatcatttcaatcttggaaggccttgttcgccaaagaaattcttctacatctatgtagaatgaaggatcctttaaagcaattaatctgttttttattggttacaaactttgtagcttggcaaaatttgctgcagcacacgcaaaaatcatgtaattggctaagagacaccgtaaaaacatgacactgccaatgaacactacaaaagttatgtagttagctataggacaccggaggcattattttataatttccgggctaaaaaaagggagagaaatttcgaaatgacgggaatgcccccctctactccttcttcctttcttctcactgcagccaacatgtgggcttgcagagagtgttgtcgtcctcctgtcgccaacgctcaacgccagctgccgtccccgacctcgacgccaccgttgcctccacttgctgccacacccacgctcagaccacctccctccacctcatctcctccctcctcgccccgcccacagctcccctcctccgcgagctgccatcgcctccacttgctgccgcgcccacgcccagaccacctccctccacctcatctcctccctcctcgccccgcccacatctcccctcctccgtgacgccctcgctcgcgcccgcacttaccccgccgaattccgcaacggggacatcaatctcaccatcctccgcccatgccgctcctcggccgcctccccacgcgcacccgcccaccgcctctcttcctctggtgcttgctcgtcatccagaacatgagccgctacatgcgcggtgtgtccaccacgtcgatgtagttgacgacggttaggcaaacctgcaagatggggaggctgcgtctagcgacgagcaggaaggcgaggtccctgttctccatgacgacgcagccgaggcgggggaagacggcgtagtggaaggggcccgggtgcacggcgaagacgcgggacacggcgccattgacgtcgccaccaccgcgtccctccggtgcgaggtgcacgttgacgagcgctaggggaagcggtgagcacgtagaacaggaagatggataggcagatcgacaacggcaaagccatcgacactcggggggcaatccgggcgtttcaaaaaaaatctcaccgctttcatcccgaaaatgataaaataatgagttcggtgtcctacggccaattacataacttttgtagcgtccataggtagtgtcacgtttttacggtatccctcagctaattacactttttacgtgtcctgtagcaaattttgccatagctttaagatcttgctatatgtaaatctctctttaatgaaaatacactgttagacaaagccggttttttcaggtcaacaagatagagccgatgtacacaaatgaaaaagccattaacatacaattaatcaattttaacgggaaatgagataaaatttacaacttgatttaccaaatcaagcgctcaagtgtgagatgcgtgaacaagcgctcaagtgtgtacgcctcgtgtttgtgtcaagtggcctcaattggaagggaagtaaatatgtgcatttctgtgaaagttattactagtactgagcatgctaaagcttttacatgcgccgaaccatatggttcatggagaaaacgtacaaccaaacaatcgcaaattttcttcgccgtgtgggccaagctccgtgcgaacaaccaaagatgctctttttgaatcttgattagttagttggttgtttgtacagtacaacccaggatagatttagctgtgttcgaaccccttctcccggcacgcaaaacaaaactcgtattgttgcatgattaattaagtattatttttaaaaaaaaaatgaatcaatatgattttttaagataactttcatatagaaagtttttcataaagcacaccatttagcaatgtgaaaagtggatgcgcgaaaaacgaaagaggtgggttgggaaaatgggaggaagaacacagcctatagttgaaggcagtaaagttcttttctgctttaaggcccgttgatttatacaaaatatataaaatttggaggatttttagtcttgtagaaatattccgtacgaaggcatttgagacaagagattaaatcccatcttatcctttgaaattccataagtaaggaatggacaacctataaaaattgtgaagaaaatttagtaatagatgtaacctcatcaaaattttattttgagtttatctctcttatcgaatttatgtgtttttctgcgttgaatcaaatggttatttaagcgtttttaatgtgttttacattctttattagaatactacgttgtttctatcaaagagggcctaatagagacgctaacaaagcatattttgaatttgtcgttgtttgtaactccggaatgtgtgtgtcaacataaatataccagagtacgatgaagcacaaaacgtttctgtttacacctaaaattggcatgaatgttcaaattaaggaaaattgctaagatttgggaaaaatcgctggtttcctccatagggccagtctgaccggcgtgtattggccagtcagaccgttgattgagggtcggtctgaccggtggcatgtggtcgatcagaccggtagagtccgagaccgagtctgtttttgtcaggtctcggaattccttgctcgagagactatgcttttggtttcctttggtttctataccgagttgaacgtggaggagaatctgtaggagacaagaccaacccctatataagggacaaagccggttcaattggaggagaatccacatacaacccaatttagccaattgaatcgctttttgaatatttcaaatctagttttagtctagttcgtccatctttatcgatctgcgtcataaatcgtccaccttagctgcaagagggcgaaatccttttgtaggtttgtctcgtaaaccttccgcttatccacgaaacgggtagttatctattgttttaactaaattggctctgctagccggtttaatctattaaaacccatcttaatcaccataaaatgtttaggtgtttcaaccgtgattgtcttcatgtaaaaaaaaaagttgccaacaacttcttgttcaatcgacttgtttattactgattttaaggggtcctaatagtagagaatgacgaagcaaattttgcatttgccgttgtttctaactccggaacgtatgcgtgatgaagcgcaacgcgtttcttgtctaatcgactagtttatttctactacacagccgtagccctagaaacaacgggacgtaccatacatatgcttccttagcgaacccgcaaatcggccataaacacggtgtgccgtagctctgttgccactaccgctcgcccacacattgtcattatgtcaacccatcattacgaagcgcagaggtacactgatccacccagagacatactcatatccctacgtacatcggtacaggtatacgcgaccggccgcggcagggccacaccgacgccctttccggctttcatcccgacccgacctagctaatctatcagccgcccacgcccaggcttttatcaaaacagtccatggtgcacctaccgaccgacgttgtaaagaaacagcagagatccacagtgctgtcaaaaaacccaaccccacgttcccaccatctattcattcttaaatctcgaactctctgctgctgccgccaggcgccccagatccactcgctcgtctcgtctctccgctctcttccggacttccactagtcgcacactagcactcgccactcgccagtcgctacgactagtagctccacctctgtagcctaaagcccaccccccaacaccaccctctgtgaagtagcttgtcctcttcgccgaggccgaggtgacgcacatggcgctgcctcctcctctgctccgcttcttcatcgtcgccgtgctgctcagctcggtcgccgcatgggtggcggcggcgacgacgctgcacgagcgcgacgcggcggcgctcagggacgtccgggcggggctgcgggacctgccggggtcccggttcttcgaatcctgggatgacgccaccgacccgtgcgactatgccggcgtcgtgtgcgagcccgacgaggacgacccggccgcgctccgcgtgtccgtgctgacgctcggcaccggcctcaccgactctcccggcctggctggcacgctcccggcctcgcttgccagcctcactgcgctcacggacttcgtcctttatccaggacgcgtcgcgggagctattccgacggacattgggtcgggtctccggcgcctcaggctgctgtccatgtccggcaaccagctgaccgggcagatacccgagtccctcgccgggctgccagatctgcacacgctcgacctcggcaataaccacctcgacggctccattcccagcggcttgctgctgccgtcttcgcagagcctcaaggtgctcatcctagcgaacaatggcggcctctccgggcagattccagaccaattttccagctcacagcttttccatgtcgacctaagccggaattccatcactggctcgctcccaccgctggcgcagacagtccgctacttctccgtcgcggcgaactcaatgcaggggagcctcgacggcgcgttcggcaacggttcggctccgaccgacttggccttcctcgacctctcgatgaacaacttctcgggttcaatcccgcgggagttgttcgcgctcccgagcgcgtcgtcccttcttctgtcccgcaataacttcaccgggtccctcgccgtgccagcgttcgcatcggagcgtgccgcaacgccgccgtggtcggttgtggacgtcagccacaatggcatcacgggggaggtcccggaggagctagcggccgtggagagcctgtacgtgaacaacaaccggatgtacggcgaggtgccggaggcggtggcccgtagcgtgttcgccggccgcatgacgaccttctacgcgcagcacaacttcctgacgggcttcccggtgccgccgctgccgctgccggactccgcagcgctgtgcctctcttacaattgcatggagctaccgtccgcttctgccgccaacgggtgccccaccatcggcggcccaatggagtccaggcccgccgaccagtgccggagcagcaccgcagccaacgccggcagcagcggaggggacggctgagccgccaacattcctcaaggctgacaggtggggcccacctggttcagctcatcagctgggcacgggtgggggcgtgaggaagggacggccaggatagctaagcctggctcacacattttcgttttgtccgtttgtttcgggtgtggttttcatgtgattgggtttgaattcatcggcatccgggcttgtcgtcgggcgcgcaacggttacacggctacaaggttagcgcgttcttgtgcgtgtgtgcaattactcgctctggtagtttgtacgctgcgtctgtgttactctgttcattgtgagtagctggcagtgtccatttaaacaactctgttcatactctactaagtcagctaatgtaaagggaggcactattttagggggtgtttattttttaaagtacatgtcacattggatgtttggacgctaatttgaagtattaaatatagactaataaaaaaactaatttcataaatgcgagctaatctgcgagacgaattttttaagcctaattaatctataattatgaaaagtttactgtagcatcacattgtcaaatcatggcgtaattagactcaaaagattcgtctcgcgaattagtccaaggttatggaatgggttttgtaattagtgtatgtttaatactctaaattagtgtccaaacatccgatgtgatagggacttggggaataaatccatgtttcccaaacaggcccttagaaaaaaatatcaaatcatctcacttgttgatccatgtttggagtctcgacagagttcgcggtatcggcggttaagagttcacggtatcgacggttaccgtactctagtaactaggtggtaatgttggtatttcttacgataacacataaatatgcaagtgcacggataccgttgtaccatttcagttatgcgtattttcaagggcatcgtatttatattttttaggaagacggtgctacgaagacatacttatatcttttcaatccatttataactaattcaccatagtctagacatgagttataataagaggcaattacgtttttggccctgctttttcgagttgctcatttgaccttctttttttacaaacgaggatgagacttggccctattccgtgaaggcaacatgacggtgttaactcacgacaaaagttccatttatacccttgtgaatttaacgcggtttctcaaagttttttattcaatacagttttgtgcacttattagtatatatcaaattgcgtcaaacacaaatacatggtacaaatttatgtctaccaaaaacaaacaaaaataccatgtcaagcaacaggacaccgcgccacagacggctaactcctgagcccatccatgcggagcagccgccggcactactcctccctccgcccaccggctccgctgctccgacccggccaccgactgtgcagctccgaccctctgcgagccaccatcgcctcaccgtcagtgctccctccctccttgcagaaccgtcgtctccccactaaagtccgccaccgccgacctgccagagccagatgcaccacatgcgcatctcgacgccgccgaatgcgccatgcgcgtgcctcggcgccaccgaattcgtcgcctcgttgccgagcctccgccagatccacctagtcgcccgttgagccgccgctgccacttctccgcctcgtcgagccgccgctcctcctcttcgtcaagccaccgccatccctcccatgccgctgctgccgccgctcctccgccttgtcgagccgccacccaccctactcctcgtcgagctgccgccactcctcctcttaatctagccacccccatccctcccatgacacggctgcgcggttgctgttgcacgaggagggtggcgggaggaagttcctcttagggtctggtgagaaagaggaaagggagaggataaggatttcaagcttcggtgagagagagagaggagaggaagaggataaggaaccaatgttgatgtgtacaagggtattttggtcaattgtggctcataaaaacatttttttctaaaccctaatggtgtgatgaaaccagggttagacgacaactccaattttttaaaaatagggccaaatgagcaaactttaaaaagtagggtgaaattagtggttatgcttcagaacatggtcaaagaagcaattgttccttataataaagtttgatgaggtagcgaacacacatagaagattcacatataatagaatgtctagttggaaatagcctaaggcgaggttgggaatgaagttgcatttatccccttagtgggttttggtgatcaataacaatagggttaagggactaatgagttttattgagcaatacttaggtgttttagtcccaagatgacattgtgtgatcaagagatgcttggagaccccccacaacatagattcgagcggaatcggaactcgaagtgtgcataggctagtttatttcttgtaattgggttttaggaaaaactgtactattaagaggggttctagatgtggttctgggatacaacaagtgctcttagtgagatccaagtgtcaaaatatttttaagagctatttttgagaatagccctacctaggacatatcaggttggctggaagttccggaccgttgaagggtgaaaatttcctaaatgttgtctggaacttcctggaaattccagacctgttttctagttcaaaaatgtgagtaacggctagataacgtcacctagccattatatatatccaaatcatccacaactcactctttggccatttcacttttgcttttccactccatagctgttgctagcctctcccaagagtttctttgcttcctccacccaatcttgagccattcttgagagagagtgagattttgagggtgaaggagaagatttggagaagatttgaaggctaggattggtgtgagcacttggggtatcttgtgggctgacatctcggtgcttactgctcttggagatcatctcttagacggttaggtgccgcccgcgagcttcctttgcaattgtggatgtcccgggaaagtttgtgaaggtattcctcactttcgcaaggaaatgaagtaagtgagtaaagaagcttgtgctgaagtcctagaggttttcctagtagagcaactcacacttgtgatgttttctagaaggatgttgagttggatcttggtggtcactcaaattatagaaaatgacctagaggtgttggggttgaaggctgtggatttcgttcaagatttttgtacaagtgaggcaaggggttaatcgagacccggctctttggagcacctcaacggagagtaggatcgcgagatccgaacttcgggaaaaaaatccaccttgtcccttcagtgatgtttctgtgcatgtgtctatgatattgctacctctctgtttgcctatgattcaactcgtgaaatttggctgagttcctgttagtgttatctgaatttctctgttgcccggaagttctagtccaagaacactagaacttccggtgttctaactaggaggttccgggcctgttaaattttaccgcagcgatttgtttttgagatttcaggcaagcctattcacccccttcccgccccccttctaggctacatctgtgcgcattcaattggtatcagagcttcatgctcctgattcaagcttcaccgcttggagtgatccaagatgtcgcacttagagggagataaagagttggatgaaaatggtgatggatcaactagcaagggaacgtctacacctaagggagcctctatttcttttgattacaacaaacttaccattccctctcataactttgtctccgtgccttccctgcgttctcctcaatttgatgggacatattacgccgcttggaagcacaagatgaagttgcgtacatctaatctctttgcaccctagcatttggaaagttgtgtgcacatgtgttgatgttccaaatgaagacatggagtttaccacggagcaagagaaagcaatacacctcaatgcacaagccgccaatgccattctctctgccttgnnnnnnnnnnnnnnnnnnnnnnnngatggacttgaggaagccatggaaatttgggatactttgcaattggctcatgagggttcacccgccgtgcgtgagtccaagattgagttgttggagggaagagttggacggttcgtcatggatgacaaggagacccctcaagaaatgtatgataggatgatgctccttgtcaacaagattagaggacttgggagtgaagatatgacaaatcattttgttaagagactccttcgtgtctttgttccaagaaatcccatacttgtgtcaatgatccgtgagagaaaggactacaagaggctttctccaagtgatatacttggacggatcgtgtcaaatgagatgcttgaagaagaagctcgtgaattgaagcaaatggtcaagaatgccgccatgatcaagaaccaagagataggtttgaaggccaatcaagaagaagattcaagtggtggtgaagaaagtgaagatgaggagatggccctaatcgtcaatagattcaagcacttccttcgcaagagtggatatgggaaaggaagaaaggaagatgacaagggcaagaggcaatccaagcgagcatgcttcaaatgtggcgagtatggccattttatcgcggattgccccaagaccaatgaagcaaagcacaaggtggtcaagaagaagcctgatcgtgctcatgttgcggaggcacacatggcggaagtgtggtactccggagatgaaggctctcccaaggctatggagaagggagatggagatggtggcgtggctactgtcgccatcaagtcctcatcaacaaaggagcgcctcttcaacatcttgagtgacgacgacaacgactcctaccaccactcgtgcttcatggaccatgggcgcaaggtaatgcctatccaaaagccctctcttgatgatgataacactagtgatgaggatagtgacaatgaacttgattagatgtttaagaattttagcaaaccggccatgaaacaattgtcaaaattaatgaaagctttggatagtaaagagagatttcttgagaggcaagaagacttgcttattctagaaaagaaaaaaaaaccttgccttagaagaagatctagctaaggagggtgagaggattgaattactacaatatgagatttctttgcttaatgattccatggctagtttgacgagtgtgaacgaaactcttcaagaggaacttgtggttttggataaaaaaccatataaatcttgaagtggaaattgacactcttcggaatagcgcatcctctctaaatgaaactcctatgacacctatgccttctattagtgttggttgtgctagatgctataattatgatttgagttcatatgctactaaccttgaagctatggaggcccttgaaaagaaaaatgagaggttaggtactttggtaaagtatggatgcatgaagacataccactccaaagacgctctctacaagaccattgctacaaatccaaacaaagatggacatgagcttggtttttctgatgaaagtcctgtgtccaaacgtgttgtggtgaatgggaagattttcttgatgtttgtaagagaaggaaaggctccacaagaaagtgaggtgactctaccctttgttggtcagagacccggagcttccggacaaaatgtccagaacttcctggcacctgtcaggatcatcgtcctcctcgcgccgtcgccgcagccaaaccctagccgagccgcgccgccgtctccttccaaattcggctgccactttcccgatccggccaaattaatagaggggaaatgatccccgagatctcctctaccttttcccttttggaatcatcagctaaaatcgcttggaaagtgtcggatttgagctcgattcggattcctctttccttccgaaccctaaaactttccttctcgttgccggccgccgtgggccttcgtcgccgccccctacccgctataaaaggatccccggtaccccctctactcgccgccacccttgctttagttcgccgccgcccgtagcgctctagccgcgtcaagccgtgcgccgccgtcgccgccgcgagttcagccgagcaccgccgccgctccggtcgtcgtttttgctcgggaaggccgccatcgtgatcgccaagctgttgccgacctcgtccacccctccgtcgtcgccgaggaacgccggaagaccgccgtcgtcgtctacccgatcgtctccgccgcttcgacctcatcaccgtcgtcgtccggtcgccgtccgccgccgttcgtgcctcggtaaggatcgccgcgtcgcccactacgcgtagatgccctccgtttgcgccgccgcgccgtcgttcgccggcaagcatgcgcgcccgagccgccgctggtggtgacgtcatcaccgacatcatcgacgccgtccgccgtagaccgcgatgaaccgatttgatctcggccgttcgttttggatagggtagatcccgaccgttcatttccgtagaccgccgcggtgcacctggtccaccgtgaacccgagccgttgacgcaataatccctttttccttttcaaaaataattcattattgcgtcataattcaattaaaatctatataaatgatttaatccgatttaatctttgaaaattcataactaattcatcttagctcggatttagttggttcaagtctctagatttttctaaaattgagatctacatgttaaaaatatccacatgtactgttcatgcttgttaatgtgctgttttggtgattttgctcttttctccttagattccgacgttcccagagagtccgatttcgcaggagaagactttgaagagttccaaggccagcaaggcaagccacacagatcccaaacaaccctttgagcatgttgatcccgtttaaagctattgtttctattcaactattgcattttatttttgaatgtcattgggtggaaataacctattgccttgttatagcccttttgttcttgattacctattctttgtcacttgggtaataatttgattagctagaacattatatagttttagctaaagtgaataggatgcttagccatgcttagagacactagctcatataaatgggatacttatgactcacttttatttcatgatgacttaatgatagctcacgatggttaatcgtgattggttaattaattaatttgccaattaaaacctgataatggtgggttgtgagcacatggttttgatggtctcgtgctcatgacaattaaggaccggttcacgattttcggttgtgaaacatttaccgtgccaaccacaagccagcgtgagcaacggctttactttctgtatagtatggttcattgtagagcaccagactgtgaagtggcggagataagcccacgggagtcactggggagtccatgccttgtttacaagggggtgactatgatccgggaacggtgcactgctttgaattgtgttatgcagagggtattgtcacaatctctattcgggtacttgttaagtatcgcgacgcatggttgacatgatgttgaggttgtgtcttgtgggtacagtgatacatctctggccagagtttaaactattcgaatagccgtgcccgcggttatgggcgggtctaacaatgtctttcgtgattagtttcacacttctcaccatattaaatgatgcggttaataacctgttagctcctggtttggaatggtatattcctgttatggagatagaactgtgcagccgggattggttgtttagaatggttgggcctatgcaatagggtatgttgtatagcgttggattaatactatttaattaaatactctactgttttattaaattctaaaatatttattaaatgctgtttatgcaaatgagactatactatgccatcctttgttatcccgtgcacttgcatatttgctgcgtggcttgctgagtatgtcatatactcaccttgcaatcattcatcagaggaggagttctacagtgatgttgatggtgtggaggattagacgtagcccttggtcaagctgcctatggagtggagtcgtctgcgccgtttatcttatttttccgctgtttagaactttattgtttgagaggaactatctacctctgtaatgacattttattcgcttattaattagagtaataattgtactctattatcaatttgttattgtgtgcctcggctgattcctggacgagggtttacacacatgtaagcgtttggaattttggatagaaattccgggcgtgacattgggggaggacccgacaggtgggccccacctgtcggcgaccccgggagagagaggagggggcgcgggcttagctgggccatggccttcggccggcccagcaagggcacgggagggagaaggaaatgggccggcggcccattagggaaaaaaggaggaaaaaggaaaattaaaaagggaaaagaatttccagggatttaaatattgcttgtgctcatttttaattggttaaaattatttctagagctctgaaaattccactaaaaatcttgttagcatatttcgacatgtagaactcaagaaaaattccacatgccaattccgattattatttgcattaatttaattagggtttcactcttgcttttacactggtattttctcgagactatttataaattcaatttaggcttgggagaagaaattcagggtgtgacatcttggttgttttcctttattgtgaattttctcaccaccttgcttttcatacttattcaaaagcatatcgaaagtcacctcagtcttcttaggagctttggaacttgaagcttcactcctattctccttccaaacatcaacctccggattctttggcaccatcatctttggcctaggctctccaatgaacacttttttccccttagtggattcggcttgctctggccgaatcaataccttcttatcattgaaatcaattgtgttcaccgggaaaggatcatgatcaagcttcatcttggaaccatcagtgaatttcaatcgtccttcatctatggccgattgaatctgtcgtcgaaatacattgcaatcattagtagaatgagaatgagaatcatgctatttacaataagctcgacgtttcaattcctcttgagatggtatgacatggcctttaggcaatctaattatcttttcttgcaaaagataataaaaaaatcttatcacatttggccacgtcaaaactatacttaatctcactttgtcgatctttacgaggagtcggcattaaattagaacaaacaaaaggattatttttgttagtccatgaccactcaacaacatatatatcatgatcaccatcatcatcataatcactagcctcagggtaatcaatcaaattaacattaggcttcttaccatagggtctaacaaatttcttactatttttaacccgactttcttgagccagagccttttgcatgagttgactaacatcaagaaattgttggccttctaatctttctttaataggagcaattaaaccattaaaagcaagatcagccaagtctctatcagttatattcaagctataacatcggtttctaacatccctaaatctcttgatataatcaatgacatattcactgtatttttgcctaatcgatgttaaatcacttaggctaagtttagtttaaccagtatagaaataatcatgaaatatttgctctaattgaggccaagtatggatagaatttgccggtaaaaaagtaaaccatgtaaaagcagtaccggacaaagataaagaaaacaagcgcaatttataagtatcagaactactagcctcaccacattgcgctaagaattgacctacatgctcccatgtggtcctactatcctcaccactaaatttggtaaattcggaaactctataaccacgaggatatgggatgttgtcataataatcaggatacgacttttggtaaaccttagcatgattcctagcttcaatcctgaatttatccctaataataccactaatcaattcctccatattctcaggcctatgctgatttggtggtgggtttggtggcctaagaggttgcggttgcggcgcaatataattatattggccatacctagtattgggaggatatcccctagtaggattattgtaaacatttgggatatgtgggggaacttgggtattaacagtagatacaggggaatcatgtactggaatatggtataaaaacccattatttgtcattggatcaatcccctgtattgggatgattgcgccggtctgactggtccagggcctggtttgaccgatctggggtccaatctgaccgtagggaggaaacccggtctgaccggccatctgtcctgtatgaccagcggcgaacgtgcggtctgaccgcccatctggcctgtctgaccggcggcgaacgcgcagtctgactggccgtctggcccggtcagaccggctgaatgcacagcttctccctcaccggttgtttgcatatttgccccatcggttttgctataaatttgatctacaggggctttactagtactggtagaggctttatctttaggttggaaatcggctataaaagaactgaatctattccttataaaatcatcaatacgctcattaaaacgagattcaaacgatgcatctaatttattatttaaagcagcaatggatgaatctattgtatttgctatgagttgttggataggagttgttacctcttcagtacttaccacatcaaaattaggtttaggcaacaatccatgcttgagaaccacaccttgacgagtcctggtgcacgatctcatcaacaccttgaggtgttcctccatgatcttgcgtgcttccccatcaagatcctccaacgagattggaataatattggatggttcaacctccggtttggttgttggcggcttcgtcatggtggcgtcgaagttgagatgacgttgagcagatttccccagcggagtcgccaaaattcgtgctggcaaccttttgtaacaagttgacaagcacgatcgcaacacctaaatgacttacggtgatcctagagtcgctaaccacctcaatctagccaaagctaaatcaagatgggttttgataaactaaatcggctagcggagccgatctagatagaactatggataactactcgtttcgtgggcaaaacggaaggttttcaggataaacctacaaagagctgtcgcactctcgcagtggcggtggacgatttacgacgcaaattgataaagatggacaaactaaactagtactagaaacaaaagtaaaagaacgatttgattaattgatagttgattgcttgtttacaattgaaccggccttgtcccttatataggggttggtcttgccctctacaggccctcctccacgtccaactcaggctaaaaatagatggaaacacgaaacatgcaaggaaacccgagattcgatgaaaacggagtctgactcggactctgccgatcagaccggccacatgccggcggtctgaccggcccactagcggtggtctgaccggccaacacacggtggtcagaccggccctttcagaggaaaaccggtagatcgttcaaattttggcaatttctctattttaatcctaggtgccaaatttgggtgtaaacacaaccattgcatatctgaaaatttgtgagcaatataaaaccttttcatttctagatctaaggtaagaatgaaaacatggtgtgtgcttgcatgtgcataatgagcatgatatgacttgagctctttcatgtaccccaaataaatcacttaaaacagcaaaaacctggaaattacagatttcacttaaccctctttgctaatccaccataaattaatcataatccatttaggggtgaaacctggtcgaggctgtagaccaaaactccctctaccaccatcttttaaaccacagcaaggcaccgacaagtagagtcaaaggctcaatagtgctgcagttaaggagtagggcaaaattctttgttttccccatctctctcaacctctcactgccagtgggccacagggcgatgtgggacccactggaaagcctcacaagcccttcacccggccccaccatctacgacgcgtgcgccatgcctcccacacgtcgcacacgccggccgagttctctccacgtcaaccaccttgacgatctccaccattcaacccgccactccaccgaaagtctcctcctctcaccccgagtctgttacgtggaagagccaaggaaatccatccttcgctcgccgggaacggaagcatcttcatcagtgccggtaagatctttgccgtcgccatttccgcattggtgagcttcgccgcaaaccgagcacgggaacgtgatccacttaccacacttaatccatccgtgcattttggatccagttgcgaaggtccaaatcgtcgcttaatcgcaattcacactctcgccgccgacgagccctagctgctgcacggccacgttctggcgctccggtggactccaagacgagccactacaccatcatcttcgatatctcaaaagagcccaagagcccaagcactcgaagctaggtagccggccggagcgagtagaacaagcattcttccccaattccggccgctggcgtcaaccttcgattctagccgtcccggcgagcctcacatcgtttcctggcacacgcaccagtgcaccacccttgggacctcactaacatcatgcgtaccatgttgcaagctagatcgagccgtcactgccatcccggagtggagcgtcgccaccgaggagttccgcgagccgcgcgccgtcgccaatgaggcttcaccaacccctcacagccactcggcgagtcccctaagtgcccaagacaacgcatgcaagcatcaacacccctagatccagcctctagagtgacatgcaacacaaaccgagagccatcaccgtggccattgagtccgatcaccattatttgcaacaagaccaccgatggcttcgccatgaacccctctacgttttggcctttggtcgctcaccgagatcagcctccgtccgccgccagcgatggtgagaacttcgccgccgcgccgtgccctgcttcctagcccccatcacgctgacatgtcggacccacataattaggcgctgaggattacacttagcaaaagtttaaaacttgcaaggttctaaatgtgaaatatgttaagacttacatgtgggatcttgacctgaaagtaattacctaaatcttgggtattcttaatgaatctcccttttaccacgtgttttgatcacgggttgaatcctggaaacctcaggggcctttttgcatattagccattccctgaccataggaccccatctatttaaaacccgaaaatatgaaagaaaataactaaaacattatcctttcaacagaaaaacattcaaacttgaaattcatataaaatcgaataaaactcattttgacataaaaccaacttctttagaatcgtaagattatgaaatttaatgtggtaaactaaaagatacacttactgtataagaaatacccctaaaatttttataaagaataattaccataaaacgtacttcaacttgtaaaattggaaggaaattcatttttactcaaatggagtgaaccaaatttctgtagaatcagtaacatgtgaacttcaatttagtaaaataaaatttggaccttccgtggcaagatcagtacaaaaaagattgtatagcaaaataatcaccaaacatatagcccaatttctaaaattcataagaaattcctcctaactcaaaatacagtgaaccaagccccgctaagtccacagccatgtactcttaaacactgtaaaaaaaagtacctttagtataatgatcatctctaaacttttacgtacgtagtaaaacaagcactaaactacaaggtataacttgtgaacatcatttaaaatgcacttggtaagaccagtaaagatatacttttcattcttgataaccaaaacctggaacaccctaggacatacaatgtctcccaagttaatataacaaattatcaacatagaccatattactagttgtaaaatacataagaaaatcatacaaactcaaaaaattatgaaaccaattgggttaatcttgtaaaacaatcctctttcacctctgtaaattcaaatttaacaaaatcacctatcaaaagtatttcacaacactacctaggtaaataataccctatgtcagcacaaatttggaaattcataactgataaataaaaagagataaaatagaaattcattcacctaaattcacccactatggaaaaattatgtattttagagtattttgtatttttcacatattttggtatttaattgcataccatgtattatatagatatttgtgttaacggtgaaagtctgacttaggtgctgaccatattgctcaagatcaaggcagtttctccccacctcgtttgatcaccttgaaccctatgatttggggaatgaaattgttattttcaaaatagcacatgtattttgttaatacatgtgcccaacttagtaaatagtagatatgcccaacttgctcaacttggtaaatattagatatgctcaacttgttgcattaaccaccttgaatatttgtgcgctcctctgtttgtacccctacgaatggttagagcacactacctatgctcgattgggtctatacatgctttatatgctactacttgcttaggcaagcctataactatacaaatattcatttttagcactttataaatgcaattttgggcatttatttatttcttgacagaagcgaaaatgtttagtatttgtgaactaaaatgagaataaaatggttttagacttgggcgacaactgttgtacgtatggtggtagttgtacaccgatagggggagtgtttgcccacatccacatgtgctattcatggggaggccttagctaattaagttatttaatgactaactttgcattttggtaggccgagaaagaacgggcagtgcctattgacccgtaatggtagtagggctatctagaggagctatccatgtgtgtgtgtttcatgtgaggatgattcattccctcgtgtgtgtgtgtgtgtgtgtgcgtgtgtgtgtgtgtgatccgtggggggacaactaactattccacctcacagaatgggtgtctaagtttgttcaatacaacagtattgtgccttgtggggaaccgggttggttgcgcctatggcgttaggtttaagccatgggccagccacctagcgatgttacagtctagatgtagcatggagtaatacacatcatgctggtgcaaggctaggcattagataatgtaaaggcttcgttgtatcctctagaccacattcaacatgtagaatgtggtagtgcttcgcgagcacgagacaaactagattgttcataacatatgggtaaaactgtacaaactctacagagtctaaaactaatcgattaaccgtgctcacggtcaagagcgacttggtgaggtgtcatgagtatagttttatacttttaaattgtgtttgtgaaattgtgacttggaaatggtgattcgaatttgtttagatgattttggatgatgagattatgccttgttgccgaggcaacaagggtaataatgtgaatttgctatgatctgtattatggaacaattatactctactttaaaaatgatttacaaattccttttgcaaatggttgtgaaacaaaacttgctccaaaaacaaaactacaaatagccatccttaaattataagccttgcatgtagaatgttatgaatgtactgactcttgccatacatatttaactttgttttgcaggtgtcagacctagtttattttgagtgatcgggtaccgttgtttctttaggacttgattctattagtggtctacccctagtcgactgcttgtggtttgggtagccaagcttccgtgaatctaattatatttgaccggtcaacctatgtatattccataatagtgttataaactgaattttattaaagttacaccctattttatatgtgtaacattgctttagatgaaactgtgggactagtgcttatcttgtgaactagtcctacatgagtatgagtttagagcatttgagatgttattgagctctagcgattttgtcaagtctcctttgtgtggtttgacagacatgtctcaggctaaagttgactagcacgcttagtcctagctagcaatatgtcacaccctgaagttcttctcccaagcctaaattcatttaataaattatcgcaagaaagctaattgtttaaggcaagagagaaaccctaaattaataaatgcaaataataatcagaattggcatgtggaatttctcttgggttctacatgtcaaaataagctaacaggatttttagtggaattttcagagccctagaaataattttaactaattaaaatttagcacaagcattaaaaatccctagaaaaatccttttcctttttcttttcttttccctccctttttcttccttcttgggccgccgcccgttccctcccctcccctgtgcaccctcagctggccggcccgaggccgaggcccagctagccaccccgcgcccccctcctccctccgggtcgccggcaggtggggcccacctgtcgggcctctcccctacctccggccggcgctgtccgcgctcgcgaccgccacctcccgcctctcctgcgtctcccgcgcacatcgcccgcctcccgtgcgcggcccgcactcccccgtaaccgccgccacactcccccgcttgcgcccacacttgagatggctgggatttgaatttcgaatcccgccggcctctccctctctccacctcccccacttcgccggccgttttgcgcccctaccggccacgtctcgtcgccccgcgcctatataagggaccacctcaccctcctccacctttttccactttttgccgaccgctcccgagctctccaccgttcccacatcgtcacacccatcgccgccgcctcttccaccactccggccgctgctagccgtcgctagccgccacgttcgccatcccgcgagccgccgcgtccgccattcacctagccgattctgccgccagagcccgcctttgtcctcatgccggtgagcacctccatggccgccgccttcggccggcgtccccgtcctctgtgatctctctctccctctctaatttctcccgttgtgtcccttaggcaacccaggagctcgtccgcccgtcgccgtcgccgtctcgccgctcgctgtcgtcgatcgtcgtcggtgaggccctcctctccttctctctctctcggtgccgcttagcccgccgcttagcgccgctccgtgccgccgtgttgccgccgcttgagccgagcccgtgcgcacccgtccgcttgtcgccgccgccatccgctcgatccaccgcccgcgtggcagcccgtgtgggccgccacgtcggcgccatgtgtgcaccacgtggtgcgccccctcccccggtcccgtggactcggtccaccgtggactggcgcacctgtgccacctccatgtggggcccgcctattggcgccgctctctccgatgacgtcatccgaggtatttaatgcgcaataattcaattaaggacttttctgttatagtaataaacacagtgaatcttctaaaattcatagaaaattcatccgtgctccgtttaagcccattgaagtctcagtaaatcaagaaaaatgcaaagaatctattaaaaatggttttgttctctatttcagtagtcttatagcctgtttgcattgtttgccttgtatgtcgcatagattccggctctcccgacgctctggtgtacttcgaaatagtcgctgaggtccctccaaccgcagagctaggcaagtcatgcttgtcacttgaacatattgaccccatgttgcaaattctctatgtttcctttaaattatgcattgttttataatgttactatacgggatgttacctactatgctcagccatattatttgtgtacctcatttctttgttagcttgggttgtaatatgactagatgttggattaggatttgcttagccatgcttagttcaactagcacacaagagggaatcacattattgcatagacattggcttttagcataactttggatgggtgccaccgcaatggtgttaattaattaaaatacactaaatggtaggctgtgggtgcatggttttgctagtcgtgcccatggcaattaaggaccggttcgcggaatgcccaggaagaacttatcgtacttaccacaagccaacatgggcaatggctaggcttgtagtgtagctttcctctagctaatgtagctaggctagggtgagcgagatggggttgggtcggccggggtgctcggttgatcggcttacggattcaccgtggcacgagagggggcttgcggattcaccgtggcaccagaggatgctatgggctcgaggttttaccccgggatggagaaacggtgaagggcggcgacgcgtggtgcggtgcggacgaagcaaaggcggctagctgttggtgacgccaaaagtgttcgacgcatggttcccggtgtccggtggtcctcagcttccccaatggcaacggcggcagcacgacaccccctccactccctccaaccaccagctccgaacggggagtcccgcaatatggtctttggtagcggtgagattacgcacacaaggtgttcgacgaaatgtattcgggaagaaagctgagaggaatggggatttttgttaggggcttagcttagggtgtaaggaaacggtgtggataagatcaccagcacatgcccatgcgaaatagagctctaatggctatcggataagggcaaggaggtggatgacgtggataaggtttgatctcctcctccattaaggttctgtagctccatcatcgtacctaaagcctaaagtctgtgcgttctagctctagctatggcaggaggctccgttttacctagcggacataaggaggggcgccaaaacatcatgagatgtggataaggttttctcttctctctcacactcagggattgggggaatcaaatggccggtattaggtttgcaggcctcaaagctaggggtgaagaagggcgaggtggcggccgttatccctcggcgtcgagaggcgacgcgcgatggcgacatcgatgacgccggcgctcgtggcggcatgggcggagcggcttccgcggctggggcccacgtgcgagcacggcatggcacacggtctcgctaaccatggtgcatggtcacgcggtggagtggcgcacggttacgcaaagaggggcgcgtggtgggggctgggtcgctgggtgttcggctcactaggttcgagtcgaacacctggcgcgcaatgaacagtgccatgctggaagaaaaagagatttttagggttttggttgatttaaaaatcgagaaagatagctaattcaatttgtattttcaccaatgcatttgatcaacaatattaagtattcaaatgtcaatttggtccaaaattaatattgtccaatattttaaattttactatagcttttatgatttcctatataacttgtaggctctgatatttataaaaattaatcaaaatattctaatgtgactactattaatacaattagctcattggttgtacttatttgtctagcaatgtattttacacggaaaagtttaatctattttattctagaggtaatttgagacttggtataatattgatctaagtatttaattagatactaccatccttcaatctttatatatagggatccatttattttatgtgaccaattattttatatgagtgaattttatgccatgagagatttgttgtaagttagagatattaatttaattattccagtggaacactcctatatatagagagtcattgtagtggcaactatttcatggttactcagatgtcatgacactattcaatccgtaacttatagaaactaataattgacttgtactttatttggctttgctatcttgtgtatcaatatttatatggttaataataaataatatattattgtgattattacttagatgtatatatttagtttaattttccattgtgacaattttatagtttagcgagcaataacaatcataacagccagcatgatgcaaaagttttaaaaagttcgaaattttagtgatttttattatcaggaattttcaggatgttacactctatctccccttcctccctagagttcgagtatgcgtcagatggtggctactcggaggagtagacttcgtctgtgccatcgaggatgcatgtggaatggtgtcgcccgctgctatccaagtcaagacctagtttaggtttatcctttaatttccgttgtatttatgtaagactttaatatgtttgtaagacgtggatatgtatgtcaacattgtcgtttatgtaccctggccagtcctggactggggttttaatgcacattctgcttggacttctattcgggaatttctgggcatgacacaatatctcctatgttatctactcaaggcttcgggctttatatatgatttttttacggttaaaacagcaggagaggctcctactgtgcggctttatttatgattgctacttgatttgatgtgttcatttcaattagcaaatataatgtatagcccagggttctccactgataaaaattgtgaattccatttccaaacttagaaaacttcatggggaactgaaagtagacttttcctacattttattatatccacaagttaaattataaacaccttaacattaggcaatgtgctggacaaaaaattataccttccacaaagtcggcattttgttctttggggcctcacttaaggttgctaattaattcttattgttgataatcttgataatcttgtagatgtcgttcatttggcagccattgggctactccggggggttcgaagaaggaaccttgccccatacactatggctcatgttacaaatcctcggctataaccatcaaccggagtaccactgcttttctgccgagcgaagctcttcacttagaattttcagatcagagttgtatatccaagggagatgggcaaatgaaacagccctcatttccgtggttacgtctgggatgcaccctcagctatgcttgaagttgcttaccaagctatcgtgtattttcagcaccatatgccggggataaccaccagtcactatccaggtttagaagggcggtcagggaaccttaacacaccacttcatcttgcaggcttagtccagtcattggataggtacctcaccttagcattgaatgagcttgacagggttcaaactagagtcgccacacttgatagacagattgaaccattgggtcatcagggatattttagcaatgatcttatctatggtacactacaagaaatatgaccttctgtgacgaattcctcatgacgtcagagctattcgtcattagcacaatccattttatgacgattagtatgagatggggtggcttagtgacgaaaaaaaggtgttcgtcgttaataccaactagaaatcgtcataaagtatttcgatgggagatcgtgacgaatattaatttgtcataaggggcacaaagcaaatgtcatagatttatataatgcatttatagaaaaatatattaaaagttaaagcaatttagtcaagtgaattaaatgaagaaactaaaattttcctataaaaatgatggctagaaatatttttgtaatattctacgtggtctaaattattctctgaaattttccatcaattttaggagcttaataactaattttaataccacaaagttcatttaacctattaaaataaaataaaaaccaattaaaatcccttttgtctttgggcctttttcggcccaagtattactctctccctccttcggcccgcagccactctttccctcattgggccggcttcccctcctccctcttgggccgccggcccaacccttttgctcctccctcgccgaaaagtctatttaacctctctctcctctcaattcaaataatttttcgggtactaaatgatttcaaatgaaaaaaattgtcaacaataaagttgtataacttatcaagatctacaacttttattttggtcattttgctatatgactttgtttcaataatttgaatttgaatttcaaattatgacaacttcaaacaatattttcaagtattaaatggtttcaaccgaaaaggttatcagcaacaatgttttataactcatcaatatctgcaacttttgttttggtcattttgctatatgactttatttaaataatttgaatttgaatttcaaatcataacaacttcaaacaacattttcaaatactaaatgatttcaaccgaaaaagttattaacaacaaagttgtataactcatcaatatctataacttttattttggtcatttcttcatccgacaaaatgatagtaacattgttcacaaaatttgtatatatctcttataatttataaaaccatgtaagagatatgtaaattttgtgaacaatattactattacttcgtcggatgaagaaattaccaaaataaagttatagatattgataagttatacaactttgttgttgatgacttgttcagttcaaatcatttactatttgaaaatattgattgaagttgtcataatttaaaattcaaattcaagttattgaaacaaagtcatatagtaaaatgaccaaaataaaagttatagttattgatgagttatacaactttgttgttgatgactttttcatttgaaatcatttagtatttgaaaatattgtttgaagttgtcataatttgaaattcaaattttatataggtcaatcaaactcaaatgaagaaataaccaaaataaaataggtagatctcaataagttgtacaactt

SEQ ID NO: 27836 - DNA, 5650 bp, Oryza sativa
tgaaaaagtcatcaacaacaaagttgtaaaactcatcaatatatataacttttattttggtcatttcttcatccgataaaacgacagtaatattgttcacaaaatgtagataccagatatctatattttgtgaacaatgttacaaatcactttgtcgcaaatgaccaaaataaaaattgtagatctagatggattatacaactttgttgttgatgacattttcagttgaagtcgttcactgataaaaaattctatttgaagtgctcaaactttgaatttcaatttcaaattattcaaatagagtcagatggagaaatgacaaaaataaaaattttgcatatcgatgagttctataacttcagttttggtgaagtttctatttgaaatcatttattaaccccattttttgttcgaagttgtcaaattttaaaaattcaaaatttgaattgttcaaatgaacttatttgtaaaaatgaccaatacaatagttgtagttctcgatgtgttctaaaattttgttgtttataatttttgcatttgaaacacaaaaatcagcctaaaattaaatttaagttctcataaatttaaggtgaaatgtccattttgtccatacaattttgtagctactacagcacaccagggacattttggtaaattcgcatagaattgctccctgtccatataatagctcaaccagtgaccaacgaaaccttatcctctccctctccaatctccctcttcctctcctcagatcggggcgccggctgagaccgagcggcggctgctcgttgcgatcggggcaggaccccgcttctcccgtccaatccggcggtggctcggtgacgagagtaggggcggcgagagctcggctcctccctcgcctcttctcccctccaatcccggtggcagcggcggcggcggctccgcgacaaggaagggcggcgggagcttggttcctccctcccctcttctccccttcaatcccggcggcggctcggcgacaagtaaggacggcgggagctcggctcctccctcccctcttctcctcttctcatccccgcttctcctctctaatcccggtggggtggtgtaggtgcgggacaagggcggcggctcggcaacggcggctcagcggcgacgacgacgacagcgacatgggaggggccttggcgactttgacgacgaccgtgacgacggagggcctcgtcgacatcgacggcgcgcggtggacggcgacgagcggatccggcaccacctcctccatccaccgcgccacctccatctccgcccccagccacctcgtcgcccttccccgcctcgctcccccagccagggaagggacggtggcgcgcggatctgccgcctcccggcctcgggagcgacggcggcgcatgaatccagcggcctccgtcctcgggagcgccctggcgtgagcgggagtgccggcagcacgcagattcgcaacgacggtgacggtggctgcaacgacgacgacagcggcgatggtagctgcgacgacgacgacggcgatgacagcggctgtgatgaaaacgacaacgctgtgatgcaagtagcggcggtgctctcttcctctgtcctccgccatcagcagcaccagtataccctgatcataagagccgtagtactatggctgatcctgcacttgctagtgatccagagttacacgggctgtcttatatctatgagaggaatggtcgtcattattgtttaaccatggcaactcctactgtagtacctaatcctccagccaaattttcagaaagtgcttagaccttgtattagggatcttcgaaaaattgtaattctcttttaagggcacacagtagtatctcgatataaactctctggtagtccaattttgtaacaccatgtcttgtacttagtctagaatggctaccatctatctttatgtatgactaccatatatatcaatgagaaaccatgtgatccatcaagattattctcacatttcgaattaaaatgcttgctgtccagaatttattgttatgtaaagttgagcttaatttatttaaaatgggcaaattgcactattgaaacgtaaatctagtgctctattcagctatcataaaatttagcacatctttgtgcggccagctcatgtactcttttgtactttgagtgcaggatgacttgcaccctatccatggctgctgcaaccgggagtcagggctccgatcgagacaactccttccaatccaatccgccccggtactcattcgtcggggcaatccagcagcagtcggcgagctgctgaaggcgatcgtcatgatgaagagccctctctacctcacattttagccacacaaaaccagctgtttgaacggatgctagcaaacagtgaaaatatgggttctgccatggctcacaatgcaaatcaaggacagtccaaattagcagatgttcaacgcacccatcctctacacttctcctctgctagttgcggatccacttgtcgcagatgatttgcttcgcgatattgaggccaagctcaatctttggctgttcatcaggaggtattcaggtctgctcatattctcgccggcctcatggaaatcaataagaaggaatttctcaacctgaaacaggcaaacatgccttttatggagttcttggatcgtttcaactatcttggtcgttatcaggaccgtcccgtgaaattcaggggcctgtgcaaaatcttaatagaatgctaaacttaattgctaaaataaaatgaataatttaatacttcataatatatttcatagcaacataaaatagtcaaaaaaattatacctatgcgtaatcttcacttgaaaagcatcgttcttttagtgtttcttgagataaaatcttcaattatatgttcatattgaatattcttcagaatgtatgttcatattgaatcttcttcagaatgtcaccctcaagtgctattatcaacacaattaggttcattggcaacgttaatatcaagtgtttgattattggatggaccttgtgattcttttgtaatataactctgcatagcttctttctaagattgagttaaatcttctattctttttttttcttcttacgattataatacaagaaaggcggataggcctaaggtactcagcccaccctatgctaataactcgatggttcactatgaggtacccaagtaccgtataccctacagtagccccgggtactaagcttggtactagttttctgtatcatcaaaaccgtcaaagaagaacaaaacgtgatgagtactcaaagcctgaatgccgccgagctatatatcatgaccgagtaacctccacttgaactgaggaattgaatcatcaaagaggtatttcagactttatcgaaaaaacttctagggctggcccattgaagcgccttcttactctataaatagcgacctagacggaacgaatctcacccaaatcccaatttgagcaacagtagtcgtgcctcttcatcttcttcacctcacccatttttcttcttgattccaactagggttttttaaacctaaaccaaacaacttatccacccaaaatctgaaactttccaaccttccggattcgaatccccgaacttctcctcctcaaaatgtcgggttcattgggtgaatccgtgtttctaccagatcgcaatctcatcaatgaccgtcgggcaccgcctccctagcttccatgccatcgcccgcacctcccggcctccataaccgccaggcgccacctccctaacctccacaacaaccatgcaccccctgccagccctccacaattgcaagggaccacctcaaaagcctctaggccatcgccggcacctccacgctttggccaatgaatcatgtcctcacccacaatacctgataataaataataaagaactatctccgctttttcatttacttgtcactttttgcacttttagtacgcaaatagttgtcactacgcgcttacggaagttgtggttcctatattcttcttagtgggcctaaaattatatttatgtggcatatgtgtttagaagtttatctgttttatatcccactaaactcaggggcattttggtcattattaattaagttttaggttgagctgaacggtcgcacacgaaacgagagatcttcaggtcatgattaattgagtattaactattataaacttcagaaagtgggtatatttaacttttaaaaaaataagttttatatacaaatttttgtacgaaacacattgtttagcggtatatggaaagcgtgctcaaaataaactatgaagtacctgccccccaatagcggataagaactcacccttaaccctgttattgcataacggagtattacttacgagctatttggtgcagagctaatccaggaagaaattgctcttgtaacctattcgccactccaaaattcgttcccatgttaatgggataatttgttttttttttaaaaaaaaatctggagagactcaatgtttaagctctctgccgatccaaggtccaatgctcactatacagacttcattcaatcagtagaaatccacttatgcagatgaaaaaaaaagcaactcttgattgcaatcaatgaatgatccttacagaagcctgtttagttactcatcaacggtagtgtatttgatgtctgggtatatatgagtggcctctactccgaccgttggtttgatctcaaagttgatgtgatctccatttatatatacagaatgaagtatggccagatcgatgcttagtggtgaacactctgcaagaccaaatacaatgatttttatatatattccaactatatagacactattaagatttgatatatagcaacaatcagacaagtatagaattcatttccatggtgtttctttaaaaaaataaacaacattgttaacttatttcaattattcaaaacaaatatgtagtaaatgggaaggtttaattctaattggaatattttataatctcatattagtaatttcagagtgatattggtatattgttgtgatggagtcgtgatcaagtgcatgagtctatcgagcaggatataaatcgtggtgtccacagtaataataactttgggcattctagtttatgcaaaaaaaacttatacttctataatctaaaaactgttggaaacaaaaacggaacactcagttactgagcctaggagcaccagtactgacctgtgatttgcttgaggattgcctcttcagtgagatatgtagaatcgaatcacaagaactaagccaaccagagagggggggggggtgaatggttggtatacccaaaaaccgaaaacttttagcagaaataaaaggtaccctcgaaatcgatggatcgtggtctgattgaagtagttgtgtcggtctgaccgcttgatgaacgtcggtctgaccgatgtagatcgatcggtcgaatcgccgaaaacgcctgccgccgactcctgtcgccgccggtctgaccgcgtgtgcccaccggtcggatcgccacgatgccgccggtctgaccgtcggtgcgccaccggttagaccgccgaaacccagtgaaccacaaatcgaagaactcttaaagtagataacgactttattacttctctctatgttttacaaagtgcaccaac

SEQ ID NO: 27837 - DNA, 10691 bp, Oryza sativa
ttctttagggaggagaaccaatttttatcaccggtcatgtgccgcgaacaaccaaaatccacaatccacacgttctccttccttgccaccaaagcctacacacaagcagaagtcgaagcctcagtactggggttagatgataataaaaatttaggaatccagtactgagacacacgaccagaagatccaatagacaaatatccacgtgcaaaatcaattttagaattttcagaaaaattcatccgaggccggtctgaccgaggtacggtggccggtctgactaggggccggtctgaccgaggcttcaccgccggtctgaccggtggtcggtctgaccgaggctgttcaaccggtctgaccggtcgccagtctaaccgcgggacccactgcggtctgaccggtgtcctcgagggaaaaccggatttttgccactttgattttgcaaaagcaatctctctctcctttttctgttatgagctaatctgaaacaaaaatcaacaatatgtccatctttgccaaaaaaaagaacaagtatatttttcacgttgtttagacacattgttagagccagaagatttagcaacacaagcagaaacaggaggttttgcatgcacaacattggattttgaagaagatgcattcatggtagacatgataccagcagatttaaacacagttttattagtatcatgtttaatcaaaatctcaccacttctagcaccaacacctaacacaataggaggatgtctagaattatgagcataaggatcaaaacctaaaccacggttatgtgtgctaacctttgattgatccaaaatctttttaccatcagaaaatcttagcaaagaatttttcaaataagaaacctcttttttcaaattagcacaattttttcacaatctaccatgacacctgtcacgtccggaaattcactagtaatttccgaactaatttgtgcataaaaatccttgtccaggaatcagccaaggtacacaaattgacaatttaatatacaaatccatcataaaaataacgttacatacttacaaaagaaaagaaaacagcagcggaataacggtctagcgatggcttcagctccactcccacaggcagctcaactagggtataagccaaacgtcttctccttctggatcctttttcttcaactgaggttgattgattattgcaaggtgagcatatgacatactccgcaagccacacagcaaatatgcaagtgcacaaggataccaaaggatggcataatataggctcatttgcaaaaacagcatttagcaaacatttagaagtaaaacagtagagtaatcaatcatcaattttaaccaacactgcacaacaccccaatgctgcacaggcccaaccatcctgaacaaccatacccggctgtacagatctaactccaaaccaggagctaagcaaatcattatcagttataacatccataattattgtgagaggtgtgagactaattacgaaaaacattgctcaacccgcccatgaccgcgggcacggctattcgaatagttttactctggccagaggtgtaccactgtatccacaagacacatcctcaacatcatgtctaccatgcgttgcgatactggaaagtacccgaatagaggctgtgacaataccctctgcacaacacaactcaccacagtgcaccatacctggatcataatcaccccctctacaaccagaggcatggactccccagcgacccccacgaacttctcgccgcttctcagtctggcaccccgtaatgaaccatgctatacaaaaggtaaagctgttgcccacgctggcttgtagctggtacggttaagtttcacaacagtagctcgcgaaccgatccttaattgtcatgagcacgaccttcaaaaccatgtgctcacaacccaccattaatcatattttaattatcaattaattatcataacacgattgaccatcgtgagctaccattaaatattaccataagtaataatgtagtatatatgattcatcccattaatgagctaatgtttctaagcatggctaagcaattatatatatatatatatatatatatatagcatttagctgaaccaatccaatgtgtaaggtccaagctaatcaaattataacccagaggaaaataaagtcatcttcggccataatcaactgggaaggctcaccacccgatgacattcgaaaataatgcatacgttgaaataaaacaatagctttaaatgggttcaacatgctcaaagggttgtttgggatctgtgtgacttgccttgagcttccgcaaacacttccgaaccttccttaacgaaaacgctctcctccggaacgtcggaaactaaagcgaaagaacaaaatcaacaaaacagtacaaaaacaagcataaccagtacatgtagatatttttaacatgtagatctcgattttagatgaatttagcaacttgaaccactcgaatctgagttacgatgatttagttatgaatttccgaagtttaatcgattttcatctaataaagaaaactaagaatagggattaatgatgtcatcgctgacatcatcaatgtcgactcgacatcagcgacgacctcgccggcgctagaagactcggccggacttttggagggtacctacgcgtagaggagaacaacgcgatctcaccggtactaaccaatgcgacgaacgacgacggatgacgaccggcgacgagcttgtgcggcggcggcggttcggtggacggcggcggcggctctccggtgaccggtggcgacggcgaaggggcggcggagcttctactccaccgcgcgcatctaacggcggcgacgggaggcggccgtgacgacgcaagcggcggcgtgaggcggctgttcgccggccggcgacggcggcggtttgggtggcgcggcggcggcactacggggcacgagagagctcgggagatgggtcaaacgaaagagggcgactaggggatgctatttataggcttggattgaagagatcggactccaaccgagaggatttgagccggaaaaaccgagggttagttggagagataaactcgaaaacgaatccaatttcgcgtcgaattcaaagggataaagtcggatttttgggggaagagatagaggaggataagaggaatatttcccctcaactaattttgcaaacggagcacgggatgcggcggatttggtggaggaagcggcggttgcacaggtacaggacggctggctcgggctctgtccaagcttgaagacgacattgtagcagggagacgaattagacttttcgtcttgggctggctgaaaacaaagcaaagaaagaaagaggaggagctcggctgggccgacttgggctgcacagcacgcgcgcgagggagagacatgttgggctgaaatcagcccaacggcttaggagaggatttaaaaactttttccaattaaaataatcactgaaatgatctttgaattgttaaaaatacttccaatgctcaaatagtttcaagaaaaatcctgaaaatacttggacactcaaagtacttaaaaaaattataatcagaccatttaatgattaatttaatatgtggataattactgaaatgttctttgtagggttaaaattaggaattgagttccgaaaaatccgagaatattccagagagtataattaaccatggagaatttaataaaaattaaatccatccatgctttatatttaggaaattttatttcccacatttaacttcacttataaattaatgaacatttaatataaattctaataataatttattaaataattttttaaatcctaaaacgaaaatcaggatgtgacaacacctttgtttttacgacatttggggcaagaaagcacttcattgtttttcacaacatcttccatgtactcaacacgacctaaagcatcttttagtttcatcttattcaaattacatgttgagcaatccaaaacaacatgaggttgttttaactttttagcagaaatcatgttaaacatcaaactagcatgaaaggcaatttgatatttttgcaacaactttttagttaaaaacaactcatccaaagtgcgtgtgtgcaaagcaaaactacaagcaagagaagatctatttttcaaatcatgtgcagcattaacatctctaatttttgaaatctcattcattaaaacctcacaattttcacaatcatcatcattaggaataagatattttaatctatcaatttcagatttaagagattcaatgataaattcctgttttctatacatcttctcacacttcttattttttgcactcaaaatagtaatagcttcctcaaaagcactcacctcattgtcttcatactctgtgtcagattcaccacgcgccatgaagcaaacatcggagacgttctttcccttgtcatcatctccactttcaccatctacattacttagtggctcgaagggggcacaaactttttgaaaagccttcctaagattctccatcttcctcccttggtaagaacccttcgacttgttgttgttggtcttctcaccatccttgtcttctcttttgcctctcccaagcttaggacaatgcgaacgaagatgatcaattgaactacattcaaagcaacaatttggaccacctcttttcctgttcctggcattattcatagctcgagcaattctgttagcaaccaaagccaaatcctcctcctcgatttgttcgagttgatcatcggatgtggcattaaaaatagcaagaaaagacgacttagatgaagaggcatcaacatccaaagaggaggaagaagaaaccaaagcactcgatttagaatcaactgcgagaaagaacattcatctcatgtgttttcaattttgtataaagtgaatccaaagtcaaagtagacatgttaacagactcctgaatagatgtaactttcatctcccaaatagacatgtcgagaccattcaaaaagtgacgagaaatctcagattgtggataattagcatcataagaagaatcaacagatctaagattactcaaaattttattaaacctaaaaagatagtcatccaaagcttctctaggtttcatctcaaatttaatgtactcctttttaaaaagatctcgacgaagctctttaatgttatttgttccttgatgaaaattactcaaagcaacccaaatctcatgagcagtttgaagatgagcaacacgatcataatccgaacgagaaataccactcaaaagaatgttgcgagctttgcaattttgttcaaaagcagttttttcagcagcagtattaatagcttcaggaatcacataagcatgagaaacttttctccaaatatcataatcttcagccataatataagattgcatcctactacaccaatgagaaaaatccgttccatcgaaaacatgaggcttagttgaaaacctagcgggagtagccatggcaaaaactctagatcgataaaaatccaaagaagaaaacaaggctctgataccacttgtaggatcgaatcacaagaactaagccaaccagagggggggtgaatggttggtatacccaaaaaccgaaaacttttagcggaaataaaagttaccctcgaaatcgatggatcgcggtctgactgaagtagttgcgtcggtctgaccgcctgatgaatgtcggtctgaccgatgtagatcgatcggtcgaatcgccgaaaacgcctgccaccaactcctgtcgccgccggtctgaccgccgtgtgcccaccggtcggaccgccgcgatgccgccggtctgaccgccggtgcgccgccggttagaccgccgaaacccagtgaaccacaaatcgaagaactcttaaagtagataacgactttattacttctctctgtgtttacaaagtgcaccaatagcactccttacaaaaattttgactaaactcgaaaccctaactcaaaactcaactctattgctctctaaaacgataccgggaagcctcacgctccccctctatttatacatgaggtagacagcctaaagccacgaaccaaactcatactaggagtcctaaacaccttaggaaacccactagtacaagaaagaaactttacataaccaatcgtaccaaatttggactccttccaaattcaacttcgcatcctatacgcacacaataactccatcgtatgccatatggaatctccatcaaccacgtgcatcaactctagcctaagtatcccgcatgatctctgaccacaacggacgtcgtcttatccccaagccgactcccggtccatcaccgcaaatactctcccgagacattgagtcacctacacatggaacaaacaaagaaaccatattccgagaccaagctatctccaacttgattcattagcagcaaacaatagtattacatacgtataaactcggatatccaaataaacaacccgaaaccgaaaccgacacagtgtcggccggtcagaccgcgggctgcaccggtctgaccgcgcattacacgccggtctgaccggctactagagcccggtctgaccggtcacacaaaatgataaaatcctgcgatcccctgtaaatctaatcatctccaaaaccactttgtgaataaattccaaataacaaaaccaataatctccaatgcccaattgttcatcatagaataataattgattttacaagatagactctctcaaaggtcctccccatcttcttctcccacagggaaacgagatcgttcattgacagggcattctctggtggccttatatgcaggaccttgttcagcatccttggatcatccactcctttgatggtaaacgttgcaatgtcctcctcgtcgacaaatattgctgaaacatttcgcaaagaacgaaggccggccatagttcagtgcatctttttttttttaaaaaaaaagtttgtgaatatccatgcagaaatgttgatcaatgatcaataccagctctgaagtagctaatcagtactccctccgtcctaaaaagactcaattcttgagtttccgtgtctaacgtttgaccgtccgtcttatatgaaatttttttatgattagtattttcattattgatagatgataaaacatgaataatactttatgcatggcttatctttttaaatttttttcttattttttcaaagaagacggacggtcaaacgttagacattgaaacttaggaattgagttttttttgggacggagggagtatataactagccatataggtgcgctttgcgtgccttttgattctatttaagacttctgtgtatggtctattagtttacattagcttttaagaaggttctgatataagttaatttgtttacaaagtatggattgtaagagaaatcactagaagccacctttgttccctctctttgaatcatatgcttaattaggaggagatacagaaacctctggaaatttggttttttaatacatgcactctttcgatccgatgaccattgtttatccgaactcttcatcgacggctaatatatttttgatgatatggcacatcctcgtgcaagaaagcttactgctttcactattataatataagataagataagttaagattagtctgattttgcttttttcctttaaaatgtttgattttgctcttgtggaaacaaaatccattgtcttttttttttggcaagcgtgcatgagaactatgcatcattttacattaaaaattattttctctcgaaatccatgatgaaaaaatccttactatttggcttctgcgacaaaaaaaaagaagaacaagaaaatactccagaaagaaaaaaatgttattgagaaattactttgaggtaaatatattttatattaaaaattttactaattataagcaccaaattttacattataaaatataatatctctaggctctttaagaatggtaaatttacctcagcgctgcatgcatctacacacattcattgtgatgttaccgaaaaattaagggcctgttcactttgatgtcattttcaaccttaccaagttttggtaaagttaaaaaaaagtgactacatttagtttgctgtcaaattttagtaactatataagaaatcctgccaaaattttggcaagttaccaaaattttggtataattaccaaaatttagataatactaaaatttggtatactaaaatttggtaagttttttttggcatcaaagtgaacaggccctaactgaagatttgttactccgttttctttttaccttttggtgttgccgtctcccagaatgacaaccttgtcagctgggaggccgctggctccaggctgcacaagcgtggggagatagtaccccgcgaaaaagttgcagctgacgaacgtgtaggggatcccctcggcctccactgttcgccggatctgcgcctcgacgtcgaaggtcgccttcgccggctcgacgatatgcgcgtggtcggcgtcgttgccgaaatccgacgggatgaacctctgcaacttcccaattatttacagcttgatcagtgtatatatacagagccaacggaagcaggggcagcagatcgacatgagggcgttgaccttgatgtttccggcctccttgatggcggcgatgatcttcatctgttcgccgacgtcatggtagccgacgaccgatatcacgacgtcggcggccctcaccgccttcaccaggagatcgtggtcgccgatgtcgccctatatgtgtgtgtgatcgattcggatttcggacgacaagcatgttattatttcagacgcagaaacgatcgaacagcagcacgcgaggtacggttgtacgcacctgcaggatggtgacgccggcgtccctgaagctctgcagcagccgcgccctggagctgcttcctccgccgcccgtcgccggaggaggcggcgcggtggcgcgcacgagggcggaggtcgggtggccggcgcgcgcgctcgcggccacgatgaacttgccgaggtgccccgtgccgccgatgataaggatcctgctcttattacgatctccaggttccatcggattatcgattccgacgacgcggcgacgacggtggcggagctaaattcagcgcgaccgtgtgcgggcgggtgcacctgccgttggtgctggatcaggattattctatttattttctatagtagcaatgttgcggatgattgtatgactttctgattgggtatttgtcatgggagaatttattttatgccactacgaaatgtccactctcatatataatatactaagaagattatgcatcatttgttttatcattaaaaatgtactttaagcctgacttaaatctttgtatcactagcaaaagtatatgtacggtgcaacatgcgaagataattttcacaattgagaaaaacctctgccaatttaaatgacaaaccgaaataatacaagcaaaacaaagttagaaatcatatataggccgtgtttagtttcttgtcaaattcttttttatgtatatggacacacaaagtattaaatgtagactaatcacaaaacaaatcacaaaacaaattacagattccacctgtaaactgcgagacgaatctattaatcctaattaatctgtcattagcaaatgtttactgtagcaccacattgtcaaatcatgacacaattaggctcaaaagatttgtctcgcaatttacatgcaaactgtgcaattgatttttttcgtccatatttaatactccatacatgtgtccaaacatttgatgtgacgaattttttagaagtttaaagggaactaaatacagccataacattgaatctggatgcgctcgcatcatcgtcatgacacaaagaatcccccatgtacacaatatcggatgactattccataagttgtcccatgtatattttgctatacctaatcaatcaaagattgtcgttttgatgattcaattagtgaaagttttttaactgttgatggaatgcatttgcaaagtaacaaacttaccacatacacaccttaaacgatcataatttcaaaaggaaaatatttatgaggagataaattcggaagagaaaatatttatggtgccacaattttaccaaaaatcatttaactacattataactacattgtaatttatgaaaaatacattgtaaattttaagaattacattgtgattttaatacttacattgaaatcatgctaatattcactgtatatgaggtgttgactacaaattattaattcattgattatatatcaaaatagcgttgactaaggagctaagaaaagaaaacggaaaagagtaagaagcgaagggatacagatgtatgtgatagacaatatcggacgtatgaatgcaaagcccatcaggtggctggtcctagatctgattgaaatcagttacgaattgtgacagcagatttttaccaataccaaaagagaggaggaaaaaagagaggatattggaacaagatggcgaggatcagaatgattgggagaaaaagaaaaaaagagagacaaaaagcgatcgggagaggggcgcacgtggcttcaagtggaggcgtataagatggggtggcgggatgatgtgagccgattgggttgggttgggctggaagggggtgtataatagtcacgtcgaattggataaaggtgatacacaaccaac

SEQ ID NO: 27838 - DNA, 23035 bp, Oryza sativa
tataatactagagattacactaaatatttgaacaagataagtggttttggtacgtcatctgtgttagagttggtttttgagtttgtcgtccgtatctaattcgagagtctagaataactattatacaccccccagcccaacccaaccgagccacaccatcccgcgcgcatccactaggtgccacgtgctcccctcccctaattggcatctttttgtttctctggttttcgtttctgtttctcctttttctttctcctgatcatcatgatactctcccgatccttccttgcatattccaaatttctatcctcataatattttccttttgaaattataattgttataaggtgtgtatgcgaaaaatttgttactttgtaaatgcttttcatctactataagaaaactttcactaattgaataatcaaaacttcaatctttggtcgatgaggtatagaaaaatacacatgtgtcaacttatagaataactacccgatcaatttgtgaggccacgaaaaggtgtacacgaaagattttttgtgtgatgacgcatgaagctagtgtaaccgggcttaatgctatatataatttacgactttgttttgccattgttttgtttctcttgtttcaattttttatttaaattggcagagtttttatcaatcgtgaaaattgtttgtagcgcacatatattttgactagtatgttcaaaattcaacaacatataacaaacaagggattactaatttttaaacctccgtcttatgccacaactcggctgttggacaagggaaaaggaaaattgagttaggaggagtctgagatggatcaaccgactctagttcaaggaataggaggggttctgttggagtcaagtcgagtcggttgattgaactgactctgaaggatctattttggaagttcagtaatgatgttgtatctttccgatttcgtacatttcctattttgtgccgaatactttccgcatttatcttccatattttcttttgtgcacattactcgtttacttgtcggattgacctttcagccgatcgtttatgaattgcaagtcttataaagttctttatgggtttgttgttcgagtttacttcacctaggtaaattaggagttcttccttttcatcagaggaagagttttagtataagtcttaggtgtggtgcctaggctttatattttcaagagtaaaatacatggaggaccacttaacttgtttacgtgaattgtgtaggtcaatctactttcaaaatggacatctagatcactagtgtgagttaagtcaatcaatttgcctttctaactatccacatgagcataccttgtacacatgttatactatctatgattgaaaaatttgctatcagacatgtgcaaaaaaaccgcatgtgtttcttatcctttctcacagtactagcactgagaaatatacaaaattaggggaaccaaatcatttcacttgtgtctattttgatgaacttttcagttctcagtcctctctctcgtttgccatcaaacctgacagcggcgacaagctatgaatataaacaacgacgaaggcaaaatcctaggcagtggcggcgacaagctatgaatataaacagcaacagaggcaaaattcgaggaggcagtggctagggtgtgcaacggctgcagatgcctatacatgtgccacattatgtgtacaaggtgtgctcacgtggatagttagctagctaaataactcagttaactaatcctatgtggcacgcttcaggggcggatttaagatccggctagcctgggccgttgcccgggctcatgggcctgcattagtggacctactacttattatccatactaggaaaaagtacactgatggtccctcaatttgtcatcgagataaaaaacgccctggaaccacaaaaccagatatacagggtcccttaagtatacaaaaccggtcacccgagattcttcggtggttttgaccctggttttggtctacgtggcggctgagtcagcgtgggacccacgtgagccccacacgtccacgtcagcctcctctccctctttcccctcttctctcccttcctcatctctctctctcacttctctgtcgagacgagcggcggccgagattgacgagatgagtggtttccagcagggtggatagcgtgatgggcggcgaagagatgggcagctgccggcgaggaggatggcgcgacgagcggcgaccagtggggagaaggggcagcgcgcggtggtcggcagaaggacctatggagagatcgccgtcatcatcaatatctcgaacagcgagccaccggcgtcgtcgctgcggtggcggacgtcgcacaccatgcacaggcggccgtcgagctcccgcgagcgttttcccaaccgatatggccggtcacatggaagccaggcggcgggggggagcaaggcggcgacgcggtgccggcggcgacgacacgggagcaagggagcaaggcagcggaagcagcctcctctccgtgcgacgacgcgggagcaggggagcaaggcggcggcggcagcgtcctctccgcggcgccgctagccgacatgtggtaaggagagaaaggcggcagcggagggagcaagacaacgacgcggcggtggcgggagagcaaggcgtcggcggcgggacaatgggagggcgctcgcctcactcactaggccgaccctgtgcttccccactaggccgctgccgcctcagcctcctcctcgccgtgctcacctcaccaacgccgcgcgcgaggaggcccacgccatcacatgcgccgtgtcccgcgtcatcgccgcgcaccctggcccgttccctcgccgcgctcccgacacggccgtgctcccaacgccgcctgcttccccaacctctgcgacctcggcttctccctcatcggcatcaccaaccaggacatgcacagactccagcctccccgcgcctcatcgccaccgacaagccgacgccgacgccggcctccccgcgcctcgccaccaccgacaagctgaccccgtgcttccccactaggccgccgacgccgccaccaccgtcgctgtcgcggcgccgccctcatcctctcccgctcgccccggctaggttgcagataagtgaaagagatatgaggaagggagagaagaggggaaagagaagagagagaggaggcttacgtggattaccctgacatgtggggtccatgtgggtcccgcactgactcagcagccacgtaggataaaacccgggtcaaaaaccgccgagggaccttaggtgaccggttttgattagttaagggacgcgggatatctggttttgcggtttgacgacaattttgtatctcgatgacaagttgagggaccttgggtgtactttttcctccatactattccacagagaaaaccacctcccctcccaagcaatgagtgaatgaggcccacgtatttagcgccaagcccacgagattcggagactgtttagcttcctgtagcccattttggcgaaccacgcgaccacggcgacgcttcatttctcacgagacgcgggcacttatttccaacgcggtggcaggcagccagcgacgctcccaattccaaaaacttaacactgggcttgctgtgtcaagggcttcagcttgagcagattgcagtcacatcggcgcggccacgcgcccggccggccggccggtaagctcggagtcagaggcaccggcgattaggcacttagattagctagttcagttggcttcttgcctacttgttcactgttcagtttttcacacaggttgcagacttgcagttgtagcatcgtaggcgaagcaaatggcagagcagcaggagcaggggacaaggaaaaagcttggccagagaggtaaaaacttgaagttggattgttaaccagtctattgtttaaactatgtcattttaaattttaatcaactgaaacaagtgattggattagatttggaattttggatcctatatgcagacgtgcttattcttggctcttggctcttgctaaaatttcaggaatgagggaattcttggttgatttgaggagccaggaggaacctgttgttgctgatcctaatggaaggcatgggactcaaattcagaacaagaacagccaccggaagcacaagatcatttgcaaccaagaccaaacatgagtaattctatcagtgagttcaatccaaatgaaatcatatgcgatccttgcttgtgtttaaaactgttgcgttttagtttaaaactgttgcgtttcgcaaccttgtttgtgtgtgccgcgtgaatgattttacgcatatttgttattcatcatctggcttgcggctagcttgcccaagctcatgaaatatcctggatccgccactggcacgctttgtgtacatgatgtgttcacatggatagttagatagctaaaatgtttcacttaattcacattagttatcaatatgtgtattctatatgacacaactaaataagttggatgaccctccatgtattttactctattttcaaggaagttaaattagagaaacggacagatatagtaaattggagaacagcatcctttcaccacgttagctctagcatgtcggtgttggcgaacagggtagtatttaccatatgtggttacctattaatgtgcccaaagtaaatacatctgtatgggtttacctatgctcagttttactcgatctgaagttgtgctcgaccccaactatctcctctgacttcttgaactagataggtgttttgctttatccgtgttctaaaaatcttgccacattctttattagataaaacaccattctagctactatagattttctttgacaacacaaggttaaagagagatatactttaaccatccaagtgtcctttgggatcaatgtgatgtcccaaaataatctgtggtgaagtactttattacatgggcaaccataggccctgagccccttacatccaaaggtttaaaataaaagatagcacatcaaagactatatggatcagcattcacaggcacttaatgatggcacaaactactatcaaagccttctcctccattatctcctaacccaatgcttagcaacccatattggaaatgcatagcaatgtatgagaacataatgaactagcagatagggtttattttgcgtaaaaccatagtttaaacagtcaaagcacatttttaaacatgttcttgatccaatgtcattattgtaatatcatcaattttgcgtaatcccacgaatctatcttaactcagctaatccacatgactaaaccatcataatccattctcccaagatttacaaagttgggactaacttggagtaacattattcaacatgctcattgtaggaacgaatacaagaacgaagcctcaaaaacgaaatctttttgcagaataaaagaaaccctttaacatgaaggagcacggtgtgacctcaagtagttatgaggtctgacctctcatatacctacagtctaacttcctgatctctgtagatgctctagtctgacctcctagatgcttccggtctgacaacccgggtgtcgccgatctaactttattgcatcaacttgtgtttacaaagtgcatctaacacactcatttcacaactcatgaactagaatcgaaacctcaaagcaaacctttacttttctctctaaaagttgccttaattttgagactcaacccctcgtctatttatatccacaaacatggctacctacaaccatgaatgcaactagaacaaagaatcctaatcaaatcaatgatacacgcatccgcttacaactccaaactccaatcttaccaaacttggtctcctgcttcccatacacacaattcttgttgtatgccatatgaaaacttcacctccacacacattattctttagccttaatatcttgtatgatctccttggtagtctagacctcaacttctcccaactctagtctcgatccatcattggcaatactcccgaggtctcaagagaccatatccaagtacaagttcttccccaacttgactcacattagcacacaacagtatatatcacatataaaaacatctagaaatcatatacattaagaaatcaacatactccataaaattaactcgaaatcgactccctcctgaagtctatcagcctgacctcttgccccatgtcgatcagagaaagatgatactccttacggaaaaaccgaaaagaaataccatcgtctgcatctagcaaggtgcaaacaagaacccgactcatctaccacagcaaatttctcccatcctacaacattccaaactctacgaaaatcaacatccatacctatcttccgaagtagtttgaggtcgtatgcttgggtgtgagcaaacgtcctatccttgagcatatggtaggcttgcatctctcggtcacctacgaggtcgaggtcggaatcatgaaggagtcttggcggaacattcgcatcctccatcgaaacatcagtcgacgaacgtgtgcttgactcgtcttggtgacggcttgatcgagaatttgatcccttcttgagcagacgggtgatccgtctcttcatgactacagacagagcaagaatacaaggcaaactcgagcgggggttaagttaatacaaaaaattatacctatcggttagtcttgtactaagataacttgtatatgcaagaaattaaatcaaaatgcaagaaataaacttgagaccaactttgcaaagcttgagaagaatttgagagcaagaggaagtgaaaatgagttgaatgtgtgttgaacccccctccactagctacttcacttatatagtgcatccataacggtcacaactgtgatgtggggcccactagccattgccaaaaaaaaattggcaggcgactgttgcctggtcggttcagccgaaccccctggattggtgaacccctagtgggcccaaccggccccacatttagccattggctcccaatggctaaattggtgggagccacattgaatttagccgaaaatttcattttatttttgctcagaaaattcatttttgtaaatttgtctcaaatttaatcctgatgcaaagtttgaaatctaaacatgctttaatgcaaaaaatcaaattgatggaaataaatatgtgatacgtaccaatttacctattggtgagggcaacgtcgttttgggtccgacgagcacgacctgttcctccatcatatttaccttgatgatgtggcacccggctccggaggtggaggagcggatgtcatctgtttctcccgccacaacttctttgtttttggtgcggcttgtggcttcttgactggtttcacaggctttttagcctgtgcatctagctttgtcgatacattccttggacagggcatgctcacgactgcttccttttccaggaagttcttcagtgaaagctatcaacctatccgtctttggtggcttcatttcgacctcttgtatgttctatggattcggccgtacttgattctcaccatagaacactgctctatccttggtcaaaactcgaacttctcttccttcccattgatgtggagccgtatactcccagctcccacgtcaatgttggcctctgtggtgctaaggaatggacgacccaaaatgagcggcgtctccttatctgagtccatgtctaacaccacaaagtctaccgggatgaagaaatcctagatctttactagcacatctccggcgattcccgctaggtagcggaacaaagaatcggccagttggagccgcatcagtgttggtgccaacaccgtgaagttgcttgtcgaagacctccttgggcgtgacgcttacgcttgcaccaaggtcatagagggcttggtcaaagtgttgtctcccgattgagcaagtgattgtgggacaccccggatctttcttcttttcctggagccagtggagtatagcgttgctacactcctccgtaagcttcactaccttcgtggttggcagtggtctcttgttatccagaatgtccttcaggtagcgagcgtatgtaggtacctgcattgcatccaggagtggtacgtttatgtggatcttcttaatgactttgacaaaattaattaacgagcgaattgctcgtcgatggatggcttttgatatctctaaggaaatggcagcagatttgtgtcgtattattcctgcggcactaccttctccttctaggttgcctcctcggtcccagcggtgttagttggaacagcttcctcgctattcctcctagttcatgcagtgttaggatatggcgaatcccgagtggattttcctcccctcgtggtgattgctttagcattttctatggagggttcaggttgccccggaatcctcccatattcatttgtaggaactagagcagctagttgcaccagctgagtttgtagcatcttattaaaactcggttggttttggaaagtagaagcaaagccatctagcttgacatttatattttccaagatgttatcattggtagctaacttcttgtttaaagcatcagtggttttagcttgagcaaagacaagatccttcaaggaaggctaattattaaaattaccgttattgttgttgttgctgcctccttggtagaatgggcagggctggtttcacccatgacctccttgtggacgatatccgttgttcatgaacattgcctcctcatgagtctctggacagtctgtcccggaatgacccgtgttcccgtagacctcacacatgatgtgtgagtctaaggtcttgatggtgccttggggcttgttcttttcctggtcgtccaagcgcttcattaggaggtccagttttgcggccagtatttccgtctccttgttggtatgcatgccacattaacgagtctagagtcgttctcgctccagcctatgtttgagaccattttctctattaaatcgacggcacatctaaccgtcttagagaagaaagctcctccagtagcaaccgctaggtggtcccagtacgaagatgttaacccgttgtaaaagctttgtaggatcagccagtcgtccttcccgtgatgacgacaggtggcgacgtaatcctgcagcctttcccatgcttcaagaatggactcatcccttgtctactggaagcttgagattcttccgcgaaaggcattggtcttgcccatcaggaagaacttcgagaggaacgccatagagcatttgttccatgtgtccaccattgcatggttagcgtaaaaccattgtttcgccttcccaaggagggaaaacggaaacagtcagagcctgatggcatttgggctgatgcctttcatcgtgtatgtgctacaaatctcaaggaactattgcagatgagcactagcatcctcatttggcttgccacagaaggggctagcctgcgccattctaatgaggctggtcttcaagtcgaagtaaccgtctcccaagtcgatgtgtggcccaatgggcacattgttagcagagggagcggcgaactcacgggaggtcttctcagccatattcttaaagctcggggacgctgggatgactggtttgtttgtcgacaaagttttctgtggagggacaacttgcgaattgacacctaaaaaaaacttattggttgtcttggaagtttttcggcaagtcaaaaacagtcatacactaccttgttttcacaacaaagtaaaaacaatcaaggttagcctgtaaaggacaatgattatttagaggtaaatataaagttattagcacgtagtaatctcttaatcattaaccttcccgagcaatagcgccagaatcgcttgttgatatttcttaatgatattactagaaatataatccccagtaatggcgctgaaatattcttggtatattatggtcacgtatatgatctgcaaacgcacgaatataccattggaacatttcacttggaagtattccaaggtatcgtacttatttaatcccaagggaagatatgataagagagcactatgctaataatttatatgttacttgtatacatcaaagtctatataggggttagttaattcaaaagggtacgtgacacgaagaaagaagaaccaagataatctcactaaatataatctacactaagtggaaaaagaataagaaaagaattcattcctatacttatgttacacagtcatctttagtttacacttactattatacaaccatgtagccaataccccccccccccaactacgccctcctgatgtttcaagagaccatccctaattgtcgagttccttacgacaatccgtcatggccatccaactggaaatgaatacggaggagtacccatacctggaaagtgtcttaggaatacccctattaagttgtcaccatcagcggcccacctctattgtccgcagtatataaccccaaataatggtatctactaatctaagcctcatgcttacattattaaatactactctatgtcctctagaatgacatagagcaatcatttgaatgaacattaaaccccacaccagtgcatatctctagtaagctagctacataattatattaagacaagtataaagtaaagtcggtactcagataatatggatgaagtaaaatactgaagctgaataaagaagaatatttcattaattctataagtcttacaaaagaagtagaagctaagccatacccgaaatctcctgaagactcgaggactaagagaactattctaattctactccaccagtacaagaacactaagctaaacttcggagagagcttgatcttcttcttggagtgtgtgttggagagtgaatgagcacccctttatataacctctcagtgatggttatggcagttggaaatgccagaaacgccctccaaccgtcattgagagtacatctggaacgtccacgtggaaggacgggatgagtggctatggctagggtttggccgaacctaggccggcccatccagcctccacttttggcaggtgcatcttttgttgggctttattctccgtaatgtggtggttgggcctatatttaatgttattttactagatttgtaagcccatccacccataagtttatctcttgatggacagtgattgattattcagttatttttcatagattctcctccaaatatgtagcaatatctgcaaacaaataaaatccaagtacaagtgaagatagagtattctaaacaaaatatgcattgcagatatagttagttgtcctttattccaattatatcgacggtcgaaattggtctataacgatcgtcaacacctaccctcctcaatggtcaataggagaacggcaggctacagtgcaagccgattgttggtcacactagcttgtggtaagtacagaatgtcccctaaggggaacccgagaaccgatccttaattggcatcgatgcgactatcaaaacaatgcatccatggtctaccattaagaccaatgaaccatggccaaatgtcatgagcttgcaactcatcaagtaactaaagtataaagcaagttattattccatttgtgacatagtgagactaagcatggctaagtgtaacctatttctagctaggtcaacttgagagccctaggctagtcaagttaacacccgaattatgaaggaataagtaaacaataaacacaaccacataaagtatacataggcaatccctatccttaagtaattaatgaaacagtgaattacattagcggtacatcaacttagcaagtaggtgcaatgtttttagtgcaacaactggagaagtgagcatgctaagaacttaagaactgatgtaacaatttaattattttgaacatgttttttattatacacattaagttttcaagtacttattttatgaatatgcatgcgtagatttgtaaatttgaacttagcgaatgagcaaaacagtacatcaaaaaacagaagcaatacatggaagcatttgtaatggaattttcacaatttctgaaaaattatgcaagtcacattggaccaattcaaccgatcgagatgatccacgggagaccgatggccaggatttgcctacacagataaatgaccgggatcagccgacacacgatcatgcgggctcatcgtatgatggcgcacggggcggccacggcagactggcgcactgaggtggcaccgacatggcgccactgtggtgccgacatgggcaaccaagggaaagggccacacggatggcccggatgaggttagcttgcaggacagtccgactggacagtggtggcacgtggcccaatggatgctggtgcagcacccatctggcttggcgatgagctcgggaagcggcgcaaaggagtgggacgggatggggtcttcaccgaacgacgaggaggacgtcacgtggagctcgacactgaggttctggtggtggtggccttcagctagcagtggtgacggtcgtctggatgcgcttgttgaggaaggagcagtggtcgagtgtctctgggacctagggattttagaggaggggttagggagaggagtagtgtgttatagatcgatggccagaacccgacgaggcgaagcgggcttatgagggatagcagccagggaggcacttgggttgtcaccgacatcgaggaaccggcaaccggaattgctctcaacctcaagaagacgtggaagggttttccgttttcatagtctcgtgaagcaaacttgaggcctgggatgcggagtgaggcgacctggagcgcatccacctcgtttctgcaaacgagtgggggaggaggcaggggagcagtagcaatgtggttaacgtcagcccagacgcctcggttggaggtcagggttggatccaacaagttggccccatgtatcggtgcacaagggcggcaacggtgtagggggtaagccagcctcactaaaagaggtatactccctccgtcccaaaataagtacagttttgcactgttcatatacaacatttgatcgttcgtcttatttgaaatcttttgatgattaatatttttattgttattagatgataaaacatgaataatactttatgtgtgattaatttttataaatttttcaaataagacggacagtcaaacgttggacatggattccaacgactgcacttattttgggatggatgtattaattggaagttttagtctacttggtagaatagactggtgatagaattgtttggtggtattatgtgataccactgcaatgtagcactatggatgcaattttctgttttaacatttgagtaaatttgaagcacagctgagggaaaaacaaatgatcatatagtactatttgcttgagtaacactgagggtattgttggtgatatgccttagaggcaatcgtagagatgattatatcacatactatgtttacatatttatccgacattgttccttgaaatagataactcattattgcttaatgaatatgtgattctttcatgagactttttatattgtatgttgctatttctaaaggatccctgatcaaatatcatatgtggaacaaatatgtttagatgatcagcacatgtattaattgatgatcatgtctcatagatcatggtacagagataccgaattaataatgtagacacatgttcggaaacatgttgttggatagacccaacatgagacattgcaagagccatatgtgttgtgtcatcagtgatctcatttaatgttagtattgaatcattagacctgagattatcatggttcccaacatgtgtagtagcttacttagggactgctaatcgctactccataattgggtagttataaaagtagttttcgggtatgctataaaacatgttgtgagatatgaataataaagataggatttgcccctcatatggagagatatatctgggcccctcgatgttattgattatggaagtgcatggccatgccaaaggtgattgaggagtcaatcataagctatataatctatcacaagttcgagtgaatgattgaactattagaggatgtcccatatctagccttgagcttaatcgatatcgtgaggcaaaggggttcatataagtttacactagaagttcaaccgatatgatctttatgtatgctcggtgggtcaatacgttctgctagggaccgctgttgacacgtggaccgaaaagaagttttcgggttgcagccgagtgtatatgaacctacagggtcgcatgtttaaagggctagaataaagagattggatggatggagagccaatatgtactcaatcggatagggatacgagtaggactcctatgagcctcgaagccccagtcgtggatcctatatattcgtgagggggtgtgactggcggaattaacacaccacgtgaaatcctagccgtgactcccctccccgagcaaaccctagctgcgcgcgggtgctagcacatctgcccgtggtgtttcttccctggacatgtggataccggtagaggcgcctctgctttgcggtgctgattggcatgggagcacggcgaggagaacgcacgaagaggagaaggtcgagccggtgcgatcgactacttcctctacatcgacgcgcactaaatcgcgagggttccttcaccttcttagtgcttacttccgctgcgcagtgcgtcgagtggtaacgatctatgatctaatacttgcatgattcctggtttacgcgctagaaaattttgatttatgctatcatagcctgtgcgtatcccaacgggtatgaccaatcatttgtttaacatcctgaaaatgaaaaatgatctactacagcacaaaacaggtaattatgcaattttaaaagtactgagcaaaatgctctaagaagaaatatgtgtatcgatctaggacaagcactaagcactctgatttcaggagttactctttaaacataaatcagaatggcgatgtccaaagttggtggcttttgtcagaagcgacaggttgatctctaggatttttttttttaatttttgctacaagttcataaggaatactgaaaaacattttacagcatgtgatgtgtataacagaagtagattattttacatttacaacattgcacggttgcaggtatacaggatctgagtcatgcccgttctgctgcgagagtctgatatacccggagagttttgggtactcagcttcatcaacagcttgcggcttgcccgcccctcacactgacagtctcttgatggagcctttaatttttactgtaccttaggatgattagggctgtgttccggaaacgagatggtttattaatgtataattgattaaatattagctaaaaataacttaaaaatggattaatatgatttttttaaaaacaactttcgtttctgacaacatggtggtgaatgttattagctttttttttttcttttttttgtaaaaaacacacgttcagtagtttgaattcagcctaaggccatccattgtattggatccaatgaatttgaatttgttgtactacgcctggtagtatgagtaatgaataatttgataggcataagttggaaataaagtatacggtaaccgaatactattcatatttaaacttcgactattcatccttttaaatacacacacgcacacacacacataacaaagacgccatattatcaaaggtgttgcatccttcagactgacatgtgctgcctgccccttcagattttcaactgtatatgcaacagcagagaataaaatgcaactttcgacataaaacctgttcaccgtatgtctttatctaaaacaacctagtaaagaaaagcaaaagtactgcaaatacaaactctagaagaaacactagtacatggggttgaaaaaacatcccatcaagcatttcatctggacactactatctgctacaaactgtacaccagctggttgggcagtgtttgaaaatgtacaaagctccaaccaaaatcaaactcgactcatcagacgagggtcagcgatcgaggtttcgagaaaatgctgagctttcttgagatataccgagctgattttgatattggttgtttgcagatcgtgccaatgggcgaattctctgctgcaccattgacagccacctcacttgaacatgaattgccaaactggtcgctttgtctagagtccctgagaagttgaagcaacttgattgaagaagcctttgcaacctcagttccattgaccgacaaatcgaccagcgcagggatgacaccttccttcatgacaagaacacaatcgtcgatgctgcgagagcataaggcaagaaggatacctgacgcatgctcgcgttccacggagcttcctgtgtccagataatctgaaatagaactgaggcattgatcagttctgataatgagatccgcagcttgtttcccttcacttaaatttagtagaatctttaggcaacactcaggcgatttcccttgactgagaattggagatagctttgagattattccagaagaaattaggaaagattgtacatcatttttgaatgaaagctcgcagatgatcttcaaaactagttctaggcacagggagtctgcactatcccaagctagaaacacagatggagcaacaacagatgccatgagacgagatttccgacaacttggttgctgcagcagttcatggagtatctccaatgcttcagtttttaactctgaatcaagaaatgaagcaacgagacgcactgcatcttcactaatggatggaattcgggtcctgtatgaaaaggaaatcagccgttacaaaagtttattggagaacaaacaaaacaaattgccataatctgaaccctttgtttttaaaaagtagcacaaaacaatcttcgtttttggaggataaatatagggcactcagttttatttatggatttttattgaaaaaggtagaaacaggaaatatcttatgtttgtcaacagtaaaatctgcacaaggagatttttagataattaatgaattaaaaccagagctctacatccaacatggttgtacacagccaaacacaaggagaatatattatacaagaatgctcacctgctattacgtagaaaagcaagaaaaaactgaatgccagttctttgagcttccattgtgcattttccattatcgttcttaagaaactcaagaaatgcttctaaaaaaccattggaaatcatagaacgccaaatttgatattcacgattcagaacacttttgaaatctctgacagccttcacttgaagttccattggaagctcggacagctcgtaaaagaaattcagaaacatctccttgttgaagctgctgaaggacaaatacaactggtaataagcgtttgaaaaaaactgagtagaattagtccttgactcttctgtttcccgcattggagatgatacataactagaaccagataatgcaacagatgaactgctatgatcagacatgtaatctctctttgttccagcaactagaggtgctgagatattgtgtagacttgaaacagagtaactatgaaattgttcaggtaaagaagtgaattcaagctcattatctttgcaccagttgcagatcacagccttcatacaagtatttggagtaatcgtgaaattttctaactttaactgtgtcctaggacaaatatcatatccctcactgaaccatttctcaatgttctctctctcataggtttgtccagatgctattatcacaggatcgtacatcagcttcatagatagtgggcagcagaactctggaggagtagaaaatcgtgacaaattattctgctcttcacatcttccagtccaagagtttgtaggtgaaaagcatttctgtggagcatcggtaccactagcaattaggtttgtactcgaagtaacgtttgcaacatccacaccttcattctttgcactaccctcaggcttcatagtctttccatatttcctaactagatattgaaaaaatttgagtattccttcctttttgggatcattaccattgatcttgtccagtagtttcttgattgctcgtctttcaattaagatagcctttggtgacgtcaaatttaactttgacgctgcaaacaagaaagtctggagttcatgttcttgggttgcatcagactgccgaagcatctccaaaatggctttgccagcctcatcttcttctgggtcaacaatgaatttcacatccccaagatcatcatgaacatcagccacctaagacaaatagtcaagtataaacatgttaatgtgacaatctgtgcgatatttagataatggaagaactcattaaattgcatcgagatgatacaattgtcctgagaattgatgtgtgtgtttatactcacacatctgccatgtaatctaaaaaatcttttggagaaacaacaaaaaacatagatcatgtttctggatacagtactgtctaaacctccagataaatgtttgtgaataatatcctgaaattgttaggttttgttgatgccccagaaataacagacgcaagtactgtccaaggagagcttcatctctattacagacgcaagtttgatgttgtttgtgtcatcactagcttcaaacttttaacacagcaaaccatgtggttaatgctgtgcaatgtagaaaaagtttgcctgttattatcagttcaattaagtaaactaacctgattagctaatgatgacgggaccatattctgaaccaggaacaagcttcgcctcagcgcatctcttatcctttcgcaccgcattgcagttgcctcccctgtaatagcctgagatgtgcaaatttggtatcagaaagcaattgttcagaaaccagggaaaacaatctcaaataaaacaataagataaaaacaaaggagtcattatagtttcctgaacataatgactcatttatcaatattaaagaacaacataccaagtaaagactactgcactcaatgcagttctggattatgagttttcctttgtcaactatgttgtacaggttgcatagttcctctatacccgctttacatcctggttgagcagtttcgattgagggaagaatagaagagactttatctaacatcattgtcaattcactgcacattgagctgtgaacctaagacagaaagacaaaagaataattgcattaactgtaataaaatgttgaagaatatataatggggagataatcactactgaaaactatctatgaagtaaatgataatatttatatgaaacatcaaataatgatcttattgaaatactgcagttttaactctgcctctcaacaggtacaaaggaatcacatcatatcatagataagcatgcaagaaaaaatgtttgtatcaaagatatgttctttatgccatacaaagatatgatctttatgaggaaattattgtgcatctatcttgaatcagacaaagaaaacactcccaaatttgaactggatatgtgaccaattgaggtagtctcaaattctttgccatggagtcacaattttacacagcatttaccatctatagtgatgtgtagtctaagatttgtgtgcatgttacacaattaatgatatttactcagggataaaaccttaaagaactcaaatttcatacccatagatctttctggtactaagaaagcaacgtaaaactatttccaaccaatcaaataatgcaaatgataaagcaatatcataagaacctatattccaaacaaaacatggacggcaacaggtaacaagaaacattactaaaagatgaaagtttcagcggtccaatatccatacctttggattagaattacgccaggatattccaatcactccatcattattattctccatcgactaacagtaatccgtgataaaagtatcaaactgcccaataagagtcaacatacagtataacaatatcagcagaaaataccaaaatgatcatagctacaaaatactatcaattgtatggcaatcgagaaccttgggggcttgtgctataggatcatattaaagcaagatgcaaataaaggaacattgtcaaaacaggcagaaaggttacgccacatcaagctaagcagtcagttgaactttatctgaacttttcttaacttattgtagatatcctttttgtatttgtacgtgagtcatgcaaataaaaaaaagcaagtgctcagctttttcgtctttttatttgcaattaggattttttttatgttagtacagcaggaagaaaaaaaccaaattgatatttgaagtagtacagtttatcatacgtactcctggtggtgactatctaggtccaacacacattgtccaatgcagttcaaggtgatgtactcaaattctaagccgaacatgtacagcagggtcaaatcttagactaaagactattaataacacaggagatcggtgcaaattgaagagtgattctgatttcaacatcagatccaactataggtgaaagttgattaattggtctgaatgctgatttgtttttcaaaaatctttcttgacagttggaagttttcagattaacctagcagataataacactaaactttcttactatatttattttttaaaaacaattctaccattccacaaaaaaattgtatttcagaagacatataagcttctatggtctattggagtctctaaatataattgacatgaataagatatttacagaagatctacaatgctccaagagaaatatgcatattatgttaaggaactgtttggttaaaaaaaaatttcttaacataaaaagattatgcggggataaaaataatatatttttaagcacctgtaacaactcagtgccaattggttggtgccaatcaaataatttctctctaatacatgcttcacaatcttggtattctatatttactggaaaagaaatcattcgagtgaaccaaaaaaaattgcaaacgtaactaaattcttccaaaagaaaataattatcacttgccactatgtatctagattgtagacgatcaatcgtagtcagtaggagtgtaggaccacctttttttttttgttttgaaaggtcaattatactgtacccttttctttagtgggaatatgctgtaccatatgatggaatttccaacctaaaggataacagagagctcatacacgaaaaagaagggaagcggtacgaaagtaaatattttttaaacagataaaattaacagagcactatcctaagcaagcagataagtacataaagggaaaaggtaaaggagaaaaagtatagtggcctagagaacaagagattcggaatagagagatttgaactcaaaaagtaaaaaggctttatttttgaaatttcgttctctacatctatatgcagagcaataagcaactcagaatactgctgaggaagagctgagaagataggcacccacaagcgaactccagcggataatcaacaaaagaatttagcaaaacaaagctcagcagaaggtgaaacttgaggaagaaactgacctcttttggatttgcccctcttcctttcttgtcccagagagcaaaagtgattataatctgctggaatacacaaagatagcctaaaaaaacagtgattcatgcgcaaaaaaaataatttaacatgtaaaaactgactcttttttttaaaaaaaaattaaaaataaaaagggatgtaacagaacaaaagagtaccagtaaactgcttctgtcctgagtttctggagcagatgaagaaaccttaaactgccctaattaagcagaggaaacattcaatagatgctgagaaaaaagaaagaaaaaagtaaagaagaaacaagacaggttggaaccctcaccccgcgggacagatagaaataatcttggctggattcttggctgacccagactagttctttcgttcacaagattgggttcttcccccctaaaattgttggacttagctgctgcagcctgcagctagctagctaccgcgggatcgattcggcgggactgcctgctacatcacggcgacggctgccgctcaagtgggaggaggagaagcaagacgccggcaaggggtaggatcgaggagggagagaggacgaaacacgaggacttctccttcctgcgccggtgagacctgagagtgagtggggagttaatggtacggactacggagagagacgaggagtactagaagagaacggaaatgcttagagcagttacagtagtaaactattagccagctacgactatattttaatgagataaaaaaggagagagctaccgatcgggcgcccgatcggggccggggaaatcgggcgctgatatcatgctgatgtcagcgtcagatttacgtgtaaaactgttttaaactgatttctcttaaattacttatctaaattatgatccgattacaccattaaattcgttgcaattaaatcttcaaaacaagaccacacatggatatattccgacgaaaaaaattagcttattattaaattatttttaaatattacacgatgttccaccaggtatatcggaattgtttcactaagtagtgcgaaaatgtttcactcgtttaaatcgggtgttgtttcaccttatataaaagcaatgtttcagcaaatagcgaaataatgtttcagttcactacaacattagatctatacatagtgaaacattgtatgtacactaggtgaaacatttttcggtagaacaaaaaataaaccaaattcctttaatagggagtttccaaaatatatggggttttttttccaatggaatgtttcgttcactataacattaaatctatacatagtgaaacattatgagtgtactaggtgaaatatttttggtggaacaaaaaataaaccaaattcccttaatagagaattttcaaaatatgtgggttttttgttgcaaaagagtattttaattcactgcaacattggatctataaatagtgaaatattgtaagtagactaggtgaaatattttttttggaaaaaagggagaaagaagtgggtgggtccaacagtacaagcgtggggagggacgcgcgggggg

SEQ ID NO: 27839 - DNA, 11871 bp, Oryza sativa
tgacctggcgcacctgggagaagggtgcggccaccgcgtccacctcttgcttgggcttcaaggctgcgccaagggtgccgccgtagtacgggacgctcccttgactgtaggttggttcatggcatctcttgaccgttatgttgttgtgtttggtttatgagtaggagtgtgtgattgagctcaagaaccgatctttggcttggagagaatcattgagggaaggggagtagagacccgatctattaatcttggaatgacgacgcagtggttctccaatatggtaaatttttttgtcatctcaatgttatgttaatcgtgctgtggattcgagtatggtggtgtctgctgatatcgttcgatggtttctttggtggcaggtgatggatgagccaagcttttttcaccaatggcattcggatgggctactggagcagtacacgaagcggtagatcaccgaggcgttcgggcaggccagcgaggtggacgcggtggcgggggagcaccggccgtggaaggcggcgaaggtcaacactagctgggactcgtgcatcacggagtagggctctttcgcggactcctccttcggcggagagagccccgtactacgacgccccgtactacgacggtgcccccagcgcggccttcaagcccaagcaggagctggacgcggcagccacgcccttctcctaggcgcgtccagtcaagcggagctacaatgccatgatcgccgcctacaatgcccttggccgctgcctcccggcctgcctaccagaaccaggaacacatcctcgccgagaggaagcaccatggcctacggtggcagtgggaaatggcctaagggcatttttgacatttcacacgatttctcactcctcacccagaaattattattttaatgggttctgtgtccaccagcaaatattcaacttttgagagtgtcttcccccaaaagtcacttcgcgcggttgccattaaaataatatcaaatgggctcaaccactacactactgggctgagtaatcaacgaggagtgcacctgtcaagttttgggccagttgggctaggccagggttcggccgaaccctgggttcggtcgaatccccatatcggccgttgacatccaggatccctccccaatgacggttatgtggtatttccgaccattccaaccaccacaaccatcattggtagcctatataaggccatcatctcttccactccctcacacactccaacaagaagatcaagagatctctctcaattttagtttagtgttctagtgctaatagagtaggaatagaatagttctcttagtactcgagtctttaggagatttcgggtgtacggctctagtagcttttccttcttttgtaagacttttagaattaatgaaatcttcttcatatagcttcgttcttttatttattttatattatttgagcactgactttactttatacttgtcttgatataattgtgtagctagcttaccaaagatatgcattggtgtgggtttaatgttcatgcgagtgatttctctatgtcattcctagggatgtaaagtagtatttaataatataagcgtggtgcttggattattagatatcattaattagggttatatactgcgggtcagaagaggtaggccgctgattgtgacggctcagtacgggtagtcctccacgttagtatatagtcctaagacactttcctggtatgggtactcctctgtattcatttccggttggatggttatgacggattgtcgtaagtaactcgacaatcagggtggtctctcaaaacactaggagggcatagttagggggtattggctacatgattgtatactagtaagtgtaaactaaagatggctgtatactagaagtataggaatgactattttcttattctttcttcacttagcctagattatattttagtgagagtattctggttcttccttcttcgtgtcaaccttatcctatccttgaattaattaacccctgcatagactttgatgtacacaactaatatataaattattagcaaagtattctcttatcatatctttccttgggattaagtaaatacgataccttagaatacttccgggtgtaatgctccaatggtatatccgtgcgcttgcgaattatatatgtaaacataatataccgcgaatatttcggcaccattgctgggaattatatttctagtaatgtcactaagaaatatcggctatgcctatgcaatgtttctttgcttcacggggcaagatgtccgaacaacctgtctcacctgagaaggaggctaagtttgaggtgacggattgcctgttccgtgtagcattaatcaatgtactagctgacaacatagtggacatgtatatgcacatgccttcagggaaggacatgtgggatgcacttgaggccaagttcggagtctccgatgctggcagtgagttgtatgtaatggagcagttctatgactacaacatggtcgatgactgatctgtagtggaacaagctcatgagattcagatgctggcaaaggaacttgagaacaacaaatgtgtgttgtcggataagttggtggcaggtggcattattgccaaattgccacattcgtggtcggactttgccacttctctgaaacacaagaggcaagagttcagtgttactgatttcattggctctttgggtgttggagagaaggcgagggcaaaagacaaccgcggctaaaaggtcgagggaggttctagcgccaatttggtgcagaagaagaacccccatgcatctcacaacaacaagaaagtcaaacctgatgtcaaacccaagacaacaatcaattctaagaagaaaggcaaggaaaaagtgaaaggcgactactttgtgtgcggtaagcttgggcattgggccaaggattgtcctgatcgcaaggacaaaaattctgcaaacatggttgttagcaatggcagaggaacaatggggtacggtaatttttacctacaattctctctatttttcactcacctaattggcgggttgataatggtgctaatagtcatttgtgtgctgacattttcctgttttcttcttatcagatcgccggaggttcttccttgttgatggggaacagatcgcttgcagctattcatggtgttggtatggtagttctgaagtttacttcgggaaagaccttgcagctgaagaacgtgcagcatgtcccctcaataaagagaaatctagttagcggctctcatcatgtagagatggttttatacttgtgtttaaatccaatagatgtgtcgtatctaaatatggaacttttattggttaaggttatgatagcggaggcttgttccgcttttctttagatgataggtgtaatatagttgtgaaccatgtaagcaatgatgatgagtccaatgtgtggcaatagccactttgccatgtgaattttggttgtatgacacgcttagctaacatgagtttaatctcgaaattcactttagccaagggttctaagtgtcatacttgtgttcaatcgaaacaacctcgcaagcctcacaagcatcagaggcgagaaatttagcacctttagaacttgttcattccgatatgtgtgaaatgaacgtcgtgttgactaaaggaggaaagaaatacttcatgacacttatagatgattgcactagattttgttgtgtacttattgaaaacaaatgatgaagcattgcattactttatgatctgtaaggctgaggtagaaaccaacttgaaaggaaaatcaaacagttggggtctgatcagggtggagagtatttttctaccgagtttacttcattttgcgaagagtttggaatttttcatgagaggatgcctctctattcaccccagtcaaatggggtagccgaaagaaagaaccgcactctaactgagttggtgaatgccatgttagacactgcgggactttccaaggaatggtggggtgaggcaatattgactgcttgtcatgtcctgaatagaatttctactaaaaaaagaagtaacatcattcgaggaatgggaaaagaagaagttaaatctctcatacttgcgcacatagggatgtttggctaaggtcaatgtgcctatagtcaaaaagcgcaaacttagactaaaaaccgtagattgtgtgtttcttggttatgttatccacggcgtgggatatagattcttaatagcaaattctagagtatcacagcgttagaatcaacaccattacctttgcaacaaatgagagaatcaatcccgatttgattatcggattaactctgttgattgctctggtaaaggacctgtggtcatggcgagggcgaggcatggcttggcttgctgctgctgctctctctctctctctctctctatctctctctctattttgcaacggacgggaattgaatctgcaacggttgagaatcaacaccattacctttgcaacaaataagagaatccatcccgatttgattatcggattaactttgttgaccaatcacttggacaggcagagacacatctctcggctctgtcttctctagtgcactgtcttcttcctttgcggttctctatttcctctattcctgcgctaccttttgtttccccggttttgatcacctgagctcacgggtgctcaggacgagcatgcctccagaactccatccgcttgtgtacctgcacgggtaggctggtgattaggtttttgggaagtgtcatccgacgcgacaactctgcatcggatatgtcctctgccacatctactcctcagcatcaattgtctgcgatgtctagtggagcgttctttggttatatctctattctaacctttgttttaatcatgttgctagatgtttttgtacctattagcatgatcatgtttagcactagatcacttcctcctgcgatcatcatgattattatttttttctagattaaaatatgccaatttatgactaaatttccaacatatgttgtggtattccatttgtattcttattcagaacttttgcatccacatttgtcttttatcctaaagttggggggtcaatgtagtttgaatctttatttattcaaaccatgcatacatacatttccttttatgacccatatgattcaccatacattattcatgatatatattattcattttcatcgttgtagccaccaactaaagagttacatttcctcttaatcatagacagggggtcatgtagtagagtcaaaatggtctttaaataatagattggttaaacctattagcaaagtactgttgggaaaatcaaccaatttggatgaaggtctttgtgaaaagcatggtgctctctagctagctagcagctgagtcaactactttactaaggtaaactaataaccacttagcatcagtatctcactcatggcatccataaaatctgcagcgctttctaacattaatacaatagtaattacagataacgaccacatttgataaggaaattacctacaaaagaagagaacttttgggtgcacaatttatcttagtggtgcccaaaacaccactgggtaaattttcaaagaatatcgaaatcacgcatgctcgctccttcattccttcctttcccctccctttcggtcattgtcccactgttagttgaaagaattttttataattatttatgtaagaattgaaaatttcacatgaaattcctgtgttgtcggttgatcagattttactagttggacattgtagagtgcggacaccatcaacactacaacagaagatgcatgcacattggcatccatgctggcggctaagtttacggtttgtctacatcagcagtagtatcttcccagaaatatcaaacactacacttgttgccatttatattgccatgctctacagggagcatgtgtaggaacaagtgtacaagagactatgtcgatacccaagaacttaccagaatacagatgcttgtgtggattgcacgaaacaactgcaattacacgtgctaaaagtgaatatatttgttttatgtgtaattatcttcgtgcgtctggatcatatatttgttcatatatgtagaatggcaaattaaaactgaccatgtttgtactacctccatcccagaatacttgtttagcatgtagtaaggttaagagaaaaagattataatgcccctcaacaaatgatgtatagttggatgtgagatgatggttgggggtagaatggggagaaatttcaattggaagttgttgatgtgataagtactacttcaaagtgataactattttgggataacttttgaatagtactagaaagaaaaatattgtgggacaaaggaagtaataatatgaaaaccttgggaaagaataagataattaacatgatctgttcaatagcggctgcagagttgttcagacaaatcaaatggttgaggtatatatacaaggagatagacgatgctagttgtttgtgaagtaattgatgagagtttgctagctgttctccagattaattattagactagcactggttaatatttgtttgttcctctcccctaaagctgtctgtgtcatgatgactgggatgtcaatgaattaacccaaagatgggatacttttttatatataatttatttagatacttaagtacactggtgataccatgtttgtggcatttcaattcaagcccaaaaaagaccaagcaggtacatgcaactactccctagtacaacgaatttggacttgagcctttgttaaaaaaaccaacctagacaacaatgggttataacctactataatgaatctggacatgcagacgatacaattaatctggacatgactaggttatgtcccatcgttgtttaggttagcctttttctttaagaacagagggagtggatcactgtctctggtgattactaattcacatgtggaaagttgtgccttctctccattcatttttttttcagaatttccatttacaaaacatgctttactcagtacactggagagatgtttaactccgatggtgttggaatgtaggcacaaacctgttcttcagtctgtgtcctgcgatgtcaaatacgcccttgattcccaagtataagggattctagatttttctggaaatattaaggatagaggaaaaaaactataatatccattattaatgtaatgaccacacatgagtggttaggtaagatgcggagaaatttgaatgagagatgattgatggaatatgtagtactccccaatctcttatgtttggagaaaattttgaatatcccaaccacatttgggaatggagggaataactactactgttgttgttgttattattattattattattattattattattattattattattattattattattattattattattattattattattattattattattattattattattattattattattattgctgcaaattacagattgttgtagtttgagttatggctgaattgaaaggtgtaggaaaagttctttcaggcaattacatggataaggatcatttcgctcttgtcactgattctcttctgaaagttggttgtcccattgaaaaaaatgtcacaaactttggtaagaaacatgatcaaaagctaaaggcaaaaatgagttgttctagagatttctttcctttcatttcttaaaaggagtttctttgctgtgaatgggttcacacttatccaccaaatgggtggggctgatttaacaagaagtaaacaggtaattctaacaaatgtccaaatgcttcatcaaaatatttcttattccccaacaattagacctctgtttggaaaaaaagtcctaatggaattgaactgtctgatctgaaactccagtgttagaaatggaacctatgcccttttaataaaagggttagttctcttttctctgttgaaatgaagtgtaaaattgtactacagttattaagctgccaggtatgccgctcgattttttggcattccctatcaatgaaggtaggaagatgaaaagttcccgcttgaaagataccgagggtaggtttggatgaaaggattttcagtttgctggaatggaaagcgaaattccttccaactaagggcagagggtagagcttattaatgcttgttttgagtagtactccaatatcattctttctgtaatgtcgttctacagtccaccacattagagcttgacaagtgacaactgtggcaataagctgtaggattctcgtgcactggaagcaacatctagccaaattgacatagtgttatgtctacatgacatgcatctttgacaaatgtttatcactttgtctataggggcttcaagtggaagttaattgccagatgcccagatggatattctacatggattcttaacaaatggtgtacagctttcgtagagattgtttggaagatcaagtcattgttattctcatccatttggttgttggcaagaggtgttttttaaatataaaggaagattttattgatcttagatgattatatcaaattcatagaaccgtactaagaatactttcaggatctgcataactatgatgcacacggtcaaaacacacacgcgcccacaaaagagttttgtaacatatgaaagaaagcaataaaatctaaggagcgccgatcttcagactagaccgtcacctatacctttgggtaaaatactccctgaccaccttctccaagtgttgacacgccactgcaaccaaatccaatgaaccaggcttttaaaggatagtgtaggtatagagccagtggatagctaaaaaaataacccgtcaagaagagtacagagccagcgtagagttttctttcgtcaaacaccatctcattaatagcgacttcaagtctttcttaattcttcgtagccaattgttagcaagaggtgtgagtatgagaaaatataatctaattaaaatatggacacagtaaagaaaaataatgagtaccagacagtttcttcagattttgctgcagaatttgaactgctaaactgatgttaaagaagtccaatagccaatatgatataaaccatttactctgctattctcttggcaattgaaattcaatcctaacgcgaaaacatgtgtcacctcatgggccacgataaaataggatatcaatatcactataccagctgattgatcatagttggtgtgttgtagtgttgttggcaacattcgaaaaagagggagaaaagggcagcatagcgcgttttggtttcaaacaagatcttaacaaagattatgggctcgatggcgatagctcatgggctgattagctgatatggctatggccctgatcgtttcttcgtttccttgtttagcagttgtagttttctctttttcgttagcataatttctaaactattgaatggtgagtgttttttttaaaaaaaacttatattaagcttttttaaaatcaaataaacatatttttcaagtttgtaataattcatactcaattaataatgtgctaatgacttatatcgttttacgtgcaactgaaaagctaatagctagaattgagcataagtgctggatagataggccaagctttacttttcctctacttcttaatgttttaaggtctctctagctaggctaatgggcgccagagaggaggccacattcttcataggaaaggcggccttccactggcttcttttctcttctgaaggatcacatctgctttataactagcataggccataggttacaagcttttgcaggatagcgtggctttttggattttggtacacaacaatctttttccataattcttataggaaatgaactgctttctggagaaaattctacaattctgatttgagttgttggacctacacctaagaaattcagagattagggatggccggcctgcctgcagaaaatgagagaaaagacagcaattggaagtgaaatagctcacctcagtcgtccttgattctgtttctcgtacgaggagatctaataaaggatggtgttcgatgcatccaaggaccaaactagctagatcaccaggtcaccacagaattctgtgtcacctgtacagacttgtacacgatgatgctactgctgttctatcatctcaatcagtacatactgctgtcttgcaaaaatctcaacgcggccccctcttttatttttttgattttttttccgtcttaacagattatcatgggaaagcttctcaaactcctaaacaacagtaacacgttttttttttggcaaaagatttctatatgtaagttcattcaaacactattttgaaacaacttttcaactttgtaggtgttgatttattcgtttgtatccttggaatattatcacaaaattggatgatctatcagcttagataaaaagaacccagtacatgactagtagctattgtgagccatccatccatccatgctggaaaaatgtactgttgcaagcttgaattttgatttatagcattagagcatcgacctataatgtaaaaatgcttgacacacgctgaagaagattatcgtgtcctatcttagggctgcttgagattgcaggaattttatagaaaaaaatggaggactttgaaccttgagattttttccttatacagtttttttttcatcataagatttgtttcctatataggactttgaaaatatttttttcctggagaagaccgacaggaagatgagtggtgtcgattggccccgaatgatgtcctggcgacctggccagatcggtggcctagagtggccaggtgcatcaaaggaggtcggggtgggttccagacgtcaacgatggcgggagctcagggccgggtaccaatgctggcgaggccggtggtgtcggcgtaaataggaggcgggggaggagctggtggaggaagaagtcggggtagcagaggccgagatcgaagggcggaggcggagaacagcaggacgacgagtggtagcgttgatgtggtgggggctcacgcgtgcgtcgagggctgacggcagaggcggagagcatccgcgaagcagatcggatcgcatagctcgagctcactaactccctcgcctctctcctcttctcctcgtccgccatccctcttccggccggtgaactcccggggaagagggggaatttaactatttgccacttttaggtttaccgattatccaaatgtccttcttatgtttgtctttaatttttttcctccctataagagggtggaatcttaactatttgttacttttgcccatgtggtatgccaacatagcaacacagtgtaaaaatcgacgtgggacccacttgtcaaccgcaagctatcgccttccctcctctctcgctctctggcatacccgtcgactgccgtcgctactcctctctttcccggcagcacgccggctcgcggctgcggaggagggggagccgagcgctgctcctctctttcccggaggcgaaccatgtcagcggcagcgacagcgtgctggctcgcggcaacggaggagggggagccgagcgccaccgtagtcgaggatgtacgcgctggactggacgtgcaaggttgtgctcatgtcgtttgcaccgacggtggtcgccgtcctcgccaagcgcctatctctctcgccatggagccatggaaggaggagggggagccgagtgctgcaacgagtccgacctctgcctggctatgctcgaccgcaaccacggccttcaatcagccgacggcggcgtccctccctccccggccatccactgacgacgcggacgggtccgcggatctagccgactcgatcccgccgatgacgattccatccccgcggatctaagcttgagtattctatagtgtc

SEQ ID NO: 27840 - DNA, 1365 bp, Oryza sativa
atggggagaaatcagttgggggtagaaaggcttaggaaccctctgctcatcaccacccctggaggggttatgacagcaaagtattatagccctgccgttcctatagaaatccagggaatcccttttcccttggatttgattcttctggacaccaataacttggatgtgatccttgggatgaattggttggctcaattccaaggagtagtggattgcgcaaggcgcactgtcactctgtatcgggggccggaacaaccggttgttttctttgcaccctcaacctctgtcggcagttcagaacttcatcagataggactgtcagaaatacccatcgtcagagagttcggagatgtgtttccggaagaactacccggtatgctgcccaagcgagagattgagttccggatagatcttgctccaggaaccactcctctatacaagcggccctaccgtatggccgcgaatgaactggccgaagtcaagaagtagttggaagagctgaaggaaaaggggtacatacggccgagcactttcccctagggtgctctcgtgatttttgtgggaaagaaggacaagacaaagaggatgtgtgttgactacagagctctcaatgaagttactataaaaaacaagtaccctcttccccggatcgatgatctgttcgatcagcttaaagctgccactatcttttctaaaatcaatcttcgctccggatatcaccaattgcgtattcgtgaagaagatatcccgaagaccgcattcaccacgcgttatgggctgtatgaattcacggtgatgtcgttcggtctgaccaatgctcctaccttggataagtttgttgtggttttcatcgacgacattctggtgtactcacaatcagaggaagaccatcagcagcatctccgtctagtgttgggaaagctgcgggaacatcaactttatgccaagtttagcaagtgtgagttctggttgtccgaagtcaagttcttagggcacgtgatatctgctaaaggagttgctgtggaccccgaaacagtgaccgccgtcactgattggaagcaacccaagacagtcactcaagtccgcagctttttgggtttggccgggtactatcggaggttcatcgagaacttctccaaaatcgctcgacccatgacacagttgctgaagaaagaagaaaaatttgtgtggagcccgcaatgcgagaaggcattccaaactctcaaggaaaagctggtttcctagccagttttaatcttaccagatactcacaaggacttcctggtgtactgtgacgcttcgcgccaaggattggggtgcgtgctcatgcaggaaggtcatgtggtagcctatgcctcacgccag

SEQ ID NO: 27841 - DNA, 1406 bp, Oryza sativa
aatccgcgaggctcaaaagaatgatccagatatgcatggactcctcaagaatatgaaacagggtaaagcccctggtttcacagaggatgaacacggaatcctatggaacggaaatcgggtatgcgttccagacgacagggaacttaaacagttgatacttcaggaagctcacgaaagtccttattccatccaccctggctgtacgaagatgtacttggacttgaaagagaaatattggtgggttagtatgaagcgggagattgcagagttcgtggccctttgtgatgtgtgccagcgtgtcaaggcagagcaccaatgaccggccggacttctccaacctctccaagtaccagaatggaaatgggatgaaattgggatggatttcatcaccggacttccaaaaacccagggcggttatgattctatatgggtagtcgtggatcgactaaccaaggtagctcggtttattcctgtgaagaccacctatggagggaacaaactagccgaactctacttcgctaggatcgtaagtctccatggcattcctaagaaaattgtatctgatcgggaagccaattcacctctcatttctggaagaagctccaagaagagttgggtacccgattaaatttcagcaccgcgtatcacccgcagacagatggacagaccgagcgtctaaatcagatcctagaagatatgcttcgcgcatgtgtcctagatttcaggaagacctgggataagagtctcccctatgccgagttctcctacaataacagctaccaagccagcatacaaatggcaccctacgaagcgttgtatggccgcaaatgccggacaccgctattgtgggaccaagttggggaaagccaagtgttcgggactgatatcctgagagaagctgaagctaaagtcagaaccattcgggataatctaaaggtggcacagtcccggcaaaagagttatgcagataaccgacgccgtaacctagaattcacagtggacgattttgtgtacctacgggtcacgccattgcgaggagtacacaggtttcagacgaaagggaagctcgcacctcggttcatgggtcctttccgtatcattgctcgacgcggagaagtcgcttaccagttggagctgcccgcatccttgggcaacgtgcatgatgtgttccatgtgtcgcaactcaagaaatgtcttcgagtgccatcggagcaggccgattcagagcaaattgaagttcgcgaagacttgacctacgtggagaggccagtgaaaatcctggacaccatggagcgcaggaccaggaaccgggtaatccgtttttgcaaggtccaatggagcaaccacgctgaggaagaagctacttgggaacgtgaagacgagctgaaggcagcccatcccgatct

SEQ ID NO: 27842 - DNA, 703 bp, Oryza sativa
  unsure (1)..(703): unsure at all n locations
agctatcactcatggttcgaatatttaatatctgatttttaatttataatagaaattaatatttgactttactatcttgtgcataaatattggtagggttaacaataatatattctcgtaaattatatctattgcttaaatgtcgatcttttctttactttctttgtgatcatttatggtttggcaagcaatagcaatcataacaaccagcatgatgcaaaagtttaaaaagttcgaaattttagtgatttttattgtcaggaatttttaggatgttacactaactcagcgcctattacaacagtcttagtaggatcggaaggatctagaggaattttcttggtcttggcgttgctttcttcgctctttgtcatcttggtcgcaggcacttgtccttcggttgctgtggacgcagctagtcggatttcttctcgggcgagcgtgatctcgcgggtctgagccatctcgcagctttccttgtcgcaagtgacggctagcttaatatcgctccgcagggatatgactccttggggacctggcatcttcatcatcatgtaggtggagtacgggacagccatgaacttggctaatgccggtcgtncgagcatggcatggtacgctgtctcgaaataacaacttcgaagcaaatattctctgtgcgaaaattctcccgagtgccgaaagcaaccggcagagtgatctg

SEQ ID NO: 27843 - DNA, 848 bp, Oryza sativa
  unsure (1)..(848): unsure at all n locations
gaaactaactaccaatgcgaactttagattgcaatcactagtggataatatttgtttcatgtagatgttgtagagtttcagttatgtttaaaattgctataatatttgcattttaatgtcaggcaatctttcgtcaaagcactgaaaccttttgttaaatggctggaggaggccaaggaggaggaataaatggtgctactggaggctgtgcgaatgtattgtttgaatatttccttatatcccaagtttccagctaaagttatgtatcttttgctcccttgttactgggccgaccattttatgatcacatgctgatcctaatagtctactgaatgttaaaatcccatgcaagaagttattccaggatttgctaaattattggttgttacaacttacaagaatgttccatatgttatttctcaactgttggtacttaagatattttaaattcttatgatttcattactgtgaccggacctttccggccagtagggactctaggaagcccatttttttttcactattttgctcgaaatgaacgacaaatttgccattcggatcgccacatgtaacgtggttttgcactcccggtggcatttgacggccgtttagagggaaatccacttatttatgaatttagatatggatgcgaattagtgcttatctnccgttcttaacaagagccatcacgactcaatcaaatgatgcttcctacggntttatngtttggacagcgatattttctctaaacatatanttgagtatgggtttaaaatttacgtagcgttaataaacgtgttttccagcgctcccctagacatgtacaatggtggctaataacggtctct

SEQ ID NO: 27844 - DNA, 701 bp, Oryza sativa
gaagtagaattcgaatctttgcgatttcgtaacttcagcgaggagcgctatggagaagaccgagtagatgatctttaccgactggaagaagcccgtgaagcaaccttaattcagtcggctcggtatttacaagggatgcgccgttatcacaatcgcaatgttcgatcacgagctttcttagtcggcgacctggttctgaggaaaattcaaactacacgagatcggcacaagttatctcccttgtgggaaggactgttcatagtttctgaagttactcggccaggttcttattgactcaaacgtgaagacggtactcatatcgacaactcttggaatatcgaacatcttcgtcgtttttatgcttaggcattattttttgtatcttcttctttgactgttaacatcaagttcttacttgagttatcagtcgggggctactataataataatggagtgtgatttttatcaattcaatttgcttacttgatttatcattgccttggttgattttttggctttagttaatgaggactgaaagtttttaacagcttttgcgggttctaggctcagtaaggtttgacaaaaacttttaagaaatcaggagctgagtttaaatcatcaagcacaacataaattcatcagtattgtacaaattgtgcctccatcatcatcatcattgtcagaatacaatatcaatcagt

SEQ ID NO: 27845 - DNA, 1174 bp, Oryza sativa
gcatttcatcatcccaccacttgactaatatgggtgggcgagaatcttcacctgatcgtatctggaggacctcttcttcattaccgatcattggcccttatatattcatgaataatggtgaagcaattgaagaaagtttgtcggatcaagacagatttggaggacttgtttacccattataatttccggtcggggacgagcaggtccttgcaccctaacaggagagttagttccagggtcagcagcagcgtccgtcttgggagggctgttggcttgagcttccacttctgggatatctctattttgttctgtacccaactggtttccagtcgggggctcttgatcagcaccgacttcagcttcggctgactggtttccagtcgggggctcgttgctagtatctatattgccggttgccggttgattattacctgggcggtcttcagcagttggcccagtttctgctgaaggactagtctctgtgccagtcggcatggggtcttttccaaagggatctatgtcagatggtttcctccaaatttgagacatgctatcagctttgcttcaatagtgagtgactagcgaaacaggggaaattgctagatgacacatacctggatgacttccttatttttggcatgggacgactggacgttttcttcttcggattggcttgctttggctgtttcccaatcacccctttgttgtccgtcttttccgcgtcatcaccttcatcgtcacttgaaaccaacttcctcttacgagaatctgactggttagttgacctcgaggtgttgggttggacgtccgactggatcttcggccctccactggcttggccagtgtgccggcgaggtgagcggcgttgagcaattggagtatcggatttcatcaaagcgaattcctgtgcatggtattccaagttttcagtcgaccttacagaagataaaagcatgctttgagaaaggctaaggtgtataatacataccggtggaggagggttgaacgtattgtatggcacgactagcaataagtgtgaatagctgaccacaatggcattcgagaagattttgtacattctctcctacataattttgaactcaagagactctgggttctctcggttggggtcatgcttgccatcaaactcaaaagctgtgcgggatctctcctt

SEQ ID NO: 27846 - DNA, 781 bp, Oryza sativa
  unsure (1)..(781): unsure at all n locations
gctgctcaccttccgccctggctcgtcgcagaagtagacgagcagttagtaggctcgcgcgtgtgttcttttcgtttgttttcctgctagagtcgtgtggggcatggttataccggtgtgtggtataactgtgtcggagcctgtctttattttatttgcttaagcaacttgaaccttaatgaacgaatttaatagcagtaataaattcaagaattatggtagtcgtgggtggttagttttaatagtcagctctctctgtttgccggttctgtgtgggattttcagatggtgacaaccaggagaagtgctgctaccggtgaaggcagtcaccccgaaggcagcaaccacaacaagcatggcagcccacctncaccttcttccccgccaccaccaccaccaccagacaccaactccatcctcacccaaatcctcgcccagcaggccaacatgatggctgctttcctccatcacatccaaaatccgccacagcataatgctccacctccaccaccacccccgcaacattctaaactcgctgagttcctccgcatccgtccgcctaccttctctagttccaataaccccgtggatgccttggattggttgcatgccgtggggaaaaagttggataccgtgcagtgcaacgatgaggagaaagtcatctttgctgctcaccaactgcagggacccgcatctctatggtgggaccacttccaggctcgcagccaaaaggacagcctattacttgggcccgcttcaccgccgctttccggaggaccca

SEQ ID NO: 27847 - DNA, 2066 bp, Oryza sativa
acgtgcgtgtattattccatgtcccagaaggcaaggtataccaaaagttgatacattttagagcttatcaagcggaagcgtaaatagttaatttattacctgggcggcgaaggcccagcacacaagaagacaaacgaaaaacagcggaggactagggcgacgaccacaggcgcttgacggcaggcacgagctagacaccaaagccttcatcttccaggaactcctcttctgggtttgggaaaaattgagcaagactgagtacaaccaccgtactcaacaagacacacccataagtgcagaataaatgcaagggagtacaagggagccataatataggggttagggtttgcagtaaacagcattaaaagacacttagttgctcaaagctattttgtaaatacgaccctagagctatacaatattattaatcaaggccgtgaacccacacgaacctgccttaacccaaggcctacgatgattcagaccgaactggcaacctgaccctgggtcccagctcgtcccaagccaacccaggccaaccattccacattttagttgttaagcaggttttaagaattaaaacactaacttgggtacattgctcggcttgcccataaccgagggcgcggctattcgaataggttatactctgatcagaggtgtacatctttacccacaagacacatcttcctcacgtgtaaccacgtgccacataccaccacggtatacggatggaagacgtgacatagtttccaacccatcctagccatacacaagagtccgacccaaccccacctacggtcggaacatccgggacaggtaggcaggactgagcccctagcagcaggacaccggccctgtgccatgacatctcgactaccgggccgcagctcgtgtagccttcatttgccctagagatgtccatcgacccccgacttcgtccatctccatctgtgtacttttgtttataaccagactgatccacaaactaagccttacccactagacatgtggaagtatggtagtgctttgcaacagaggcccgaagaccggtccttatatggccgaggtgctactatcaaaaccatgcaccccgagcccagcctaaaaccattttgagggttttgaatagagggggaggtgtgaatccaattccacaataatccaaccattccataatgtccaggtgatatgaatattcccaaagtctagagctgtaaaaccacctaatgttgcctaattaagcggcgaagcatctacctaaattcatactagtggtaccatgagtagagtgtccactagttggggttttgtttattctagggtgaacaaggtaataataacaatagcaataataataaggtcataacaaaggtaaataggcatggctaaataaaacagtgataacgcgggaatttaaataaagcaataatgcaataatttaaatcaaaataattttataaattgggattcaatatgttcaaggatgatgtgacttgccttgctcgctttccaaaacgtcggcttcaacctccacgaagagcggatctacacgaccaacggaaaagaaaaggctttactctaataaactccatataacaagcaggaacaaagcacaaaaatggattcttgacttcttaaggaaaaattagagacttgaacggtccaattccgagtttaaatggccaagttatggccatttgaagtttatatgctctttaaatgaatatttgccaatttcttcatttaaattttaatttaaaaagggtttattgcgtcagccgagggggaggggcgcgcggaccgggtccatgggagtgggacccacgcggcagcctcacggtccacggtggaccgggtgcacccgggctcacacctgccgacgccgtgggccccacacgtcagccgcacccgagggcgcgggcggctgacggctgggccccacgcggcagccactcggtgcgcccgagggcggccatgccggcgcggtcgacgagaggcggcgcttggcgcgggcggggcggcgggagcggcgggaggacggggatgacgggtgggccccaccc

SEQ ID NO: 27848 - DNA, 678 bp, Oryza sativa
ttaggcatcatacgggatgtaaagcttgtcaacagttcgttaatgttcaattggtgcccgccgcagtgttcaatcctattattaaaccatcgccgttccgaagttgggctttagatttcataggtcaaatttatccttcgtcatccaaaatgcatcagttcgtgccagttgtaatggattatttcaccaaatgggccaaactcatgctgctatgacttacacggaggtaattgactttattttaaagcatattgctcataaatttggcattcctcaaacttttatgtctaaggaggtaagaagtttttccaaattttatggtattaaattgttaagttcatctctttactacgctcaggctaatggacaagccgagttgagtaataagatgtcgttgaaattagtcaagaaaaagatcgaagaacatccaaagaggtggcatgaggtgctttcgaaagcattatggaatgataggatatctgaacatggtgctactaaagttactccttaattttgagtaggcttatggacaagaagccgttttaccgatagaggtgaatcatggctctcttagatacataaagcaagatgacttattggttgaagaatagaaaacatttatgggagacaatctttatgatgtgaccgataagtgtttgaaggctttggaagtgatag

SEQ ID NO: 27849 - DNA, 505 bp, Oryza sativa
ccgagctaagccaaggcctcgaccaatggaaagctagtgaggatcatagctctgaaagatgagatagcacgcttgaagaaaaagaatgctcagttgaagggtctcccagcgccaggggagtccggatccgcaccacgccccgcaagacggcgactgcacccgtgcgcattcagcttgcgcccaggaacccacctccgcccgcaattctcgcagctccagctccaaccccagctccagttccagtgccagctcccgcgtccgctctctccttcgctccagcgtcagctgccaggggtccagccagtggcaacggaggttggttgtctgctactcccagtggcagccgcgaccacagcagcagcagttccagtggctcagagccgggcagcagggagacgtatctgccagactccaggagccgctaagagggatctggtgacgagcaggaggatgccttcgactccaccgaccgcaggagccgttccgagcattaggcttgctttcc

SEQ ID NO: 27850 - DNA, 560 bp, Oryza sativa
  unsure (1)..(560): unsure at all n locations
tcggggtcgtccccttcctccggccgcccgctccacgtngccaccaccgccgaaactgccgccacgcccaccttcgtcttctccgggccacgacgtccatgtggccctcgcgcccgcgcctnccgcgcccactcccctctctctctcccgcccgcgcccacgcccgagatgaccgggatccgattttcgaatcccgcctctctctccttccctactccccgcgttggccggcggaatcccgcccctcccggccacgtccgggattcccctcccctatttaagcttccccgtcactccctcttgctttttccccatttcgccgaactctcccgagctccccatcgctcccgcgccgtgcaaccacccgccgccgccgttttcgccactccggccgccgctagccgccgctagactcgccgccgcaccgcgccgtcgccgccgtcgggttcgcgaggctaagctccaccccgtccgccccttccccgtcgagattcgtcaccggaattcgcatcccctcacgctccggtgagttcaaccgctaccgccgctttcggccatgg

SEQ ID NO: 27851 - DNA, 685 bp, Oryza sativa
accatcagggaaaggttgagaattgcccaatctcgacagaagaactacgcggacaaccgccgaagggagctcacttttgaaacaggggattacgtgtatcttcgtgttactccgctccggggagtgcaccgttttcaaaccaaaggcaagttggcaccacgtttcgtgggaccatacaaaatcttggaacgaaggggagaagttgcttatcagctagagcttccttccaacatgatcggcatccatgacgtgttccatgtatcccaattaaagaagtgcttgagggtacccgaggaacaagccaattcggagcacattgatattcaagaagatctgacgtatgtggagaggccacttcgaattcttaagaccagtgaaagaagaaccagaaacaaggtcactaggttctgcagggttcagtggagtcaccattcagaggaggaagcaacctgggaaagggaagatgagttgaaggccgcccatccgcacctcttcgccagctcctccgaatctcggggtcgagattccgtttaagagggggggtaggtttgtcacaccccgaagttccttcccaagcctaaattggagttttaaatggtctcaagaaaatacctgtgtcaagcaagagtaaaccttaataaattaatgcaaataataatcggaattggcatgtggaatttttctt

SEQ ID NO: 27852 - DNA, 1156 bp, Oryza sativa
tggcgcgacttctgaaagccgaattcatccgtgaggtcatccatccgaagtggctgccgaacccggtgttcgtccccaagcgaacggcaagcttcggatgtgtatcgactacatcgaccttaacaaggcatgtcctaaggatccttaccccctgcctcgcatagatcagattgtcgactccactgcggggtgcgaccttttgtgttttctagatgcatactctggttaccatcagattcgcatggctagggaggatgaggaaaaaactgcgttcattacccccataggaacctattgttatacgacaatgcccttcgggttaaagaatgcaggtcctacttttcaacatactactcgaatttctttgggtaaccaattaggacgtaatgttgaggcttatgtcgatgacttggttgtaaagacgcgcaaccaggaaatgttactctcagatctagcggaaacttttgagagtctccgctccgcccgcataaaactaaaccccgataagtgtgtgttcggtgtacctgcgggcaagcttctagggttcttggtctctgcccgaggcattgaggccaaccctgagaagatacgggctatagagcggatgcgcccccccagcaaacttagggatgtgcaatgcgtcaccggttgcatggccgccctaagtcggttcatatcgaggctgggagagaaggcgttacccttatttaagcttctcaaacgctccggaccgtttacctggacggaggaagccgaaaatgccctcacccagttgaaggcgtatctaagctctcccccagttctggtcgccccggagccagacgagcccttgttactctacttagcggcgaccccgcaagtagttagtgcggcattggttgtggagcgcgatgagaacaactctcatttcacgcttccccaccctgtgccgacttggcccgggagagagcagggaggagaggctcccgagccgaacggtggcccaaggcccccgacgaccggagttggccctctgcccgcttgtcagacggtgctaggagcccccgacccccaggaaggccctgaggccactgtgggaaggccgcacctatcgcccttcgaccccgaggctaaccctgtgctgacccgacccgggaaagagcagggagaagaggcc

SEQ ID NO: 27853 - DNA, 669 bp, Oryza sativa
ccctaattggttacccaaagaaattcgagtagtatgttgaaaagtaggacctgcattctttaacccgaagggcattgtcgtataacaataggttcctatgggggtaatgaacgcagttttttcctcatcctccctagccatgcgaatctgatggtaaccagagtatgcatctagaaaacacaaaaggtcgcaccccgcagtggagtcgacaatctgatctatgcgaggcagggggtaaggatccttaggacatgccttgttaaggtcgatgtagtcgatacacatccgaagcttgccgttcgccttgggaacgaccaccgggttcgccagccactccggatggatgacctcacggatgaatccggcttccagaagtcgcgccacctcctcgcggatgaaggcttgacgttccggggcctcccgccgcactttctgccggaccgcccttgcgcccgcccgcacgggaagacggtgctcaatcaccttcttggggaccccgggcatatccgcgggtctccatgcgaagacgtcagcgtttgccccaagaaggagacgagcgcgtcttcatatttgccgtcaagaagaccaccgatccgtgtggtcttggacgggccgtcgcccaggggcaacctccttgaccgggacctcgtcgcctgtgatcatccgctg

SEQ ID NO: 27854 - DNA, 870 bp, Oryza sativa
gatgaatagcctgtgagtctctgtgagagtgatctcttgcagtgaaagtgtggacagtgtttcctatctcaatccagctgcatgctgggtcttttctcaaaccctgttctgtcatcttggttctaatctccttgacattattccacttgcccatttcggcgaaaacatttgatacaaggacataattacctgggttatctggttccaactcaagaagtttatcagttgcaatcatagcaagctcatggttcttgtgtatacgacatgccccaaggagtgcacaccacaccacagattttggttccaaaggcatagatttaatgaacttgtaagcttcttcggtctgtcctgagcgaccaagaagatcaactacacaggcataatgttcctgccatggttgtaacttgtatttgcttaccatcatatccagataaaatttaccctcatcgacaagttttgaatgactacaggcatagagtagagcaagaaaagaaacatgatcaggagatacacctgtttccagcattctcttgaaaatatatatggcttgcttgccatgcccatgcatcccagtagcattaatcatcgctgtccagagaacaacatctttacacttcgcctcatcaaaaactttgagagcgtagttcatgcttccacaaccagaatacatgtccacaagggagctaaccacagcaccttccacgggaaatttacctctgataaggaaaccatgaatttcctttccttttgtcaaggatgacaatccagcaattgctcccagaataccaactagtgctacagaatcgggttggatgcctgcattcagcatcttgccaaacaaggcaacagcttcatgtaacagcccattct

SEQ ID NO: 27855 - DNA, 661 bp, Oryza sativa
tgcagtgcactcgtttatccggtctgtgaccagtcacagaccggtcagatcgcgggttaggtggcgacaggcgatctgacgcacgcctcgccccatcccgtcaggacgagggcttctaggcgctcgtccccagctggagctagcgtgttgcctcccagagatggcacgttagtcatctggtcagatatatgccaggcttcatcctaaccattacaggcaagatgttgtgtgaagaagggcgagcatgtagaatgctaagctgacacgtggtggacaagaatgaccgacgtgactggtctgataccggtcatgtcgtcagcagacagccacgattccacgtcgcaccagctcccggcgaaagtggaggtagttgtgagccgtctcatcagatggtgactcggacgacaactatacaaatctccgtccatttatgaaaaggtggggtaagtccccacaaaaaagagagaaatggtgcatgtggtatccccttaagatataaaaggaggaccttgcccacttagatgggggactggacttttccagattagaaacccaaaacaagggagaggctggctgatactttgtagctccttcatacacagatctcccaaaacacaggagtagggtattacgcttctcagcggcccgaacctgtatacat

SEQ ID NO: 27856 - DNA, 978 bp, Oryza sativa
tattaatagaaaaagatataaaaaatttactcatgtaaatttgatgtcactagttttatcatttacccaacctctcataataggcatttctttttattaaaaaatctttttttaaataaatattgtgggtcaaagtatcatctcaagactgtgtcagagtctaaaaatacttatatttgggactgatggagtaattttttcagtgaaaaactaaggcaaatcacgcgttgctacgggagcaatgcaagtgggcgtttggtttttgtgaaattagggtggccgagtcagtaagtccccacctgctccaagcaaactaattaagctgattttagctaaactactaggaggccatccaggtcttcctagtctacaattcatgtcgctctctcaaaggccgtagagatatacatcgatacattatacatgcgtgttttcagtagtgaagcagtgctgtgcatgcatgactccgccgctaaagtcaatgggggcgattaaggtaattaactaaccgggttaattttattcgttagattattggatagtttactagtaattgtgtgtataaaaaggaggttctctccctctctctgcagaatgctgtgttaggcaaggtagagtacactagtcccaaggctcgctctcttgcttaagcttgtgagcttggaaaagagtagtatattgagctgttgcttcgcttgctttagtttgcttgcttaccaggagaaagatatgagggtatgtatgtgtaattgtatatggtcttgctgctcatctgtcaatttttctctgtttcatcatcagtgaaaaatctgttattttgtgcaaagatgtaagatttatgtttgttcccgctgctaatcgttacaccgtttgaaaccttttgcagaaggaaattgtcatcaggctgcagagctctgagaagggccacaagaaagctatcaaggttgctgaaaaagtctccggtaaaaattccttgca

SEQ ID NO: 27857 - DNA, 7524 bp, Oryza sativa
ttactggatgagatggagtcttgaacttggcactcaagtataactcccggttgatgacaggtgacttctcgtccagttctctcactgacaatggagagcggaaccttctctgctttccagatgatgagcttctgatctgcaaatggaacaaggtagacatatgttcaaattagtaatcttttgtatactgtaatgtaacttgcaagaaactgcttctagtatgtggtacctcgcttgtacaagtgtctacactggaatcctgaccagcttcaggtttcgaggacaaggtggtggttagaggtgacctcgttcttgcatttctcttttcagaggccacacggttcgcgatatctcttagctttgatgcttcacgttccttgtcgtctaatgccaatttcaatttagaaatctgatagacaattacacaccatgagttacagaaacaaagttccgatgatgatcgtgtaacatttaaaacaacacaatatcatacctcttccttcagatctttgacctgcccaacttccttattagcatgagctgcaccaagttctacggtggctacacgctctgcaaacttgagggtactcattgtttcaccaaaagcatctgcttcaggattcatgtggacaaacatcaatgtcttcgcctgaccacctacatcacaagacaagaaaacataatcagctggcattcttgatgaaacacatccaggctcttaagagattctgtatacctaaggcatcttgtagcacttgtgttagcttgctatttcggtatgggacgtgggagctcttttgggcaagtgcagctataacatcaccaagtgcggacagtgatttgtttatatgttttgcttcgtttaatctttctccagcggcctcggacttatccacccgttcacttcccgcaagatccacaagatgaaggcatcctcttagagttgaccccgaagctatctccttgccttgaacatgaactgtcaacacactacagaagagcaacaaaattacagtatgtagtgagtatgcctgttgctcagacgatgaaagaaaaatattatgcaaagatattatactagggagaagggacattctgagaggaagtcgttttttgcattagttttgggatacctgtgtgagcgactacttcgttcattaagagcagtagacccaactgccctgttcctgtggccaactctcatcaaatccaaaacgtcctgtgcacacttcactggaactaaatttgcatctgggatgttcagtccatttacatgagaactgtttcgtatctctaatgtgttcatggttaagaacaaccccggaaggaaatattgttaaacaattttttgatgctgagagcaataaaagataatttatttcatgtgaaaacatatagaagatttttgcaagtaacttcatagaggaaacatcttatttgaaacaatgttttcaatcggcaacttgagaaaaaataacttttgcaaccaaaaggatatcttttgtttgcaccatcaaccatcaatagatctctcacttgctcattgtatatttcgatcatctgaactttcacatcatatgtggtagtatctgctctattttgcgaaatagcaaatagatcattaagtgaccggtagttcacgccccaggtttcctctgttgtaatatctggaccgctctgagtaatatatgcaacaaagatatgttacaacatcataaagaaagaaaaatacaaatagattgaagcttaatgcagacaagtagcatacaaaagagcatctgtttttattattgttcctagcagtaaatttctttattttttttatagtattggattcattgatttgagaatttttcacaaaagtaattattgaaactttagtacatttacttgcaaagaattaccatggtatatgtttttccagatcctgtttgaccgtatgcaaatatgcatacattgtacccatccatcacagatctgatcaatggctgtgtatcagcaaaaacctcagctgttacaaagaaaaaaaaaagtcaaactataactctcaaaataaatatcagccagccctccaaaatatgcaccattcttttcttatgaaaccgtatgcaatttttatcatgcattactcaactaaatagtcatattttcaatgaactgtttaacttttgggataaatgcataactatcttgtaagtcatcactcaattagaaactacaagatggaatgcaattaatttgcagtaaatgagaaatgaaaaaaaatgagaaatgtcgatgatgtacattgtgaagcattaggcccgaatattttgttgaatgagaacatcttccgcccttcctttccttgcttttgagggttcacaatcattatctcaccattctccccaatatgatcaacggtagatctttgatcagtttgcattttcaggaaaggtttcactctacaatatacacgaatgctacctaaaagatgtttcaatttatcagtacaaatatctcactgttagtgaaatgaagttaatttattcgcatattacctttaagatcttgaacttgattgtacagcttacgattttcctcgagtaacttgtggtaagcattgtgattatgagcctcaaaataactttctgcaatattaagcaaatgtttagcgatcaaaggacaaaatgttctaaaacatttctgaatccattactcacctagcctcctcaagtcttcctcccactgagatcgagttgattcaacttgaagcttcatctcgttgaaagacacttttagcttctgcacatttcaaatttgaacagaataatcatagtcagtacaagtacacagtaatacttgttaaaagtattaccaacgtcttcatgagaggagtgtcaaaagtgttattttggttcattgtttcgttaatacttgttagagaaaggttcctgacaagaaaagcatacaattgctagttgttacaaaacacaacatgcggactgacagtgatgtcatatagtctatgctataatgaaataataatattgttgggctttctgtagacattccaagaaataacctcaacagcataattcttgaacagaactttctacctccagctcttcttgttggtgttcaagtcctcctccatcatccaattgtttgcggcgaccacaaggtaatcgcagtgaggttaagaaacactcactagtctccttcatagacttcgaaataacttcaatcaattcctgtttggagtgagcaccattttcatctttcatcatcttccttagaagtgatctgacctgttacatatgatatgtttagaaataagttccataggaatacacagccagcacaaaactgaatcatagaacaaaattgatcaataatcatgacatagttattagtttttgcaattgcttgcggcggggctaccattgaaaattgaacaaaataccctattaggtaattcacaaacaatgaagtacctggtttcgatgggaagcaagcagaatggtgaattctttacaggcttgttcaagtattgtttcaaggacctgaaaaaaaaaatcaccagcgtgaggaatttaacacatttttttttcttttgtgtcaaggctcagcttgtttggtgagagcaccactaaagaaatcaggtggtcagcgaatattatacaataataagtagaacttacctaccatatcatctaagggcaagccctcagcttcaccccattcctgaaggaatgcccgcacaactcgaagcacaaattgctggaaaagtgaatgctgagattctccaactctagattcctcaagggagacttcagacagaaggtgcacaaattccagcatttgttggttcagatcagctgaacctcctcccctggatgaatatgaaggcaacctcttacttgaggatgcaattttcacaatgccaccatagcgccatatgccaatcccaccagagagcttccattcgtggtatgctttgaggcaaagtatgcaatcgacaactttcattgatgaacctccctgcaagtgttcatttatagttcagatttcagaagtttaagaaagtgaacagtaagatcggcataagcttaaaatatataatcaaccatctactttgttctagcaaatttctctgggtttaaagttgccatattttctttatccatgcaatctctcatgaaaataaacttgagtgcgttctgaaattctgtgttagtgaactaaacatcagttctcaatatcacagtttccaaatgaagaactttggcctgctttttggcaaaatgggtgatgaaatacagttctaaataagccatgcaatttagctaaccaggttagtcataatggcagtacagaattgtcatcatttagtaaggttgaccagtccagagttgaagaaatactcctacaagaccgtaccttctctatgtcggaagcttcaaacgtcaagagattcatctcgctaactgcaacaaggaagttcctcatgttctcgaaatactgaatcgcagactgggccgccacatcagacgactgcaccgcaacaatgggattctccacgacctgtccgcaaacgagcactcgttagattccaactctaccacggatacggtgcaaatttcaaaaaaaaaaatgacttccaatccgatcgattttttgtttgggtcttgaactcttaagcaacgcaccttggggacggcgcccgggttgacgtggttgaggacgttgcagaggacgagcccgttgcgcagcgccacgcagaactcctcctccgacggcctctccggcagggactccgccgccgccgcctccatctgccgcagccatcgcgccgcctcgcacctccgcgcggctgcggcaacagatcacaacagagtcagcggaaagccacatcggcaacaggggcagtttgcctcgcgattcgtgcagaagatgaacatggtctctccccccgtgatgcagatttactttttgaattctgagtcaatcggaaacagaagaggcggagattttggggatcctgaattcgagctgcatttctttttccaccatgctttgcgcgattaccaaatgaccaaatgcaactcctgattattgattaaaccgacgagaatgtcgcgtgtactactaaatgcatctcaaagttaacttcaaccaaacgcaaaccacccaggtcaatgctcaatgcttcaaccacactcatggcgcatgcaagagtcttaccatatgcaggagccttaattgcaacaagtagcgcactaaacaaatcacaccaatgatctcaacccaaatctcgcacgctgccaccgcgcatccgccgacgcggcacgcgcgccggagagcaggcagcacagtacaccaggtgaggtgaccgcccgcgccgccgcgtctcgcctcaaacgccatccaatgatccagacgccagcacacacacacacacacacgcacagcacgagcgcattgcaaggcgcagatcgcgcgagcgagaaaaatgccacacccgagagacggggagagggagaagagacgaacagctgctcaccggattcctcggccttgcgcagcgccatcccctgatcgtgcctcccgccctccgccgccgccgccatcgccgccgcgactcccgagcgagctcgccgacgtcaccgcctacccactcagatcgcacgcagctctgcttcccttctctctccgtgtggctgctgcgcaagcgcaacggctccctctatttgaaaaacttccggggcccgaggaagacggtgtggccgtgggccacgcggcatccacgaggcaaagcttttcaagtttcaccccccgaactcgtaggagtaatattttgaaacttcagggggcaagccgcgaagttgaccgagctgcatcgagcgcggaaagataggcagaggtgcacgcgtccatccgctgcgggaggccggcgcagcaacagcgtcggcggccgacgggatcgtcacacgtgtcaagatttggtcatcggagtggctcagagcaaatacaatagcagactattagctagctatataaacatattttattaagatagaatatgagagagaagattagtgggctacatatttgtagccagctgcagcacggacttcgagacgtaatgtatgtatgacaggtagaaccatatactaatagtataggaaacaactattttataaattggttattagattggctataaatgaattggacctagacacttagcagtgggctatactattaaacttgctctcatgatttagaaatgggttgtgctagtcttaaaatataatccgatggaacaatataatccgatggaacgttttctaatagaagtaatacatatggttgtgtttagttcctaaaattatggagaagtttgggaaaagttggtagtttagaaaaaaaaattagagtttatgtgagcaggaaagttttgaatgtgatgtgatatgctggaaaattgggagtttgggaaaagtttggtgtgaactaaacatggcctatatatataaacctctatatacattttatattttgtgcggaagagtagtatggatttgctatttgggccagcgcatgtggggggcacagtagggtggtggagtaattactgtactggaggttttttttttcccctgtgagcccaggagattcaaacgcttgttgagttgttgttcggcttgtctttaaccttttctttattgtctggtttttatggatggggttcaaacggttcgatacgtttagatccggcatgttgcaggaccgtggcagtggcagcctttaattatttagatgatagtagttttgtaatcgtacgttcgtgccgttggtacattggctcattggatgattttgaaatgagggtacgaatttggcgtagttctgttttggttcctgcacttcaggctgaacttgttgtccactgttccaattgttagcgtgcatgaaactcatcacggtgaacttccttggcaccccaaattcacccgtggaaacattttttttttaaaaaaagttagattactcactccatcccagaataagttcacctagcacacgatgtgacatatgatattactatgaatatgaacatgcagatatgtcacatccatatacttattttgaaacggagggagtaaggatttgccattgtcttcatctcctttggagaactcgagggtttgtatgcaatgtacttaagtatgtgcacatctagcttatgcaccttatgcactacacctactatttggttgatgcctaaccttattatactaaacttaggcaaattactaaattagggtatgatgacgtaagtgtggctacgaaatagttgatcacaaatgtggtatggttagctataatccatctgccatccaccgattggtcgagctcggaacgtaaaccacacacgcacggcgctggcgcggggcacatggaaccatagcacgattagcccggacagccgcccatactcatcgaagaaaacttcattaaattttaatatttttgatt

SEQ ID NO: 27858 - DNA, 9036 bp, Oryza sativa
agcacaccacatttgacagcagcgctgatttgtgaagaaaaaaaagagagcgaacaaataaaaatgataagaagagctacaagatcgagcagcagctgggccgtctcccggccctccggcgccgaccgccacgggcaacggcgccgtggtcgtgccgctccaccatcggcgagtagttcgccgggtggcttcgcgccacggcgaggccgtcgcgcacgcccaggccgccgtagtagtacgcgttcggggggttgcgggggtaatagagcgccgcctgcggcgaggacgacctgtactgctcgccgcccggccaccgcgcggcgccggggctcgccgcggtggccgtcgtcgtcgtcgtcaccgggtacatgatgcgccccacaccgggcacgctccggccgggagtggcggggtgcccgtgccagccgtggtacggcgacgactgcgcgaacacgacggcgccgccgcccttgccgttgcgggcgccggccgccgtcatcagctgcagcgacgccgcgcccccgccgccgcgggagccgccggcgtccagcgtgcgcagctccagtatctcggcctccccgacctccctccgcagcttcttggtcagcttgctctcgtccacgccgtcgccgatcaccagcagcaggtccctgtccctgccggccaccgtgaccgactcgacgcctggccattttttcacgagatcgccgtgttaattaacaaaacgttttgcatttctgaagattcagaaagctgcgtacgtaccactgactgcagctgcgaccttcagtgccttgtgatggcatttgtcagagtccggcctcatccggatgatgatctccttctgaaaattttttaccaaaaattcaggtgttagcacacacatcacagataactttcaaaacagacaaaaacagcagcagaaaattggagctagatgaggccttcttaccatggttgttggtctttgcatgttccaaactgtttcaactttttggaagaattttcagaagccaagccaataatagcttgtaactgtagtggaggaagaaacaaaacgtctttgctgttgctgtaccgtgtacacagaatacggacaggacgtgtactgctggcgaccagtcatatatatttcccgagcaaaggagaagtatttttattttctgttctttttattctggtcagaccagcaaactgacaaccgctcgaagactctcgtggcaagaattaatcgccggtttataaaatcttcagaaaaaaaagaagtgttgcttcagagttcaggtagtgagtgtacattcgtcgaaatcacatctcaatccatgcagattagtttatctagagtatccgaaaatgttacgctactgaagcaagtgacgtacgccattttcttcaaagcaagaagcaagaaatatatatatatatatatatatatatatatatatatatatatatatatatatatatatatttaaaaaaaaggtatggtgagttatagtgactagtgactagggcacaccaagcagagcaaagaagaaaatttctgcattgtgcacttaattgaactagtggactagtggtgcatagccagaaacgcaagaaacaatcacacggggttggaaatttatatgttgacctgaaagacaatgctgctgctactagggaaagaaaacagttcctaatctgggggtttcagtcgttactcacttgtcagagcagcacatctgggacaagatacctgctctcgttcacggctagtcaatccatttggctcattttccatcagaccatcgatcaatcgatgagacccaacaccaaaattcgttgtccaccatttgccatattttaaggctatctttggaagatggatttctgtagcattagaattgtgtgtaaaataataagctcagccatgtctaaagaaagtattctgtcatagtccttgctgcatcccaaagaatacgggacatctgtatgtacatggtatagtccgccgtgcgagcttggattagaaagactctcggagcagttgagacttgagaggtactgatcgtatatatgccacggtccactggtcaacaccaaaccggccggacgtctgcggctggcgtaagcgatgcactgtcacgagcgcgtcatcactttaaacgcgtttacaacgggaaaacaaaatggcggcactactgatgagtgatgaatactcgctccgttttatattgcggtatttgtaaatttgccactggttttttcagttttacgaggatgccacttaaatgacagtttcagtagtatttttataattttctagtggcagttttacaataacgattcaaagcaatggtaaatttacaattgccttttttatattacaagtcgttttaacctttttcttagttaaatatttttaagtttgattaagtttatggaaaaatatagcagtatttttaacacaatataaacatactatcaaatatattcaatgatacgtaatttggtgtgatagatattactagatttttattataaatttactaaatagaaagaaatttgattaaaaaaaattaaaacgattataatataaaatagaaggagtagtagcgtatagttgttgtctccgtatactatgtgttaactcgatacgacatttatcatacggagttataatatacggagtatggaataagtttaatctcctgcgggacgactctagaggatccccgttattgtatactcctaggtgaatagacaacgtcatcggtccagtagtaggacgacgacgtctatagtaggactggaggactcggtagcagaacaaccacagaaaccaaaactgccagcagaattgcagaaacaacgtttgtggccagacctcaacatatgaacagatatatatcacggagcagaaaccgacgtagaaacaaaaacatggaacatgtggagataaaatataaggaaagaagaaaaagaaggaacaacgggcgatgcacatatattccgtcttggatttcattagcacgttttataaactgctaaaaggtatgatacgtttcgtgtgaaaattttttatataaaagttgttctaaaatatgaattggatccactattttaagttgaaataattaaaacctttgattattttctaattaatttttcgttttacatgggctgcttgccaagtttagtttcaaatttttattttcatacttttaactttttcatcacatcaaaactttcctacacacacaaactttcaacttttccgtcacatcgttccaatttcaatcaaacttctaattttgacatgaactaaacacaccctatctcaaacacctatggttgcatggtgcttgttgcaaacctttgcgctttctatctaaaaccaataagccgagccatatatgggcaaaatatgtgatagaaatcacatatatagtgcaaacttggaaacttccgttggataaaaaaaagacattgaagattcgtccacgtcaacacgagtaagaattgtactcacggatttattcatgagtaaaaaattttatagcgagtaaaatttttactcgtgatgacatgaatgaattttaaacgttcattttatccaacgttagttttcaggttccctccacctcatattttcccagatggatgaatatgagaactgtcactgtcagacatcgatatccatatatgagatgagcatcgggtgatcactgctcagcacattctattccctccgtcccaaataaaattaaccttaacatgaataagacacttaatagtttaacgaatcttgatatatattatgaaatgtttcatccgtgctaaggttagactttttttttctgtgacggatagagtacgtgttacgtcacggcaagtcgatgcgcgtgatccgatcgacgactagaggagactaacgtacctcttgatgcgctcatgtgtttgcatttttcgtctttaactgttggccactgtcttttttctccatgcctaaaaggacagcaacaacgaacattaatggtagctacagtataccggacgctaacgaatacaaaggattactgtagcaggtacatttttctccagctataatactatctccgtttcaggttatagacatggtttatatgggactaaaacttttaagtccctatcacatcggatgtttggacactaattataaatattaaacgtagactatcaataaaatccatccataatcttgaactaatttgcgagacgaatctattgagcctaattaattcatgattagcctatgtgatgttacagtaaacattctcaaattatggattaattaggtttaaaaaatttgtctcttaaattagctttaatttatgtaattagttttgtaagtagtttatatttaatactctaaattagtgtctaaatatagaggctaaagtcaagatccaaacaccacctaagattttctagtattgtccatatatatatatatatatatatatatatatatggggcaacatatcctatgcacacaggccctcacgtgtatacaggtgcacgccaactaaaaaatgtcaccaaaaaatttagaaaaaatcatacacatactttcaattgtattacacctagggttaaaatcttaacgtcaaattcattatattttagccgtaacaaaaaaaaatctgacagttttaaggttgcaattttgtcagaattttattttttttattctctatgtagaatgaatttgaagatgcgactttgcacgtagatgtaatattattgaaagtacatgtatgaatttttctagaattttttgtgataatttttagttggtgtacatggtgtgtacacgcgagggcctgtgtatgaatttttctagaattttttgtgatatatatattaatgaatgaaacagaggaagaggaagtactagttacgtatatctttgttgtagttcggatgatctgtacatatgaactggcctataataatgattcagtccaacggttcggtgtcagcttggccttaaaacattcggtttggttagatgtgatagaacttgcttatttaggctctgtttagttcacagcaaactttttctaaacttctaactttctatcacatcacattacatccaaaacttttctacacacataaactcagaggaagctactcatcggacgtccgatgccccaaaaaaatcggatggtcaaatgtcgcagttgaccaacaagtgaatcattaagttatatagggtgaaacaaaaaaatcagcaactgaaacatttaaatattttatgaaacatggtgaagatacacgttgtaacatgtcgttgtcacgtatgaaacaacaagtattaacggattgaaacatgtgtttttcttttaacaaaatataatcatgcgatatcttgttgtaaagatttcattaaaacgaatacaatggtgtgatcggatcatggattggataaataatttaagagaaaaatcattttgaagcttgctaaaatacatgtatgcatgtgtgtatagatgaggtggagagagagtagtagcaggtagttttaggaattttatgaaacacactaaagacgcacattgaaacatatcactatcacgtatgaaacattttattttaacagtttgaaacacatgtttttcttttgacataatataatcatatgatatcttgttgtaaagatttaattgcaacgaatacaacggtgtgatcggttcgtagatcggataagtaatttagaagaaaaaatatttaaagagaggaggaaaacatgaaaagaaacagatatgtatgtatgatgcagcgatagggtaggcgtccgatatttctgttttcataaacttctaacttttttttccaaactaccaactttcctcaaacttcttcacaatttcagaaagtaaacacagccttaatttatatttttcgacttaatatgagtgttcgtatttatggttcttttattagtatcacgatttgaatctgataaatagaattatacacccacgattttaaagcaccacacacacggatagtgcttctccgtatatagttggggggcacaatattatacttggagatggtaagatttagggaatatattcccagcaacaaaaaagatttagggaaaatataaatttgctcttcctttttcatagcaacgggaaaaacttattttgagagaaaacacttttccagaacgatgctgccatacagaaaataatcttattagaccccggtcttacatataaaacctagggtctcatataattattttccggtgcgtaggatatattctataggagcctaaccgttcgatctgcaagtctgcaactatggacgaatcaccaagcgagcgtgcatatgctgccactattgtatcgtgcagcagcttggcacgctacggcgaagaagcttgcggcgggagcagcagctatgcgccgggtaatggccgccgcggccggcgtgccgctcgatcaacggggagtagttcgccgcgtggctgcgcgccacgtccaacgtgtagccgccggccaacggcgaggagcggtagcatgggctgggatgagcggagtacgaggccgcccagctgccgccgacctcgccggcgcccggccacagcgccgccgccggcgcggcgtggctggcgaccaccgagtgggcggtgacggggcatccgacgcgcgcgaaccatggcaagccgccgtcgcccccaacgaggccgtggtaccgcgcccgcacggcgtcctcggtgactgcggcggcggctacgtcgacgggcggcacggccgtcgacgacgacgtggtgagctccactatctcggcgtagccgacgtggttcctgagcctcctggtcagcctgctggcgtccaccacgccgtcgccgatcaccagcagcaggttcctctcctcgccggccaccgtgacagactgcactcctgctcggccaacgcatgcgtgccattcatttgcaaggaaacgatcggatcaaactcgggaacaagaagaagaagatcgaagacattaccgttgaccgtggatgccactttcaaggcttttgatcggcatctctccgagctcagctgaatccagataagaatctcggtctgaaacatcagtgttattaattccgtcgaattaaaccattgctagcacacgagacatactagcacgtagcattagcatgcatggaaattactagaaagtaacagagcttagtcgcccataccctcatggaagtgatgcaaatatacaactgctttattactaggagccaattgaagggattggttgctaatctgcaatgacagagtaaacaaatgtttccagccacctttcaatggtacagtagtactctactttacatggtaccgacaatgttttgtacttcttgcaaggaccagtgcacactgctcacttgctcagtgacatatataggccgagttggcgcttgccacgactatttgtcctttgtactgtactaacttagaccacggaaagcctagttttggtggtagcatggaatcaaaaagaaatactgtacattttcttcctgagttgaagagaagtccagacttattctaagggtcccagtctgttaacagtgaaatttggttcgattttctcgtcaacacagtcccagaaaacggccaaacatgacattgtgccatttttcaactaattagggctcattcggtttataggtcttccatatgattttttttaattaggattgacaattcctttgaatttttcacttttcatgcattcagttcgctggaatcccgtgtaggaatttcggaggaatactgtaacaaccatgtgaaaacataggaatttcttaggattcaaaacatctacgtactccaacctcattttttggttaatggctggcatagagtgaacgctaattcctgcgttttgtatattcatgtattccgaatgctcaatatcaccaaattccaatgcttttcaattatatgttttgcatatatgtatcatgtgtatttttttctatcgtgtgtcgttccgaatgatcccttaataggcaaccttgtttgattccatttcagttccttctcacagggacaaatcacaacttttaatttactgtaagtgttggcatgcatgatgccatcatttccatagtttgttcaaccgtggatttagataacttgcattactagcacacaaacccaatggggccggaataggcagcgttagtcaagactatcactgctggttgctcaatcgaccgtgatgtccctcatagagaacaaaaaccaaaaagtaaaaggaaaaaaaaaaaggcttggcgacgatcgttgagcctttgccactgtcattgttgttgcaaagccacaactgcggtcatggttgtcgaagcgcggtcattatcgtcattgtgctacccaccaccgagacaataaacccttacgatagggagtccgggcatgctatatctaatattggggtggcaatggcacgtgttccctagtctccggcactttggagcaccagagatcgcccggcaaagaggctaatgatgacaccaatcctagccaccttgtagccaaaattgtacatggaagacatcggtcagcgaaagaggggtaagggagcaaagagcaagagcagtggtgtcgggacggagagggacaagagaagaaagtaggagcagcgactcgctacaaatataatagccagatttcccggccgagtggttgtgctctctacatgcgtagccttgacctacttgctgtcaccggcaaatgtggaggctactagatagaatggtggtatcgggtacatgtgaatatattttgaaaatggaaatatattaccattctatacttcatttttaacaaatcgacttgtttcttatcgtttaagctatggttaataagccatggaagaatgagcgaagaaaaaaaaacttatataattgtatcggcagtttaaatggcaatataaaagcttagaatacaatgaaaaacttcaaatcaactccatgattaagttgtaaaaatt

SEQ ID NO: 27859 - DNA, 1462 bp, Oryza sativa
gacattgccgcccttaaagccctggcgccctccctctcttctcctcccatcgtcattgttgccgccgtcttccgagctatgtctcgcctccgccgttcatcgccaagcgccgggagagccggtgcgttcgtggacgcggaaggggactccgggcgctcgtcttcctcctcttccccggcccgaggccggagagattactcccgcgccgtcggcctctcgtcacagcgcccctcctcatctcggtagtgcctccctccgttcttcctcctcgctccatctctcctcagttttcggtggtagcacgagtagcctccccgtagctagccggcgccgccccgaccgttgccgtcgctcgccgtgtgctcgccggcatcgccgcccgagctccgtagcacccgctcgtcgccggcctcgctcggcgtagctccgcccaatccgacgctagcaacggattcccgtagccgcgtagatgctctctccgccgggaattggcccctcgtgacctagtcgccgtttcccccttttctctccgccggttgccaccgccgcaatccgccggcgatggactccctccggcgaatccaagccgttggctcgctccatctcattctccctcgtcatcccagtgtacgccccgtcgcccctcatcgtcgcaaggcgccccggagaaaccgccgccgcccgccgtccattcgcggccggcgccttcgtcttcctcccgccagcccacgtggcagccacgtagacgccacgtcggcgccagctcggccgagatcgggtcgggccgaccccggtcagcccctcccgtgcgcgtgttccaccgcgagccgtgaggctgcgcgtgggcccgccgcatccgttcctccgcgaaccacgcgcgtgcaccgcgtcccagccctgcccgcgcgcgtgcgccgcgtgctcgctccgcacggtgaaccgagtcaccgacaagcgggtcccacccgggaccgcgcgccgtgagcccggtccaccggctctctctcctccctcccgcgcgcgcgccttgggccggccggcccatttagctcggccagaccgccccaattctctcgggccgcgccctagccaccgaggagaagtctatattccctccctcttttcttttcttttcttttcttttccaaaaaggatttaattaaatcctttttcctttagaccaaaaatccaataatcttagaaattcaatatcttcccaaccgtaaatccgtttgactccgtccaacttccaaaattcctcaaatctcgagatctatctaatggcacgcttagaggtcattaatagggctttattttcgccgtttgttgagttgtcccgtttcgcgtgtagtttcggagcccgaagacccgcagtgcgaggatttcgaggatcaagctctagatctcgagcaaggcaagccacctttgaacatcttgagcctatatttgaaatttaattatg

SEQ ID NO: 27860 - DNA, 9357 bp, Oryza sativa
atcgcacttaatctgttgtcccgtctgcaaggcagattggcggacctacctaatttgtttcatttgatccttcctttgttaattgttatatcatgtccccttgtaaccatctagttgcgtctcgatattcgtgcaccctgtgcgagtatcgacggacgccttcaaaacttaaaatctgattaacaacttgggtaaaacttgggttttacaaaagacttggaaaacccgacacctgggtcggtgcttgcgaactaaatgaatttccaaaactgcggaccggggaacgtaccgggtgtacggtttcccgctcttgcacttaaggaccgtttccttggaatttcatccaaacataagacaagtacgatcacatgggtggaatgggacacccctggctgagtaactagcttatcaggggagccttgatgccgagagacatgtggattcgccggggtggtgtcggggaggacccctgggcttcctggcacagtatggtctaggacctaacctgttgttggtctgggacccctctcgtcggcatatggtaaacctgtgtcggctttggaaataccttgtcatgaaagcctggaggtctcccgacgtggctgatccccacgggctgggtgatccgagttagtaatgtcgtgtgggtaaagtgtaccccctctgcagaggttaacaaactgttcgaacagccgtgcccacggtcatgggcggatgtgaggtgattcctagcgtagttttgtttgactactgcttgtgaaattactgttgaggaaaggggttcgatgtttgaaaaatctgcagctgatgtgatcagctaggcccgggtggccgtttgaaagttgttggcccgggtggccgtttgaaaagctattggccgggcgccaaccttgtttcaattctaaggactgatacattgcacatactccgaccggacgagacgcactgtctcatccgtgtcgtttgagaagcactcacttagttgttttcagaaagtagttcaaataaaatttattgcaaaaacaacagcctttctttgaagcctgcattaaacacttatttcccatggcttgctgagtactcccgtactcacccttgctctatataaataatcccccccagttgctgaagaagatgaagcggaacctgctgatgaggagttcttccaggagcaagccggcttcgatgagttttagggtttcggcctagttcccaagtcgtgcctgtgttgattggtccaagtcctggcttccgttccccttttgtaatgcagttgtgagctcgggatctgtccgcagcccaacatgactgtacctctactctataataaagagacctctgttgctgtgataatccgtcttcctgtgataccagcactgtttcctgggactggtatcgattaacaggttaatttggagcgtcacgggctagttccggtcggtactagtccggggcgtgacaaggacccaccacataccatgtcctatacggaaacaacctgcggatctaggaggagttccggataagaaaagacaaccagagttctacatggaaaccacaaggactactcggattgtatccatattggtttccctagttctacttggacaatgggacacctatgtgtataaatacaaggccccctaggaggagagaacacacaatcaacagacaatcaacagacaatcaacacccaccatggaaaacacccaccatagaagaaacgtacaatagatcaagacacaagatcaacatacaagccaacatacgccaagacaagacgccggatatcgacttcagggataagcacagctagtcccctacggtgtctccggatactgtcaggagagacgaaagcgttatctctgatctcgccgggcacgaacttgaggaggaagactaccctgttgtcgactacgagtcagaccttcagaccgccatgtcgacaacagttagataggctaccccaaatattacactggtgtgattatgtaacgtcccgccttcccccaggccgggcccgcttatatctgatagctttcataggtcatagactgccctcacagaccaacacatatcttttctgcacactttgtcctcactcgtgtgcacccgggaagaatttcccggtcggtcacccatcccaaattgctccaggccaagcacgcttaaccctggagttctttggagattggcttccggaaaaaaagttgcaatttgttgatatgagtattctattaatcctattaagccctagagcgggatgttacaccctcacccccttaagagagatcgacgcccccgtcgatcaaccctaggccaggaacgatcgacgcccccgtcgatcaaccctaggccttggccacgtccatgtgtccagtgccagcgcatgtgccatactgtgtaaccactcccggtctacaccagccatgcgcaccatgcctgcgcaactgcgacaaacgcgcccgtgaaaccgcgagagtcggctctgataccattttgtaacgtcccgccttccctcaggccgggcccgcggtcggtcacccatcccaaattgctccaagccgagcacgcttaaccctggagttctttggagattggcttccggaaaagaagttgcaatttgttgatatgagtattctattaatcctattaagccctaggccgggatgttacaccctcacccccttaagagagatcgatgcccccgtcgatcaactctaggccaggaacgatcgacgcccccgtcgatcaaccctaggccaggaacgtcctctcttggccacgtccatgtgtccagtgccagcgcatgtgccatactatgtaaccactcccggtctacaccagccatgcgcaccatgcctgcgcaattgcgacaaacgcgcccgtgaaactgcgagagtcggctctgataccattttgtaacgtcccgccttccctcaggccgggcccgcttacatctgatagctttcataggtcatttttgtaacgtcccgccttccctcaggccgggcccgcttacatctgatagctttcataggtcatagactgccctcacagaccaacacatatcttttccgccttccctcaggccgggcccgcttacatctgatagctttcataggtcatagactgccctcacagaccaacacatatcttttctgcatactttgtcctcactcgtgtgcacccgggaagaatttcccggtcggtcacccatcccaaattgctccaggccaagcacgcttaatcctggagttctttggagattggcttccggaaaagaagttgcaacttgttgatatgagtattctattaatcctattaagccctaggccgggatgttacagattatggtgaataagagcaataccggcttcagccaacaggatgtagggttattacctgacaattcaggggcccgaacctgtataaaaatcctcgtctccatctcttttacctcagtctcgcatatatcctagtaccgacgatccccataccatgtaaataccggaatcgcgacatcaaacgtcgacagtggcgcgctaggtaggggattttggtgcttcaggatttcgacgatatggttttaagagatggattctccaacaacaagctactcgatgacttcggctgagggagagatctaatccgacccgagtatgtcccccgacaagatcagaatcatcgccatcaactactcgatccgacgagatcgatcaagcttcgaaatgtcgcagcggcataggaccatggtatcggtggcatccaaaactgatccgacaccaacccatcgacgtgcgggacgccaaccggtgggaggcatcggctggccgggtccaagccagactcggcatcgatctccatcaacaaaacaagcacgtcgaggagttctgtagtttgggctagaatcaaatttctagtcgacaaacctaactactcgtcctgatgacgcaggctaatagcaacgagacatcgatccaacaaatatgcctgctcctgacacgtacagtacacatgcatatgcatggagtcagtacgtgtccagccacccatgatcaggtatttagtagattgagtttttaaaattgatctactaattccgtagatatatccggcatatatctacaaaggtatacaatattttatatacaatttatcttacctatttttccaatctatacaatattgtcaaataaataatttattatgtttacctagagcatgtcttttatacaatatctattgtgcaagtgtctctgatgttaaatcgacaacggtttaataccgggggctcgctctattttcttcagtataaatcatgcttgtttacggtttacataatgtgtgatatttaatctgctcgctatatcctgataatactagaagttcatgcagttttttgagttcatactcgatattctctgctatatatcttgtcttctagaaaatatttttcaggaacaatagatcactcgagtaggttgtggtcgagtacaccgtattatcgagaacgatctcgacaaatgcagagtcgtcgcgcccaacctaccaacgaagaccgacgacctatctcatcgcaccggccgtggctggactatttgagaaaaggttgttgacggataattcgtcatgaacgttgtcggcttgatcactcgatatgattgcgaacggacatccggatatgctataagtttggtatgtgagtcatgctggtcacatgagatgcacatgtaataaaccaactctagcgttctcgaaccagtacgtagcaatctcccgcaccgcaaacttccattggtgttcgagagatgattctactcgctcgctggttctcgaaccagtacatagcaatctcccgcaccgcaaacttccattggtgttcgagagatgattctactcgctcgctggttctcgaaccagtacgtagcaatctcccgcaccgcaacctccattggtgttcgagagatggttctactcgctcgctggttctcgaaccagtacgtagcaatctcccgcaccgcaacctccatgggtgttcgagagatggttctacttgctcgctggttctcgaaccagtacgtagcaatctcccgcaccgcaacctcagatggtcgaggtacgactacagcaataacgcagcggtcctcgtactacgacttcaaatgatcgagagacacctactcactggtcctcaaccagtcaattgtagcgatctctcgtacatttacttctagtggttgagttacgactactacctggttcttgactagaggtgtagcgattctcccattacctctacttcaacaaagttgatatcaggtgcataatatcgccaggtgttttacccagagatcccttaccacaaaagacacctagcgttgaaacatatcctaatgtccctttacgccgtcttgacaaaacctctgaggaacctaagggaacttcggctggggacacccagagcggataaggctttgtcggatccttcagagacgaaataccatgtaagatctggtcgtgtaagagttctcgccgtacgtattaatcaagccgtgtaatcggaaatggattttccaacttcacggctgggggctaggatcagtgctcgtccaactaaggcaggtcaaaggtccaagaaccttatcatccgagaacgattctccgacgacaaggctgggggctagggagagtgtataactcaacaaactgactggtcgaagtcggtaaaagagtagacgctcatatacaaaacattggtttgtaaacctaattcattttcagttttccatacattctataacatgttaccctttgagcactcgctcgggggctatttctatctaatattcttttctgaatattgatttcaggaaaattctattcggcattatcgaagactccatgtctctatggctctgtacgaagatcgactaaggcgagtacgataaatgttgacaaagctccgtcgcagtctctgcgccttctcgatcgctcgagaacggttggtagataccgacaaggaatacaaaatgaagaaatggtgtacccgccgagataaaatttcttgacttcaatccaaattctcgattacagcaagacgggagacttagtcgtatgctctgtactttcttggttgacgtcggagattgactcagacaaaccctttaggtgcccgcacgaggctgataaaggaagtcaaacgttatctctaaactcaccgagaacgatcacgtgagctcggtaacagttcctccaaggtctgcggttgagaatatgaacctgttcatttgcattgaagtcgggggctactgtcaggattatggataccacatacctgatagtagttggctaaatctcgacaggacccaccacataccatgtcctatacgaaaacaacctgcggatataggaggagttccggataaggaaagacaatcagagttctacatggaaacgacaaggactagtcggattgtatccatattggtttccctggttctacttggacaaggggacacctatgtgtataaatacaaggccccctaggaggagagaacacacaatcaacagacaatcaacacccaccatagaagaaacgtacaatagatcaagacacaagatcaacatacaagccaacatacgccaagacaagatgccggatatcgacttcagggataagcacggctagtccccttcggtgtctccggatactgtcaggagagatgaaagcgttatctctaatctcgccgggcacgaactcgaggaggaagactaccctgttgtcgactacgagtcagaccttcagaccgccatgtcaacaacagttagataggctaccccaaatattgtactggtgtgattatggtgaataaaagcaataccggcttcggccaacaggatgtagggttattacctaacaattcaggggcccaaacctgtataaaaatccttgtctccatctcttttacctcagtctcgcgtatatcctagtaccgacgatccccataccatgcaaataccggaatcgcgacatcaaacatcgacacacccgttttatgggccaatcggaaggtttacgagacaaacactctcgtagcaaaggcagatgatttacgacgtaaatagacaaagacatatgaaactagggtaaagtagaaaacatggttggaaagtagaggtaaaagaacgattcgatatattgtaatgattgtggtcggggttagagtcgaaatggcatagcctttaaaaaagatcaattaggacttaagaaatctcggattcaagcaaggaaatacacaaaattgtcttaattggacttggactcagggccgccggtctagctaactggccgaacaactgcggtctgactgcccttgtgccgccggtcggaccaacctcgtgccaatgatcagactggccccacatagatggcttgagtactttttaaatctggccatgttttcctatttttcttctagatgtcaaatttaggtgttaacaataagtttgatattttattttatgaaaatgattatatgaatgttatttattttattatgatttggtctatcaataaaatcactttaagtcttgcttatattttttttaattctcttttagtaagttaagtggcctaccatatgtttaaaagttattaatcttatctatatatctagaaatagaagtagtaccgactactacggagtagtacaagtccatgtacacaagtgttatactccctccgtcccataatatgagggatcttaacattttcttgtactgtttgactactcgtcttattcaaaaattttttgtgtaaatataaaaaacggaaagttgtgcttaaaatattttagataataaagtaagtcaaaataataataactagcctggtggcccgcgcagattgcgcggctagcatcattatattttctctcatataatagcatatttgttttctcattatattattcaaatatattaaaatgacaacataattttaaattttgcaataactttataaaactactaatgtgtaatattcatattgtattttatatacgtgttagttattaattatttttaataccaaattttagttatttgtaaattataaatattcctatatggactttagactcgtcttttaatatttctttttttaattccgattttttttgtaaattatatttctatatagactctatgctcttcgtccaatattatttatttttatttctgaatttttattatttctaattgtatttctatgtggattctaaactcatctttcaatattctttaatttttaatttcgaatttcagttattttctaaatgtatttctatatggactctagtctcctcttctaatattccttatttttaattccgaatttcagttattttctaatcatatttctatatagactctagtctcctcttctaatattccttattttttaattctgaatttcaactattttaaattgtatttctatatgaactctagtctcctcttttagtatttcttatttttttaattccgaatttcagttatttctaaattgtatttctatatgaactctattttttctttttctccgattaatgtgagaatttctaggccatgagagcgaacgtagaggtttttttttctattcctttaataatataatagataattttaaattttttttaataagacgaatggtccaacagtgcaagcaaatgtaaaaatctcttattttaggggacggagggagtaggaaaaaagaaaatgtacggtacagaatacagcaagctctctggccaaagagggaagaacagcaagctctccgtactacagaattactcactttgatgaactataaagtcgcatgtacagatttaatttgcatgtacaaatgagcacactttgatgaactataaagtcgcttgcaccttatatatatctccctagtacacctaatttacacttgcacaccgtatacacttggaggccgggagcagctactacacatatactactgcacatataacgttcagacttcagagtttcagacaacaggtacgtacctgtctgttgttcagtaatcacacggaatcaaatcggcctcatcatcacacagaaaattcaaggtatatctacgtactttgggccagttatcgattgggacaatcagctactagattcggtcgcaatatgtcctccgatcatccgatcatcgtgacgatcgagacgacgacggccggcatgctcgcgcgcgagcagaagcagcatcgatcgtacactagctggtgcagctacatgatggcgcagctgtccgggtcgttgttggcgtactggtggtgc

SEQ ID NO: 27861 - DNA, 4646 bp, Oryza sativa
cacagaaaattcaaggtatatctacgtactttgggccagttatcgattgggacaatcagctactagattcggtcgcaatatgtcctccgatcatccgatcatcgtgacgatcgagacgacgacggccggcatgctcgcgcgcgagcagaagcagcatcgatcgtacactagctggtgcagctacatgatggcgcagctgtccgggtcgttgttggcgtactggtggtgcacgacggtgtgcgtgttcgtcgtcgccgccgccgccggcgggtagtacgacgacgactgcccgtactgcgggtacgacgacgactgcccgtactgcgggtacccgccgccgccgccgccgtagtagccacccgtggccatcgtcatcggcgtgtagtagccaccgccgctgccgccgccgccgccgccgcgctggtgaggaggagggtacccgccgttgccgtagtacggggccgggggcggcgcgccggggtagtagcggtacgggtactggttggcggcggcgacgcgcatgagctcgtcggcgtcgacggtgcgcagctccaccacctcggcgtggccgaccttcctccgcagcttctcggtgaggtcgttggagtccaccccgaagccgatcaccagcagcaggttcttgtcctcgccggcgagcgtcacggattccacacctgctccatcggttcacgcagaacaaattagtagcatgcagtctgatcagtctcatgcaccgtgattattacatcgattacagttaaattactattagttcttgatctctcaagaaaaatatcaccatctttttattatatatactttcgggtcgactctagagtatcccctgtgattattacatctatcatatagttaaattactattggttcttgataactcaagaaaagcgccatctttttattatatttcgctgaaatatgtgtttgggtgtgcaaggaatttttaccggagactgcagcagcaaccttgatagctttcttgtggcccttctcagagctctgcagcctgatgacaatttccttctgcaaaaggtttcaaacggtgtaacgattagcagcgggaacaaacataaatcttacatctttgcacaaaataacagatttttcactgatgatgaaacagagaaaaattgacagatgagcagcaagaccatatacaattacacatacataccctcatatctttctcctggtaagcaagcaaactaaagcaagcgaagcaacagctcaatatactactcttttccaagctcacaagcttaagcaagagagcgagccttgtgactagtgtactctaccttgcctaacacagcattctgcagagagagggagagaacctccctttttatacacacaattactagtaaactatccaataatctaacgaataaaattaacccggttagttaattaccttaatcgcccccattgactttagcggcggagtcatgcatgcacagcactgcttcactactgaaaacacgcatgtataatgtatcgatgtatatctctacggcctttgagagagcgacatgaattgtagactaggaagacctggatggcctcctagtagtttagctaaaatcagcttaattagtttgcttggagcaggtggtgacttactgactcggccaccctaattccacaaaaaccaaacgcccacttgcattgctcccgtagcaacgcgtgatttgcctcagttttccactgaaaaaattactccatcagtcccaaaatataagtatttttagactctgacacagtcttcgagatgatactttgaccaacaatatttattaaaaaaagatattttaaataaaaagaattgcatattatgatagtttgattaatgataaatctagtaacatcaattttacatgattaatttttttatttcttttgctattaatagttaaagttaaaaatgattgatttggcactatgttaaaaatatttatattttgagacggagggagtaagcagtaggagacaaggaaaacgttgtctaagctgtaatgccggtacgtacagtgggcgactaataatccttctcgtggttgtttttctcgcccggaatttggaggattcgcggtaaaaaaaaaatagtgccacggagctgtcagtgctcagtactgtcagtacttaattaattacaatactgggtaatgggaagtaaaccggctgatctatcagtgacgagtgagtgagacggacggccgagatggcgccgtgctgcgccgggagagctccgtcggccgttcgatcaggcgggtgagctggagaccgaccgggcaagcgttcgtagccggcaaggtgaaaagggcttttatgtggagatattcacagggatgacaggaggttgccgacttgcagggtgagtgaattgaacaatgaaacagcttaagtaaacacaatgttaaccctgacaaaaaaaagggttaaggcgacaatcgctacgcgacttgtttgtttcttttgtgcgcagattttggaagtggagctgtcagtgttgtcagttaattacattggagaagtaaccgatcaagtaagtgagtgtaaaccgttaatttttttggaaacatacttttatttttcatattttgtatttatatacatgtccaagattaacttacaaaaatatacccaatccgcatattagttgcacaggagcgccggtcccgcaggacaggcgagcgacaacacggtgatttgcatgcggagctctgccgcatattggatataagggaccgccgctcccacacatgtcttttcccaaattgggaatacatgtcccgtccaaaaaacagagcagtacattggcacgtgattaattaattactagttaattttttaaaaaagaaatggatcaatatggtttttttagcaactttcctataaaaactttttacaaaaaatgcaccgtttaataatttgaaaaacgtgcgcgcggaaaaaggaaggagatgagttggaaaaattaggggaataacacacgaaaccggagtgctcccgcatattggatgcgcgggactgccactcccgcacacacgtcctttcctaaattgtgaatacatatcccgcacgaaaaacggagtaatacattagcacgtgattaattaattattagttaatttttttttctaaaaatagattaatatgattttcatgagcaactttagtatagaaactttttacaaaaattgttccgtttagcagtcgtgcacgcagaaaatgaaggagatgagttggaaaaaattgagggaataacacggaataacacacggagccggagactggctcggtaccgtgtgctagaaccgcgggaccacgccggtcccgcatcgccgttatgcggtaccgccgcgctcaccccgggtccagacggcgccatcactcccgcgcatcggcgccgcggtaccgactcggtcccacagtctagccgtgcgggaccagctcagtcgcgcatcccggttccgcgtgaccagctcgagtctgcggttcgccctcgctcccgcacaatcattacacggattaggtatatttttacaaattaatcttacatacgtatataaatgcaaaatatgaaaaataaaactatattttcaatttgtttctatctttatcttatactgatcaagtatatgaaacatcaacaatggtcaaattgttcgaaaaaaaaaggtgactgtaacgggacggctgagatcaagccatcttgtgtcaggggagctcaccgcggccgttgattgatgtgattaagctggagaccgggtggtgagactgttttaagaggtgaaacagggtcttggaccctttttagatgggattaaaacttttaattccctatcacattggatgtttgacactaattataaatattaaacatagactattaataaaacccatccataatataatcttggactgattcgcaagacgaatctattgagtctaattaatccataattagcctatgtgatcctacagtaaatattctttaacttaaaaaaattatctcgcaaattagcttttatttatgtaattagttttgtaagtagtctatatttaatactctaaattagtgtctaaatataaagactaaagttaagtccttggattaaaacaccaccatgcttgagatgttcagagaataagaggaggttgcagtagcttgctggtgagcggatggatcgacagcttatctaaccccagtagtggtaaccactgtcaaaaagaaaaaaaaaagggaaaatggaaaattctaagccaactgaccgcgacgtgtttggacgcgacaccatcttccttgccgggttttccgtcttgagtagtgagctttaggctcgcgtcggcgcgtgacgtaggcgtgccgcactagcttccgtcatcagactctgtgttaagttgtcaacttatattatcagtagaaaaattgccagctcaaggtccatggggaggtggcttaattacaggcctaacgataacgatatacagctagcctcgacgcaattaaattggacgaagtgtttgaggtggatcggtgaatttgaaaggctctccgttggagaaatgaaaaaaaaaagaaacaaatcagttttgctctgtgctgttttgtctgagtcagaaaa

SEQ ID NO: 27862 - DNA, 4033 bp, Oryza sativa
tactacctaagagatcagtatcatactgcgaatacagcggtgcatgcatcgtcacacatcatcttcaacctggcttgccgcagccgcgtcatcccgccatgccgctgccgtgtcgtccatcatgcgcttggcttgccgccgccgcgttgtccctccatgcccccggcgtgtaatagaatatcttacagtatgaagtgcctcagtccgaatactgcatcgccgcctcgacggccttgctccccttgcggcctctgcaacggcgggcgagagtggtggtgaaacaccggcggcgacgcgtcgatcgacatgaaccggccggcgccaccggcggagacaacgacggcgaggggggcatctgcaacgaggaggacgaggagcccagcgcgactgttggaaatcaaagctattcactcactcaatctcacaagaacacaagcgcatacacacaagcactcagaacacagagagtttgcaagtgcgtagcactctttttctgtttatttctcacactgaaactgattacattgatctctatttaaagatgcacataacctgcttaagcctaaagaaatgcaagaatcctaaataacaaactcacccatgtctaacagaatatatcctggtcaatctccgatgcatgcgcccatgcaaacttcgaccgcttcttgctcctgagctgatcccttcgccacatttgcatgcatggctaactaattagctagatgtactctcacctcctggcaacacgatcaaccactactcaatgccaatctctctactcactaagccatgcagcacaaccactaagctagcactcatgccatgcaacacacatacatgtgacttctactcagctactaccatacaaataaacatgctgaaaacaaaacaacaagattatacttctaatagcgacctccccaactgcacgctctctagcaggcagcgacgacgaggactccggcggcggcggcggatctcgtgtcccacggccggggcagggacgggagtagcagcagggagaagagaagagagaagagagaaaggagaagaaaagagaagaaaataatatatgcagctgatatgtgggccccacgtgctttgtttaatttttttttgctggctagaatgccacgtcagcgaaaccatccatatatactgcctagggactttgagtgaacggttttgtatagtttaggggtgaagatttctggttttgtggttaagtgacctcgaaaaatttcgctgttaacttgagggacctccggtaaacttattcctttctgcttatgatattctttttccccgattacacatgaaaaattcggcacacaccattacattggacctcacccttatgtcccttttaaacttatgaactataaaactgtggcaagtgagtgattgtctgattgattgcaatcctaataaagtgaagaaattttctccatattctccatataattcgaggctctttcgcagcgctgtataactgtgaggccggggaattcttggctgattctgctttaaatagtaggatcactcgcagtaggcccaaggaatgtactttctgtactaattatggagataacacttcatataacaagaaggttctgcatgttattagtccttgttttaggactttctgttaaccccaattgcccggaaacgtacaaagttaggagtacgtactgccagatatcagtatcagaaggtgcaaaacatgaacatggcaaccttcggtgtgatgtgaacccgttcgtttaacgaaacttccactcatcaaccagcttttacgtgacactaatcatcaccgttcaatagttccatttgctaaattaactacattgcttaacctatttaactatcggtgatatatttctgtcttttggtggatttgatgacgatgttgctagtagtcagcactaaactactcccccgttaaaaaaaaataaatctagaattgaatgtaacatatcctaatattatggatctggacagtagagattcgtagtactagattgattttttataggatgaaagaaatagtctatagatacacgtgcctctcagcttaaatagatatagtggagtcgttctaaaaaaaaagaaaagaaaagaaatgaagaggaataagaagaggaagaagaagaaaacaagagtcatagacaagaacctgtacctttcaacctatctggtctcctcactactctctccggtcaaaattgtttcatgttttggagaactaattaagtttagttcaattcaatatatttgaccaggggaaccgtcgaaatctcccgttgcgtctgtcagctcagctccacgagttgtattcctatactattcttcaaaaacgaaccgtataacatttgaccgtcctatttgactaaaaaattatgattaatattttctattgttattagataataaaatataaatagtattttatgtgtgactattttttatttttttcatattttttaataaggcggatggtctaactttgtacacgaaaacccacaactacacttaaattggaacggaggtagtataataatacaatgcatgtttgaaattatatactactttatttatttatttttatggtgattagcttaaaattgaactaaccaacggtcaaatatttgaaaaaaagaatggagtgattaactgattaggagcagctccagagtgcaattgtccagatcgattgcgaaatacacatctgctagtatgttggagattctgatccttccttttattttacaaaaaactagttcttgaaatttgaatagggggtgagacaatcacccaagtttagagtttactcccttgtacagaaatagacttcatgaaagaaagtgatgcacttctgtttgtcctgaagaagaagaagaagaagaagaagaagacgacgacttggacaagtggaatctatgattgttggtttgacttgaacaagaggaccacattgctgtaaaacattgaccagtagaagaccagctcctacgcaatcactgcatagtaatcgagatttttttacgcacgatctattcttatccagatgtttttattatgattcagcgtagaccaaaaaaaaaagcaaatactcgtgacctaatatcaaataattgtgaggcttcgaacccaggtcgtctagcctaccacctgtggaggtagccaaaaacctctgggtgtttctcagatttagcgtagaccagtttttaccgattcatatatttgaactaactgaaaatttcacatatatttgaaccttaactaattgaaaatttcacatatatagaaagtgtcctgttttacgagcctacccttcccaaattactttaaaaaatcatattaatccaacttttcaagtttaaaataatgaatactcaaataattatgcgctaatggctagctcatcttattttgcctatcttcttgatctttcctcttccccttttctcctaaagaaataatcacgtacataatatcaaatacgattaaaaaatacgcaatgcactcaatagtttgttgaatctaaaatcatttccacaataacaacatacacaatatagaatacagcccaaaaatacatatcaagttagaataatagcaaaaaaaaaaaaagaagaacaaaaaaattcagaattggagaagcggaaagaaatcaggtagccgcaaggttttagttctcgctccttactcatgctcccgtcgtcatttttactcccgtagagttcttcgcactacaaccaccacagctctggctcatgtggagttgctgcaccccctctgtcacttcgtgtcccgctccttactctagttccaactgccaccgctcccactcccgctccttgatgtcgctccggccgccgctactttctgcacttgctcctatgagaaactagacgatgtcccgcactttgttgcgggatatatatattaaatattgtagaaatgattaaatgatttggattgaaatattgtgaaaatgatttgagaatgatgcttatatttagtttagttt

SEQ ID NO: 27863 - DNA, 4621 bp, Oryza sativa
tatttttccagagacgatcacttaagatgaccgcttatgaaaacatgtgcatcttcagaggctgccatcttaagtcaatcgtctctagaaaatattccacatatgggtttatatacgttggctcctagtgtattgtagtttagggatatttgtgaatttattttttgagaaaatagtggacagaaaagaatacgtgccattgagagaaccgcacaaaacatgccaaattttcgtacgactgtagcatgtatggctaaacaatggtgcaggacgtatcgatcagctcggagcaatttataggtatgtcaccgatacgtcaattcacgtgacgtcattctttccaagtgatcgacttttgctaatttgacctctcgtggtcgtcatacgatcgaagctatcgattgcattgcttgctgattggccaaccatggattggcagattagcacattgaaagaaaatcgcatgttactgaacaatcatgaggacgcaatcatgctactgaacattatagtaagttttcatttccaattaagtttggatttaaacaaggcgaaggaagccccacaaagatatagtagtatagtatatctaccactcctactatttctttgtacatagccataccaaatcgctgaagaaatcactgcaaaattcgatcgatctgtgtgactatatatgattacatgatggagcaggggtcgctcggctggtcgccgacggccaccggtatcccaccgtagtggtggtggtagtagcagggatgagggcagtagcacggctccggcttcttctcctccggcttcttctcctccggcttcttctccttcacctcctccacctgcacgagctccgcgtggccgatcttcttgcggaggcaggtgacgaggcaggccgcgtcgacgccgtcgccgaccacctgcagccggtccttgccgtcgccggtgacctccaccgagctcacgccggaggccatcaccaccagcttcatcgccttggaccggctcttctcgcacggcatgctcaccttgatcacgatcttttgctgcaataattcgatcaacggacagaaattaagctgtcagtcgcatatgctaaaaaagatttggtcagaattgattaagctgcatgccaaaattaagcgaccacaatcgaacagttttcccctcaccttcatcgtgttctgcttgaaataaaatgccaacgagaaaggctatcggccgatcgattcgatcgtttgcaatgcggctaagatgatcgagcacgatcaatattcgctcgatcgctgcagctatttgcgattgtagctagctgagcttagccgtggaggagaaggccacgcctgggagctcatttatatagcggcgcatcgccatcgttactactagaccactggcatgagacggcgacgaaagagcattccgcgcagctactctggcacgtacggatcggaacgcgtcagctgtcagtttcagatttaagtctgggattagtcgcagactagtctccgatcggagcgtctagtcacgctgaatggctgagcctgggtgcctgtacgttctctctcgatctgtagtgtagacgaccagtcaacgacttgactaaattgggttcatggtcgacgaccctgaattaatcctgatgggagccgcttcgcgaaggcaaagctctgttaattccagcagtggctgccgcggccagttcagttcagggctaacagcaagcacgaagatacatgggatgatttcatttctacttcgatattgattttatccttattttcaggtttttatttttgtcctcacttgtttgaaacgaaggagacatctactcttgtttttgacggaatttagtggaccttgaattatagagctataaaacaagaaaaagaaggaatactgattttgtatttttctgttgaccttttgtaccctaggcagagaagaaaggaagggagccaggctccgacaccattaccccattcccagtcggaccacagccccatactgtgaataagccaaaggaagggagctccaagcagcggcggtgactctatgttccctcgttttccgcgcacatacttttcaaactactaaacggtgtatattttttgtaaaaaatttctatacgaaagttatttaaaaaaatcatattgattatttttttttaaaaaaaacaaatacttaattaattacgcgctaatgaaccgctccgtttttcgtgagtggtggcaaaacagccacctccctccctagcgaggcggtggcggcagcttcgctagcgggcggagcaaacgaccgtggcgacgacccgatgcggggaggaggcgacggcggcggctgctcggctggtgatggcggcagttcggcgcggagaggaggcggcggcggcggtggtagcttagcgcgggaaggaggcgatggcggcggctactctgccatagcgaaatttcccacccttctttccactcccacggaggctaatattggcctagaacgcacggcccaataggcaggagaagaccagtgggccaccttgccttgtccagcccgagtggtcggtttgggcccggcccaataaggaggagcagaccagtggaccacctcgcctctactggcttccagcccaaatggtagctacaaatagacaaacgcattggtggttttgtagaatgccgcggtgcattatctgtccattaatctgacgtttacgaactaaactgtggcaaagtgataatttgaaatcctataattcttgcataatggaaatgtttacgtcttcgtctttttcttaccgctgtaactgtgatatgaagccgacagattgttgcattggctgatgaatttagcagcaggccctgctgatcctacttaaatactactttctctgatttatattataagacattttgggttttaaatagatttcatatatggttatatgtatgtgttttatatacgtgttcaaatttatatagatattagtaaatctagacgaaaaaggaaggtaaaaacgtattataatatatcaaagggaggaagtatatgtactatgcgatcacttgccttaggccgaagggatgtactttgtgtaccaattaaggataagacttcatctaacaagaaggttctgagtagtttgagagccaattaaacaacccagacttcactagactgcagggtaattctttgtttaggacttgcctttccgaaaagcttgcttttgttgcacgctgatctctacaccgtagaaagcgtgttggcttttcgctagaccaagatgaaatcgttgattctttgattgcgtttgttcactgaattattgacgccattattcgtctgagtgctgcatctatccgtctttgttaaaaattttctggaggttagctgccagtcttgacactctctgactaccactctgacgcttggacttgcataattgagcgtgcaaattgcacaagacaacagagagaaaattggaaaagaagtacagagaaaaatggggaaaagtacaaaactataggtggtatgttacttccttgatcgttcacatttattttgtcagggtgtgatttaaattattatatccagctaaagatgtgtgtgtatactagtatatactaccagcttacagaactctcaacagaatcataaataagaaattgacgagacttggaaaccaacggggaaaaagagataacctaacaccaacaccatgtaaagagaagttaccttttcacacgcccagaaaatcagaatgactgactcatataatgcacgaagttggcgtaattcgttcttaaaataatttcttatggctaagtacgagagtctgcagcactaaaatctgttaagtgctctaagcactttctgttaacccataaatgcctggaaatgtacaaagttaggagtactttcagcaattatcccttattaagaagctgcaaagtatatcaaccttcggtgtgaacacgctcgcttaacaaagctgccacctcagcttctagctttcaataattccacttgctatgtgttaattaaattacttgactcatataactattgttggtttattctgtcttttggtggatttgatggtgatgatgtagtcaacactaaattagtctgaagatgcacacgtctctgaacttaagtatacgtagacaaggacattgttacaagctggaaaattgtttcttacaagggctgtgcctttcaacctatctgaactacttattactactagatgtcacggccatcagatagcagaaacaggcaagaaatggggtaggaatacgcacttttggccaaagtatcttggcgaaaacgaatcgtgtatatatatgtgcatctcatgacgaatggttttcaaacatgaagtggtaggtgtaggcactggattctactcgtattttggtagtcataatataatgtatctttgaaattatataaatgattaggagtgactctagagtacaaatgtcggtacacaaatacaaaatggttatgtccaaatcaactaaatatatcgtcaagtatgttggagccgttcctgttttttttatttcacagagactatgggtgtgtttagttccacgctaaaattgaaagtttgaaaaaaaaa

SEQ ID NO: 27864 - DNA, 6558 bp, Oryza sativa
tgtctctcatcccaaacaccacatatgtgtgtagaaaagtttttatgtgataaaaaacatgaaagtttgaaaaaaaaattgagaactaaaccaggcctatacctgagaatctgaatatctgaagacgatacagaaactattcctgggtatttgaatacctgcattgaatgctgcacctgtacttccgtttgtcctgaaaaagaaaagagactgtggaatctagtatggatgttggttttcctcgttgaatttttataggctcaaaggataaagaaaaaagaaaaccacgtcactgttaaatcgttgaccaggagaagaccatcccctagcctaagaaatcactgtataataatagagcatttttacccaccgtatatttttcatattcagatgttttttacatgggtaattttaccatccttgagaatgtacctagaggtgccatattttctagtgtaaaatttagtatcttaaggtacttaaaaaatttagtgtaaaattttgctacctcacgttactttcttaaggactgtaaaatttctcttttaacattcagcattagatcagttccttgcggctgggttcggaatctcgctatatatatatatatatatcttggagaggctccccatttttttaattctgaactcaccaaaaatttcacatatattctagtttcgtcaaatttggtcaatttttgttccccaaccgcttggaattcaattaaaatttgtctacactttgaatttctccctgcgagatttagattattacacgttctgggactatagttctcaggatgctaaatttttgtacatatgccaccctgggactatagttctcaggatgctaaatttttgtacatatgccgttctgggacacgttctgggactatttttgttcgaacaacgatatgatgcagccggcaggacgtgtcgatcgatacaattcagagtacatatttccacgtttgatttgtttacacgcacgttgataattgtgacttctggccctcgtcatacgtgagcagctaatattgattggcttggctagccatggatggcagattagcacatctgaaagctatagctaggagtagatgagatcgatcgatcacatgcgtttaatttttccgccggaaagaaaatcacatccgtttccgaacttcatgaggacgcaaaccagcattgagatgtacacacaccagtgtcgtagttcgatcattttcaaaagtagtactaatactttattgtgtacagccatccatgcactcatatatggatattaattcatggatatatatggttcatcaattcactcgatcggtgtgtactgctgtacttgattgctgatcgatgaagatacgatattactgcaaaaaattcgatcgatctctgtactgtgtgactgatcacatgatggagcaggggctcggctgctcctcgcagtagaccatcgacggcggcgggtagtagcacggaggaggagggcaccacggcacggggagcgtggcctggcacgggcactccggcggcttcttctcctcctccggcttcttcttctcctcctccggcttcttgtccttgacctcctccacctgcaggacgtcggcgaagcgcaccttcttgcggaggcaggtgacgaggcaggtcacgtcgacgccgtcgccgacgacctcgaggcggtccctgtcgtcgccggtgatcgccatcgagatcaccccgtccgctttcgccgccacccccagcgccttcaccctgcacccgtcgcacggcatgcacgccttgatcacgatcttttgctgcaatcaatcaattaattacagcaattaatatttcaaaatttcaacaaaacgtacgccatgaaagcgatcgatcagtctctctgtcatacgctgctactcctgctgcttcagagaaatgctcaaaatgtcaaaggtataaacctcaccttcatctcgtcgttctactatacgtatacgatacgtgatatgaacaaagagagatgcaaacgcgagcaagatgatctagcttgctgcagctaagctgcgtgcgttgcgatttatttctagcggtggatgcagaaggccagcgccgggggctccttatatagcgcgagaaccacacacacgcacactagctaatgctcgaatatcgccactgtagtagcggagacttgaattaattaaattaaacggcgatcgagttggcgacgacgtagttagaacattcgacgcagctatatcgttcgcccaactaaacaaatatacgagtatatatgcgacctaactaactaactcgatctgacggaaaacgtataatcatctgaaactagctagctaatcagatgggtcatggggggtgagtgtccgatcggagggtgcgcgctagctaatcatcgagctgggacgacgctgtataggtagacgcgacgacttgacttggttctttggttgacgtcgatatatcgatccagatctgagcccgcttccagtagcgtgcatggctagctgcagcagcagctcagtttaacggcgagctagcacaagccacaagctttgcagatttaccgataccgttattattattcctaccagagatatacagatactggattttcatcctctcaagggacaccctcgtattttacatgttatctaaatagttatttaaattttttaaaaatcaataagatagattaatataagatatagaacccaacgcacggagacaaggttaaattcaagttctacaatctgtaacaaaaagaacaaattgatctgaaattaagagtgaaactagtatacatgtattcacaattatatattgttgttgttttataacttgtgcatgtctttaaaataatagcatattttgtagagtggtttatgttatattaatctaactcatatatttttttcaattttttaataatgatttggatgatatcggtataagaactagaggataaacaattttccattagagctaaactttctactactaaattttccatctgatttggcaacgatagatactactgccaggactgccctaaaccaacagcagctaggaacacaagtacccctaataaaagagtgcatcggagaaaaatatatagcgcaaatcgcatatatagagtaaatctagaagctatcataaagatgactataaacgtctgagattttttcacgtcattattagtaaaactgttgacgtgaacaaatctcaggcgttcattttttttatacaatggtagtttctagagttatactatatacattatttgcactacatatttttccatatcaattgacatatgttatagtattacacaactatgtagaaaacactttatatcatataaaatatgtcatcgatattgcacttgaagctttatgggccttcagctactgccttcgcagctgcgccacagccgacataaacagtgccgcactcactatgcgcagccacagctgtagctgttgcagccgacctgcctatgtgaaaagcacaataaaagatcagttgttgtcaattaattggcatatgtcatactcctatcacacgattatgctcaaccaataatgatatagatactactgctaggaatatccccaccgaacacgtacaacagtacgttggcagtaaaaacattaccctataatatggtcttgctggcagcatgtgcttcgtaatcttgtttggtttgctttaatagtaaaatatacaggccgtatacaaattaatgtcggtacaaatacaagtatatatgttcagatcaactagaaatacatctgcagatatatatgttggagattttaacccttctattattttacagaaagtattcctagaaatctgaatatctgatgagtgatgatgatgaccccatctctcaaatctagagatactgccttgtaagcctttgacctgctaagatgatccatgtatatagtaggggccgaatttatacatgaataagtctctctcacaaaagtataagtctctcttataaggattaaaatttttgtgggaaggactaaactttagtcccttctttccaaacaccatctaaatgtgaggattattgtggccttgtggggcagatcgatcctttgtacagaaagtatgtacttcttgtcctgaaagaagaagagaagcccggtgaattttctccggctcatgaggaccaggaaaaccacgcctctgttaaaacacagaccagcagaagaccagctcctacaaaatcactgcataataactattgagcttcattattcaccgtatcttttttttttcaggtcataatcacaaaagttcttacgtcaatgtacagagaaacacgatatgttactgacgagtggttttttaccagatgggaggaaaatgtcctggcattttcaagacggggaccatgttgccgggtcatataggaacatggtctttgacctcgtttcttatggccatggtttagatgttttagtatcatttaagatagatggtttaaaatctcactatctcggatactccggaaatttcttttgaactatacatttgtattttgttctcaaacttggttaaattctgtttgaactgcttgaaattcaactaaaatttgtttacaactcgaatttctctctgcaggatatgattgatcaactgcctaatatgcttcattcgctccattgctgtacttaatcgctgatgatgatgaagaaactactccaaaacaaaaattacatgatggaacatgtgccattcgggctcggctggtcgcagaagaccaccggcggcggcggcccgccgtagtggtggtggtagtagggagtaggagggtagcacaccaccggcggcttgggcggctccggcttgggcggatccggcttcttgggcagatccggcttcttctccttcacctcctccacatgcacgatctccgcgtggccgatcttcttgcggaggcggttgacgacgcagaccgggtcgacgccgtcgccgaccacctgcagccggtccttgccgtcgccggtgacctccaccgagctcacgccggtcgcccccgccaccagcgccatggccttggaccggcacttcccgcacggcatgctcaccttgatcaccatcttttgctgcaaataattcatcaacaacgccaataagaaatccatcggcttcagaaaacgctcaaaaatattgcgaaaactaagctgcatggaagcaaaactcacaccttcatcgcgttctgcgtgaattaaagaggctccgtcgaattcgatcctttttcgcgaacgcgcaatacgattgcacgtctttctaattcgatcgttttgcaatgcacaatgcagatgcaaacgccgatcgaccaatgtgagctcgttcgcgatcagctgaagctagctgcgtgcgtcgcgatcgtagctaaagctgtggaggagaaagcgacgccggggagctccttatatagcgcgggaacacgcgctggcaagccgtgccgcgcggcagctaacactgctcgccaccgtactagctagcagagaggtttggcgacgacgtaattaagaacattccacgcagctaatctcccaattaaacaaacgcgcactaactcctctgacggaacgcgttggctgtgtcaggatcaaattaatgtctgaaactaatcatccatctcttggccgacgggttattcccgattggagttgctaattaatcaggcactgagagactgtgtgtgtgattgtgtacaggtggacgtacgacgacttgacttggttcttgtaatcttgttggttgacgtcgtcgtcgaggatccagatctgatgagctgcgcgagcgaaattctattaattaattgccccagtcgtggctgtgcagcggccattcagtttaacggcaagctcgagcttgctagctagcacacgcctgagctgacagcagagttcagttgtgctactgctacgagcatactatttttttaaaaaaataaaccgaaacgtgacatatctcgtacaaagatgttaatttattttaaaacgtatggagtacgactgccaggactgctgaagtgccgtttagtccaacactcctatgtcctgtttaaacaggaacttctagcagctctatagcctttttcctaaatcatctagctagattccaaaactatgtaattgtatataatccagaaaataaattaaaaggttagaatgtactttctccgttttataatgtaaattactttagcatttcccacattcatattgatgttaatgaatctagataggcatcgatatgaatgtgggaaatggtaaaatgacttacattatgaaatggagggagtaacaaatctatatttttagattacgactagttggctactcacaatctgtttctttagaatctcgaataggatcttagttgatactctactgcttaatttcattttttctataagaaaaccgtggtatcaaaaacgaaaatgtctggtatatgtcacgtggatgcgggtatcagatttgaaatacctgaaactttaattatcgaataatgtcgtctaata

SEQ ID NO: 27865 - DNA, 3938 bp, Oryza sativa
tataaataagttttggatatatttatctttaaaactaaagattagaaaaaaaaaatccagcgtactgtggacaaactatagtacggctgtcgttgcgctgtatatattcatgggtaaactgatctgcaggctgcagcaacactgcttgactggttcaggcgatgacccgtggcgtttactttccaatttcagaagtacaggcttgcttgaatattcttccgttgcaaccataaattaacccacttgatcattcatggtcgtggaatccggccgttgacctcttctgctaccttcaattcgtttggtacacagttgcgcgtagtagtactgtatcttttgaggcgcatgcaaattgatatgtgaacggctattctaaaatcgatcgagaagcttttcgagagctcaatctaaaagatgcaaattcttcgtgtggttggttacccaacaccgcagttcgactagcttaaaattgcccaatgatgctaatagtgtggatcagctagctatagctagcagaatgtcctagcagttgggtaggcaggcagcatgcatgcataggagcaggtacaatagcaaactattagccgactataaatatatttttaatgagataaaagataagagagaagagtagcgggctacagatctgtaactagcggactccaagacacagtgtgtatatatgacaggtgggactatatattgatagtatagtaagcaattattatatgaattggctactagattggttataggtgaattgcagttagtagtgggctatactattaaacttgctctaagaggctgcaaataattatccctcgtactgtactactatttgatagcaaccagcaatctactactaataagtgctaataaccattgatgggaagtgaaaaaacaaggggctggaacggctcatttttcagggtcatatgattgaattggtactcgatcgtaatgttgacactctagcaatctggcaaaggaagaaaacttccactcttgtagcattaataatcgtcaatcttcccctagcaatgtggacataagaagctgtgggatggtgtgagttaacagtcgctctcgcattcttaaatagttcaaaagtcgtcctctagaataggtcgtcgatccatttctctggaattttgtcgggttttcaactaatatatttgtgtcacatgtcagttatcttgcatatacagtacacatagatatatgtccatttcactgcattaagcagtttgtacatttggtaagtagtcgttagtagacctttttcagtttttttactcatgttaacatgtgtactccaatcacagcgtaacgaaccctggtcgtatatgctccctccttttctaaatatttaacgccgttgatctttttaaatatgtttgattattcgtcttattcaaaaacttttgtaaaatatgtaaaactacatgtatacataaaaatatatttaattatgaatgaaatgatagaaaaaattaataattacttaatttttttcataagacaaacggtcaaatatattttaaaaagtcaacggcgtcaaacatttagggatggagggagtacatatgttttgatactgacttttgtttaaatttgcataaaaaaatttgagcacaagtttctatctatcacgataacatgttaattagtcaacgttcaacacattatggaagtattgttttcaaggtagattttagtccaaaaatacctaacttctagtctagctagctacatatacatacatacacgcgctatatagacacacacgcgcgctatatggtagctccggcatgccagtctatcattgaattaatgggcgatcgatcgaagatttttatgtatctcagctcaccaactcatgcatgatccctgatctccttcgccgttcagtacagtgtatatatacgtagtacgtgcatttggcagcacctgaccgattcaaacacacatgacacatgcatgcatgtcccacggttagagcaaaggttaataatacagccgacctgttggctataaggtttttttagccttctctcagcctgcccatataatagttagttatttacaattaatacatggcccacttgtctttctcgtagagttttttagtttttgtgtccaagccggctataaatttacagcccgtttttcctctctctcctctctttcttctccacctcagcatttagccggcttataccttactattatacttgcacttagaagaagagaggcgcaggctagctggatgcccggatctttttgtcagccaaggacgaagctgcatgcaggctctggctgtcatctgtcaactcgtgtaacgtacagctagaaacaccggctgtcgaccgtgttaggtccgtgtacgtaggcctgatttagttccaattttttctttaaatttttaactttttcatcccatcaaaacttttctacacataaaattttaacttttctgtcacatcgttctaatttcaatcaaacttttaattttagcgttaactaattaaacacacccatactctcttgaactgctggtcgcggcgcctcgctagctcgatcgccccgaaccgcatgcaacgcgacgcgcgtgctgttgtgttgccggttgcccgcatcctgcattcctgcgttacgtcctgcagattttcttcattgtcatgctatacgtccgtccgggatcggagcgcgactatgctagcacgcgcgcgtaggctagggcaggcgaggctaggcatgcgtgcgcgcaacttggcaatttgccgtgggcgaaaggcccgcgaacaacgcctatggccgcgacccgcgaatccgcgcgccgccgcccgcgcgcggatggtgggacgtcggacggtcggtcgcgcgcgcgagtactcgtacgtgtatgtgcggccgatggccgggcttggaatttcatcacgcacacccagccgcacacgtacgactacgaggggggttaggtttgttacgcacgctagctactacatactactatacatacctcgtcgtcgtcgtcgtcactgtcgcagtctcacagagggtaccaacatatgcatggagggaaggcagggagaagccgtcgtccgtgccggactcccggttggaggcacgtacatcagcttagctagtagctagctagccgtgtttttctgacgatggattgcggcgttcaaggcgttgtgttgcttccgttccgtatgtagtaaactaatgacgcgccccgtacgtacgttgcgaccgtgcaagttgggagagactaacacatactctccccatgcatgaacacagattagttggagaggtgtggcatgcagaaaccggggcaacagggaaccgtgcctaaccccctaccatgatatatcctcggcacatttctttcttcgaaaacacatcctctatcggaacatttgcattgtgttgtagagctagctctgcaacaaccaacaagttgttgtgaggggaacaaattaaaaagcgtacgtgtacagtaaaactttatgatatatacaagagaggggtggtttgcctaactagctctagggccgtaccctatatatgctgctagctatatagaccgacgtcgtgtgatattatgtaggccggccggttgttttgattttaatattcgtgtgagatcatattctacaaaacagcaaattgttaatactagctttaagctaggttttagtatcacaattaaacctggcactcgaagctggtttaggtaaaaacacttccactcagaaatggcattaactaattaattccatttctaggtcttgcacgttgtgtttttctgcagtgtaattctcacctcaatatcataaattcatgaaatccttgagtttatgtcttcaatccgctaggctaattatgtgtcattgtttaaagacgtcttaggaggttacacgttgttg

SEQ ID NO: 27866 - DNA, 7925 bp, Oryza sativa
ctctgaagctactatagtttttttgccaacgtgtggagccgatgttctctcctgtttcctgtccaagccaataagactgaagatggcatatttagagggtgtttagatccaggggtgtaaagttttggcgtgtcacatagggtattatatagggtgtcgcatggggtgttcgggcactaataaaaaaaactaattacagaatccgttagtaaaccgcgagacgaatttattaagcctaattaatctgtcattagcaaatgtttactgtagcaccacattgtcaaatatggagcaattaggcttaaaagattcgtctcgcaaattagtcacaatctgtgcgattagttatttttagcctatatttaatacttcatgcaggtgttcaaacattcgatgtgacatggtgaaaagttttggggtgggatctaaacaggccttacacaatcgtcatgtcatgttgaagtggccagagaaaagccctctgggcccaatggtcatagttgtgcgtgttccttttctagttcaagttgagaaaatttgacgatgtcgtacttagacgagttatgccatatttgaggtagtcagagacaaaaccaagctagccaaatgggcgtgcctgtgtgtatatatcatgcccatgtggatggtctcgtagaaacatatgtaatgaaaacctgaaaagttttataggaggtaaaaatttaactcatgataacgcgaataaatctcatacttatgttttctcatcttacaatagtttcagattttcattatatattttctgcatgttcaatgccaatatgtgaatttttttcccctcagtccaacctgagaagactcgatgatatcacatttagactatgacggagcgtggggctcctcaccgggagaccgcgcaggcccccctttgccggttcggccgggggctcagggagagattctaagcactctgtatgtggaaggctcgcgagacaggaaacacacaagacacgggcgatgtatacaggttcgggccgctgagaagcgtaataccctactcctgtgttttgggagatctgtgtatgaaggagctacaaagtatcagccagcctctcccttgttttgggtttctaatctggaaaagtccagtcccccatctaagtgggcaaggtcctccttttatatcttaaggggataccacatgcaccatttctctcttttttgtggggacttaccccaccttttcataaatggacggagatttgtatagttgtcgtccgagtcaccatctgatgagacggctcacaactacctccactttcgccgggagctggtgcgacgtggaatcgtggctgtctgctgacgacatgaccggtatcagaccagtcacgtcggtcattcttgtccaccacgtgtcagcttagcattctacatgctcccccttcttcacacaacatcttgcctgtaatggttaggatgaagcctggcatatatctgaccagatgactaacgtgccatctctgggaggcaacacgctagctccagctggggacgagcgcctagaagccctcgtcctgacgggatggggcgaggcgtgcgtcagatcgcctgtcgccacctaacccgcgatctgaccggtctgtgactggtcatagaccggataaacgagtgcactgcactgcgttacatgcggcgtgacacgctcagtcaaaccgcaataaatgtagttaggtgagccccactgtgctcacctaacccatacacgcggagcaaaaacccacgaggggtcggggcgcctcggccctcggggccgaggggggtgcggcccgaccccctcggggggactaagaggagggcgaacgcatcaccctcaggcccaacgtccctcgggggtaccaggccacgtgtgcgattgtgtctgcctcaaacctctagtcatgatactcctgatcccatgtcaccgacagtagcccccggcgttatgccagggcgatcgccttctttaagggaaacggtcgggcgtgacgccactcctaagacctggtgacaggtgggaccggtctccacaattgggcagaaacccaacggtcacaaaccacgcacatcggcaatggtaactcggctgtcaacaatgagcggtctcttcaagactgccacattacttgagtagcacacgaatctggacatggcgattcgtttcgtctgaagatatggtaacgtcgcttcggtcggcgagcgtaattaacgcgcgcacgatatgatctatctcgactgccacaaccgcatacccacctcatgcgccgcacgcgggcgaatgggattagtggaagcgtgggcgcgagaaacgagggggcgaaatagtgggcgcgagaagcgaggagccgggcacagcgttggcaagagtataaaggcactgaggaagggatctgtttccttcctttcgccattattccccttgtcttcgccgcttgcgccctaactccttctttcctgtgccctaccttcgccacacgcgctcgctcttaatcttctcttcctccggcgccatggcacggggttccgctctgctcgatggtagcgtgctgccgccttcccggatcgtgagcgagaggcaggctgggctgccgcgccgcttcatgccggagtctgccaccggccgggagatagtcacgctgggcgagggacgcccggcgccagactacccggggcggtccgtcttctttctcccctttgcaatggcagggctggttccaccattttcttctttcttcatggatgttctggagttctacgatctccagatggcgcacctcacccccaacgcggtgatgacattggccatcttcgcgcatctgtgcgagatgttcattggggtgcgcccatctcttcggctgttccggtggttcttcaccgtgcagtcggtgtcgccgccatcggtagtcggtggctgctacttccagccacgggggccggtgctgaaccgctacatcccctgcgccctccgcaagaagtgggacgactggaagagcgactggttctacactcccctcgccgacgaagcgcgccttcgacttccgagccagcccccggcgcaggcctccagctggcgggcgccggtagatctgggggatggctatgacgccgtcctcgaccgcctggcgggcctgcgatcccaggggctcacaggggccatggtgtacggtgactacctccgtcgtcggattgcgccgctccagcgacgcgctcggggcgcctgggagtacaccgggtccgaagacttcacgaggacccaccagggagtgagatgggactgggctcctgaggacttcaagatattggtccaacgggtgctgaatctcaactccgtagaggcggccctcattccccaagaaatcctccccctctgcagtgatccagaccgcgcctccatcctgaccattatgatggcggtcggggcctcagaggagcgagctccaaagggccacgacggcgcaggcgggagccgcaggggggaacaatctaccccgagagggggtcgtgcttctgggtcccgtgacaggggtccggggagcagccgccctgccgacgcccgggggaagaggaagcagggaggaacacctcccccatctcctccccgagggggcggggcggcgcgtgccagcagcaggcgcccggagggggccgcgccaacatcgcagcccgagggggagcgcaagaagaagcggccccgcaagatgggggagacagaaccatctcggggaaacctcatttcccctccaaagtggtcgtttaaccgaccccctcgcaggttcgtctctcacccatcgtggctgtattcattctctcaacgcgagttttcactcacccatcttgttcgtcttctggttttttcttttgtttcagcgagatcccgtcgcgtccctcccgccattccaagtccggccagtctgaggccgaggatccggcggccgcagaggccctcaggcgggaatctgaccggcgagaggccgcagatcgcctacgggaagccgaggaggccgcccaggaggccgcccgggctcgccaggccgaggaaaccgctcgggaggaggccacccgggcccgccaggccggggaagccgctcgggaggaagtcggatttcgccaggacgaggcgatggcgacttccgaggcagctcgcgacgaggccgcgagcgcgtcgcttgggcccactccctcgggcgacgctcaggcgacaacttctggggcagctggcgacgaggctgcgggcgcgtcgcttgggcccactccctcgggcgacgctcaggaccaaccgggtccgggggacatccccgagtccggcacttccattggcggcccgagccgcgtggcatcctctccaaggcggctcttccccacgccttctatcgccccactgaacgcagagccccttctgcaggccttggccgccgcaaacaccacggtgttggatgggttaagtgcccaggtggaggtcctgcaggcagagcgggcggagctcgacgccgcgtgggcgcgtgtcgaagaggggcgacactcggtggaggccatggtggaggtgggccgtaaggctcaccgccggcacgtctcggagcttgaaactcgtaagaaggtgctggcggagatcgccaaggaagtggaggaggagcggggggctgccctcattgccaccaccgtgatgaacgaggcgcaggacaccctccgccttcaatacgggagctgggaggcggagctaaggaagaagctcgacgccgcccagggggtgcttgacgctgccgctgcccgagaacagcgggcggcggagaccgaagcggcgtcccggcagcgtgaagaggcccttgaggcgcgcgccatggcgctggaagagcgcgcctgcgtcgtggagagggatctggcggaccgcgaggccgccgtcaccatccgggaagcaacgctggcggcgcacgaggctgcttgcgccgaagaagagttcacgctccgcctccgcgaggacgcgctcaccgagcaggagcgagctctcgagggggccgaggccgcggcgcaacagctggcggttagcctgtccctccgcgaggcagcgcaggaggagcaggcacgccgcaatctggaaggtgcccgcgccgagagggccgtactgaaccaacgggccgctgagctcgaggcgcgggcgaaggagctggacgcgagggcgcgcagcggcagggcggccacgggcgaaagcgacttagccacccgcctcgcagctgccgaacgcaccatcgccgatctgcagggcgcgctggactcgtccgccggggaggtcgaagccctccgcttggcaggcgaggtagggcccggcatgctttgggacgccgtctcccgcctagattgcgccggtcggcaagtgggcctctggagagggcggaccgtaaagtacgccgacaaccagggaggcctcgcccagcgcctctcgaagatggccggggctctccaacggctccccgaggagctcgagaagacaattaagtcatcctcgagggacctcgcctaaggagcggtggagctcgtcccggcgagttaccaggccagggaccccaatttctctccatggatggcgctggatgagttccctcctgggaccgaggaccgcgcgcgcgcgcaggtccgggatgccgccgaccatatcgtcgacagcttcgagggctcggcccctcggcttgcgttcgtccccaactccgacgaggagagcaatgccggtggtgcagacgacagtgacgtcgaggcaggcgatccgggcgcatcggattgagcccccagacccccgccattcttcaattttttcttcttttctttcttctaaggcctttgggcctcttttttgtatagatcaacttaatctgtaatcaaaaatgaagaaatttttgtgttaatttcatcttgctgtgagtatgagatgaggatgatctgtgccgtggtccttttgtgtcttagcttgaataagggcttgtgcccaggttctggtcctcaaaaggcgcgggtcggggctagtgcctggggagattcacatgtcgagactggccaggccgggaacgtggtgaccgagggttatgggtgacccgattgtgggtttttgccgattccccccggagttcaccacgcctcggggcacggctcggttctgggccccgtttggcgattttagccgacccgagcccccgagggcaggactgagcacgagtgacctacttcaaatcaagattcttcaaaaggaaaaaacagcacagatacagcctttaggaaatgaaattgaaactgcttttattgaaatacagatgtaagagaaataagaatatgcatatgtggtagcccccggccaaccctgcacgcccgaggggggtgcggggttggcccgagcccaaaacctgacacccgatcccccctttaggggtagaagcgacgaaggtgttcgatgttccacgggttaggcaactctgtgccgtcacccgtggccagccgaaaggagcccggccgggggacgccgatcactcgatacggaccctcccacattggtgagagcttgctcaatccagcacgcgtttgaacgcggcgtaggacgaggtcgtcgacgcagagtgatcgggcccggacgtggtgctgatggtagcgccgcaggctctgctggtagcgcgcggctcggagggccgcgcgccgccttcgctcttccaagtagtcgaggtcatctctgcgaagctgattttgatcagcctcgcaatacatggtagcccgaggagacctcagggtgagctcggatgggagaaccgcttccgcgccgtagacgaggaagaaaggcgtttccccggttgctcggcttggtgtagttcgatttgcccagagcaccgctggcaactcctcgatccatgaattgccgtgcttcttgagtatgttgaaggtcttggttttaaggcctttgaggatttccgcattggcgcgctccacttggccattgcttctggggtgggcaggtgaggcgaagcagagcttgatgcccatgtcttcgcagtagtcgccgaagagttcactagtgaattgggtgccattatccgtaataatacggttaggcactccaaaccgggccgtgatgcccttaatgaatttaagtgcggagtgcttatcgatcttgacgaccggataagcctcgagccacttagtgaacctgtcgatcgcgacatacagatactcaaacccgcccggggcccgcctaaacggtcccaggatatcgagtccccagacagcaaatggccacgaaagtggtatggtctgcagggcctgggccggctgatggatttgcttggcgtggaattgacacgctctacatcgccggaccaggtcgaccgcatcattaagagctgtcggccaatagaaaccctggcgaaaagctttaccaaccaaggtgcgcgaggcggagtgggctccgcattcgccttcatggatatcggcaagaagcacaacaccttgttcccgaggaatgcacttcaggaggattccattagccgcgcgccgatagagggtcccttctaccagcacgtagcgtttggagatgcgatggacgcgttcactcccttcgcggtcctcgggtagagtcttatctgtgaggtatgcttggatctcggcgatccaagcaatcaatctaagggagttgggagcactcccctcgggtcccgaggcctggactccgacaggcctcgggggccggtcaggcgcatccgtctcccctaaggggtcgggtcgcgccgacggctgggcaagcctttcttcaaaggcgcccggtggggtctgggctcgcgaggacgcgagccgtgagagttcgtcggcaatcatgttatcccgtctgggcacatgccgaagctcaatcccgtcaaaatggcgctccatacgccatacttggcgta

SEQ ID NO: 27867 - DNA, 1547 bp, Oryza sativa
cgcatccgtctcccctaaggggtcgggtcgcgccgacggctgggcaagcctttcttcaaaggcgcccggtggggtctgggctcgcgaggacgcgagccgtgagagttcgtcggcaatcatgttatcccgtctgggcacatgccgaagctcaatcccgtcaaaatggcgctccatacgccatacttggcgcacgtaggcgtccatctgcgggtcagagcaccggtactccttacagacttggttaacgaccagctgggagtcgcctaacaccaggaggcggcggatccccagtccagctgccactctgagtccggcaaggagtccctcgtattctgccatattattggtcgctcgaaagtcgaggcggaccaagtatctgaggacgtctccgctcggagaggtcaacgtgacccccgcaccggcgccctgaagagacagggagccgtcgaactgcatcacccagtgggcggtatgaggcagctgcgaggggtccgtgctggcctcggggatcgagacgggctcgggagccggggtccactctgccacaaaatcggcgagggcctggctcttgatagcgtggcgtggttcaaagtgcaaatcgaactcagaaagttcgattgcccatttcaccacccgtcctgtaccctctcgattatgcaagatttgaccgagggggtaagacgtaactacagtgacccgatgcgcctggaaataatggcgcagtttcctcgaggccatcagaatagcgtaaagcatcttctgggcctgagggtatcgggttttggcgtcccggagggcctcactaacaaagtagacgggccgctgcacctttcggtggggccgatcctctttgctaggggccgcatccctggggcactcttcgtccaagcagcctcgcggggcgcacttgtcttctgtgccgacgacctcggggtcggaggacgacaggggcggccttcccacagtggcctcggggccgtcctgggggtcgggggctcctggcgtcgtcggacaagcgggtaaagggccaactccggtcgtcaggggccttaggcctccgttcggctcgggggcctcttctccctgctctttcccgggtcgggtcagcacagggttagcctcggggtcgaagggcgataggtgcggccttcccacagtggcctcagggccttcctgggggtcgggggctcctagcaccgtctgacaagcgggcagagggccaactccggtcgtcgggggccttgggccaccgttcggctcgggagcctctcctccctgctctctcccgggccaagtcggcacagggtggggaagcgtgaaatgagagttgttctcatcgcgctccacaaccaatgccgcactaactacttgcggggtcgccgctaagtagagtaacaagggctcgtctggctccggggcgaccagaactgggggagagcttagatacgccttcaactgggtgagggcattttcggcttcctccgtccaggtaaacggtccggagcgtttgagaagcttaaataagggtaacgccttctctcccagcc

SEQ ID NO: 27868 - DNA, 2590 bp, Oryza sativa
gaggacacgccccaacttcacgttgcaaacggtgggagaaaccaccatcgcaatctgccctccccgggcaacgcacggtgggtggtcggtctggtcgaaggtgagggcaacctccgaccaccgcgcccgacacgtcgcctcatgagtaggggccgcggccagaagctctcgcttcatggccttgaagctccggcgagaaacgtgagcacacgctcccccatcgacggtggcaatggtggccccaggctcttggaaacctaggccatcatcgccgtcatcgatgtcctcggcgggggccttctgcttggcctcacttcgccgattaccggtaggaaccgcccgggatttgccctctcggcgctcctgcctcctctcctcctcccacttcctcgtccgctcagccaaacttttgactgcacggcagtccgcgaggtcgtgaagggaagtgttgtggacggtgcaccacttgccggttgggcgctccctgttgggagcgccggcctcgttctttttgcctcccgcaggcctcccctttcgggtggcccgcgaagcgccctcgacggcgaggacatgaccctcgtcgtcggtatgggctgacctcttcttcctcctcctgtcacgccgccctatctgagcggcggatccgggggcggccgaagctgccacaccggaaccggaggggttccaggtccatgcctcctccttacgagccactcggtccgcgagctgaaaaagctccgcggtagtctggggctccttggaggcgatcttttcaagcatgcggttgtgccgcacaccccccctgaacgcgtaaatcaccgcgtgcgcagggatgcatggtatggtgttgcggacttgacagaaccgctgaatgtacgagcaaagtgactcatcatcccttcgctgtactgcgtgcaagtccgcttcctcacctgggcgcggatatgtgccttggaagttcatggtgaactgttggcacaaatcctcccaagagtggacagacgcgggtggcaagttcattagccaaccccgcgcttgtcctttcagggccatgggaaagaaattcgccatgaccctgtcgtcacccccggcggcctcgatcccggtcgtgtagacctggagaaactcggcggggttgacgctcccgtcatatttttcggcgatggtgggccggaaccttgggggccaacggacattccgaaggctcgccacaaaggctctacagccgacaccaccaaccgggggcacggagggctgatccccgcgtccgtggtgaggtgacactccggacgaggaggcgccctccgttgcgtggggagcacgtcggccattacgccggcgctcgatactgatgcgagcatccggttccccacgcagatcttcccgggtcggaggcgttgacgaaggagtagcggccgaatggcgaacagcggctgccgctcgccgcgccctccgtcttgacgatgcggagccggtggtagcagcaccagaggccttggtggcggagaactgcccaccagcatctaggcgctgccgtgcagtcatgaccaatttggccacatcgtccagccaacgttgggctggagactccgggtcatgggcgacgggcgggtgacgtaggagcgcgcccgcagcttggagcgcgccctggggcgtgctgccgtcgccgtagacgaggaggcgacgctccccatctcgccgcccttctctacctcctgtgggtgtcgaagtcgcggatccttcggccctctcgagcgccttctcccgcctaggactttggcgtggagggggcggtggagtacgagctcgacggcgtgggtttggctccccgtcgtcaccgctcatactcggggagaggtcgtgtgcctttgctggctcggccattgggctgaacaggaaaagcttggcgcacacgaaagagtgcgagagctcagaaaatccctcgcagagcccctacctggcgcgccagatgacggagcgtggggctcctcaccgggagaccgcgcaggccccccttagccggttcggccgggggctcagggagagattctaagcactctgtatgtggaaggctcgcgagacaggaaacacacaagacacgggcgatgtatacaggttcgggccgctgagaagcgtaataccctactcctgtgttttgggagatctgtgtatgaaggagctacaaagtatcagccagcctctcccttgttttgggtttctaatctggaaaagtccagtcccccatctaagtgggcaaggtcctccttttatatcttaaggggataccacatgcaccatttctctcttttttgtggggacttaccccaccttttcataaatggacggagatttgtatagttgtcgtccgagtcaccatctgatgagacggctcacaactacctccactttcgccgggagctggtgcgacgtggaatcgtggctgtctgctgacgacatgaccggtatcagaccagtcacgtcggtcattcttgtccaccacgtgtcagcttagcattctacatgctcgccattctacacacaacatcttgcctgtaatggttaggatgaagcttggcatatatctgaccag

SEQ ID NO: 27869 - DNA, 1671 bp, Oryza sativa
ggggggactaagaggagggcgaacgcatcaccctcgggccggacgtccttcgggggtaccaggcaacgtgtgcgattgtgtctgccttaaacctctagtcatgatactcctgatcccatgtcaccgacagactatcatgccatgttcaggtggaaaaaaataaacatttttggctctagctgtttctcattcatcttcctctcgagagcgcaattgaattttgtatctggtttcctgtcttgaatcttttccttggttccttcctagttcctagaatccacaagcacctttgattttttttttctccctcgcagtaaaatgactgttgatgacattagccacaccacaaattaaatctaagtgaaaattaccgaaggaggaaaatatagtctttctagaatgatggtgttcatctcacacagatgtgattggtacatttgttgattttgcagaacatgatcataagacccagaagaaagttcttccattgtcataagctagggcatgacacgcacgtctcaacttgcgcgacaatggcacagtcgaaccatccacatcagcactgcttaacgaaagcagcaggccagcagccggttaatttctcgctgactcgcagtcaacgctgagtttctcgtcaactaattggacgttggctcgatcaaggcgattggaatgggcccaaaacgagagtgaaattattcgatcaccacaattcaagtccaacgagtaagtctcatttttgccaacagttttggcccaaaaactaattttcagcagaccatggaacaaaccctagagtgacatatgaacgctaactgagagaaggcctctcaactcaagtgattatgaacagtgaaaggaatcagctattgaaattttacagaaaagaatcctttacatcgttttacattttgacgctataaatcacaagtcctcgtgccattcagactcttcctcagttgctctatgatccatctagagatgaaaaacagatggtgaataaactcaatccggaatgggcggcaaacgagatcctatttgtcagggagcaggacaagccatttctctcttcttcttttcttccccattctcagccagttcatcactcatgtgcctttgttctaacctcttcaccattcttgctatcaatgttctatacttctacaatctaactgtctaaggccactcaccagaagtcaccgcaagaacaagtgcctccactgaaatgatggaatctgttggcgtctcggaccacaatttccctttcaaatagcttggacactagcttggtgaactcatggcaatcgccgcaaactctgaggttcttggcaatccttagaggtgtacctgaggcagtgctgatcaaaccaaacgatatcgcaagcctctcgctgtgcctatgcagcaaatctatcttctcttcttcgctcacatcatgcagaacaaaactagtatcctcgacatactgaccttctcttctcagtttttcagttatctcggcaagtttgagatgaatagcctgtgagtctctgtgagagtgatctcttgcagtgaaagtgtggacagtgtttcctatctcaatccagctgcatgctgggtcttttctcaaaccctgttctgtcatcttggttctaatctccttgacattattccacttgcccatttcggcga

SEQ ID NO: 27870 - DNA, 674 bp, Oryza sativa
tgcgtgaacctccctgccattgattaacctacccaaatgacccactgcagacaataagctcacaatgcaagcatgatcaggattgaaaccattctgtaccatttcgccaaaaaaatcgatggcctcagcatatagcctattttggacataacaggagagcattgagttccatgatatgtagtccttgtcaccaatctcacggaatactctgagagcgctatccacccaaccgcatcttgcatacatgacaagcaaggcattgcattggatattgaactcggtaccgcatttcagaagcgctgcatgtagctcccttccatggttcagctgagcaagctctgcacagacctgtagcacaccaacggttgtgtaagaattcatactgaagccgtcgctctgcatccgtcggaacaggtcgagagcctccaagaacatcccgttctgcacgcagcctgatatagccgagttccatgaggccacatccctcccgtcgcgcatccactcgaacacccgcagcgccgaatccaagaggccgcacttggcgtacatcccgacgagcgcattggccacgagcgtgctccggtcgagggcgctctttaccgccagcccgtgcaccttgctcccgaaccttccgtcccccttcgggccggacgccttgagcacggacgcgagcg

SEQ ID NO: 27871 - DNA, 1094 bp, Oryza sativa
tcatcaaaaactttgagagcgtagttcatgcttccacaaccagaatacatgtccacaagggagctaaccacagcaccttccacgggaaatttacctctgataaggaaaccatgaatttcctttccttttgtcaaggatgacaatccagcaattgctcccagaataccaactagtgctacagaatcgggttggatgcctgcattcagcatcttgccaaacaaggcaacagcttcatgtaacagcccattctccgcaaaacagtttaccatactagtccaggtaacaatgtcctttttgtctaacatttcaaatatattaagcgcatagcaaacccctccacactctccatatatatctatgattctattcttcagtatcaagtcaagcaagccatttctaatagcataagagtgcacttgctttaacagtgagatgcttttcaaaccactgcatgcttccaaaatgcttcccatcatcataggatccaccttaatgccctctttctgtgctgttctaaactttccgattgcctcagaataccgagaactttgcgcgtaacaggcaatgattgttgtccatgacacatggtccttaatcctcatcctgtcaaatacacgggcggagcactccacggagtagcactttatgtacatgtccatcaatgtattagctatctgcaaatcactatcaagcctttgcttaacagcatatgcgtgaacctccctgccattgattaacctacccaaatgacccactgcagacaataagctcacaatgcaagcatgatcaggattgaaaccattctgtaccatttcgccaaaaaaatcgatggcctcagcatatagcctattttggacataacaggagagcattgagttccatgatatgtagtccttgtcaccaatctcacggaatactctgagagcgctatccacccaaccgcatcttgcatacatgacaagcaaggcattgcattggatattgaactcggtaccgcatttcagaagcgctggatgtagctccctttcatggttcaactgagcaagccttgcacagacctgtagcacaccaacggttgtgtaaaaattcatact

SEQ ID NO: 27872 - DNA, 8169 bp, Oryza sativa
atagccgagttccatgaggccacatccctcccgtcgcgcatccactcgaacacccgcagcgccgaatccaagaggccgcacttggcgtacatcccgacgagcgcattggccacgagcgtgctccggtcgaggccgctcttcaccgccagcccgtgcacctcgctcccgcacctcccgtccccctccgcgccgcacgccttgagcacggacgcgagcgtgcacccgtcgggcgccgcccccgccacgggctccgacgcccgcatcgcccggtagacgcccacggcctcgccggcgcccccggacgacaggcacgccccgatgagcgcgttccatgagaagacggtccgggcgggcatcccgtcgaacaggcggtgggcatccgggaggcgcccgcacttgccgtacatgaacagcagcttggtcgcgaggaaccccgcgtcatcatcgcccagggcgcccgtggccaccgcgtgcgcgtgcaactgcctgccctccgagacggccctcctgacggcgacgaggtcgaggacccagccatagtggtccgtgggaggaggggcgcgcccgcgcgccgagcgggcggcgagctggcggagggcctcccgcaggtcgccgtccttgcagagctgcctcagggaggcgccggcgctggcaggcgggagcttccggcgaggggttgggtggaaggggagcgcggcggtggtggccatggaggctcgtggtcgtgggagccgaacgctcatgtcagcgccatggcgaagcaggagaagaggaaaacggattgggatttgggggagaatggattcaggtcgcccgagcaggctgggaagtgggaatgggtagcccatttaagcctctctaaggcctcgtatggataggccacaatagcagcccaactacataggtggaccaagattttttactaaggaaaaaagtacaccgaatgtccatcaacttgtcatcgagataccaaatcgtcccccagccacaaaaccggatacaacacatccttcaacttataaaaccagtgcaaactaggtccctcagcagttttaaatccgattttgtccgacatgacggctgagtcagcgagggacccacgtgggccctacatgtcaggatgccacgtcggcagaccagcctccccctccaccggcgccgtcgacgagccatgccgctgcggaaacgcccaccgcctccggccaaggctccagaagccccatcagaaaccaagcccaagatctcgtagcccactagacccagcgccgcggcggtggcgccgcctccgccgatggttctcccggacagtgtcctcgccgccatgtcacaccatgaggggggatctacaaagctcgtgttcgcgggaggggacaagggcatgtcgcagatgaagttccggatcaagaccggatgctgatgagcaccctcaccaagcacctacgaggcctcacctccaagggtgtcctcaaggtggtcaacagagtccacaagcgtgccgagaagatctacatggacgcccgcatcgacccgtcgccggagatcactagggaacctggtaccgcaacggccagctcgactccgacgccgtcacctccgcacagcgtaggtgcctcgagcagatcgacaggcttggcgtcgccacgacagagtccatcttcgacggcatcagcagggattaccctagcctagcctactcaaccgagcaggtcagggacatcccacctcgtcgttgcctcctcgccggtgaagagtcgaaggaaatagaagtagagaggggagaggtggacgccgccctgctgcacgccgctgccctgccgctcctgctcgcccgtcgtcgtcctcgccgcgtcgtttccccatccgccacaccgcgccgcttccccgctgcgcagctccacccctcaagcccatctcctcaaccgctggccactgcccatctcctccccgtgcctctgccgccacccaactccaaggcttcccccaccggcgtcgcggccctcgcacggccgccgcggagctttgccaagctaccactgttgccagccgccatcgtggcgccaccctcctcctctcccgcctcgccccaccaaccggcctacaggcaaagagagagagaaagagagaggaggaaccgagggagagaaggagggagagatgattcagcctgacatgtgggtcccacgctgactcagttgccacgttggacaaaaccagggtcaaaaccaccaaagaaccaatgtgaccgattttgattagttaagagacatcagatatctggttttgcgattttgtggatgattttgtaactcgttaacaagttgagggacctttggtgtactttttccttttactaaatcccggcctatcgacgtctattggccgggaatgaggcccatcaaacaatgacaaacactctactactcccttcattccaaattatacagctaaatttcttatattttagttggatataacacatcttactactacgaatatttacaccagactaaaatttttatattttgggataagaggaatacgtaatattttgttcgtttcataaaatatgaaaatagtacgaaacgggacatcttccagtactataaatctgaattggtttgttttcatgaacggagggagtagatgattactatttgatcatgtagttttgagtggtttgctcacgtcgcgtggcgatttgccattgttgttatcgaactaatccattagttttctccttaatactgtttacgtggccatctttttggtcgcaacagatgacgccgacgagtatatgacttgccctttgacacgccgcctcctcccccttcattttctcgaagcgcttcccttcccttcgcttccccgcacaatctacaaacgcgccacccgtcgctcataaacccctctccctctctctctggccgacacatggaccccaccgtttccaactccggcgacgccaacggcggcgcggccgccgacgccaccgccccgtccaacaccaccgtcaccctcccgccgctcaccctccgagacgtgcccctgctcccgtcggcggcggcggcgaccgacacgatccccaacccgatctcccgccacccctacttccacccgccggccaccttctacatctccccgggtgacgtctccctccgccacgccttcttcgacctcgcctccgcgtcgccgtccccgctcgtcgcctaccgccgcgcggggccgcgcgcgggggtcgccgtggaccccgcccgcgcgcgcgccgcggtcgtcacctgcggggggctctgcccgggcctcaacaccgtcctcagggagctcgtcgtcggcctccgggagctctacggcgtccgcgacgtcttcggcgtcgccgccggctaccgcgggttctacggccccgacgccgaccacgcccgcctggacctggccgccgtcgacgactggcacaagaagggcggcaccgtgctcaagaccacccgtggtggctttgatctcaacaagatcgttgacggcatcgtcgcgcgcgggtatacgcaggtgagagcaaacccctaccgtttttagagttttcaggttttatgtatttttttggcaaatagctaaagtttaaactgatctcacaaatcatgtgcacgtggaaacccctaagcttctttttacgccaagctggcaaatgaaagctggccaattttgttaagattagaagcacaagaaacatgttacaggtatttgcaagtgtacaatgtgtcatctgaattggcaaggatactatcttggtgctacaaatttgctttagacattttagtatgttggtgtacaatcatgggggttgttctgaattgacatggagtagtacttattatgttaggtgtcattatggaagaattatctcaaagaatttgtctgtccagaatttttctttgtcagtagagtttctttttccaccgggctctttgtcggttagagtggtcaagtactcaagtggttgaagtcttactgatttgatcgatcagcgttgagtcgtcttgctagttcaacatgctaatttgtttcagttattgcttgtattttggcttattaaagtgtctgacctcaaacactttttatcatgactatatcttgctgaaggtttatgcaattggaggggatggaacaatgagaggagctgtggccatcttcaacgagtttaagcgccgtggtttgaacatttctattacagggatcccgaaaactgtggacaatgatatcggcatcatagacaggtcatttgggttccaaaccgcagtggagattgctcagcaggcaatcgacgcagcacatgtcgaggctgtgagcgccgtgaatggcattggacttgtcaaacttatgggcaggagcacaggccacattgctcttcatgccaccctgagcagccgcgatgttgactgctgtttgattcctgaggttgatttctatcttgaaggaaaggggggcctgtttgagttcttgtatgaaaggataaaacagaagggacatgctgttgtcgttgttgctgaaggtgctggtcaggaattgattccaaggactgacgatcaaaagcgggagcaggacgagtccggcaacattgtgttccttgatgtgggtccctggttaaaatctgagctgggtaaatggtggaagagagaacacccaagcgagttgttcactgtgaagtatatcgatcccacttacatgatacgagctgttccagcaaatgccactgacaatctgtactgtacattgttggcacattcggcgatccatgggatcatggctgggtacactggcttcgtccctggcccgattaatggaaactatagctacataccgctggaagatgttgctgtggcgaagaacccggtggatgtgaatgatcacaaatgggcatgggttagatcagtcacaaaccaaccagatttcatgaagccaaaatactaagaccaaaagtgctgttactggacatggttgtatgactttttctccctggagccttgacacgttaagcttgatttctttctatccagtttcttctcttgttatgccgatctatctataagatgttaggtattctgatctccctggtttgtgtttgtgtgcacttgaaatcgtgttagcaggtattgctgtaaatctgtagtacataaataaatgaagtggcaggaaatgttgttctccattggcgaatgagttatatgtcgtgtcatgtaaatattgcttatcttgaagacttaattggcgattctgcgctaatctctcgcttaaagaatcagaacattataacgtgaaatattatagcagacatatccaaataaattggcctattagctcagctggttagagcgtcgtgctaataacgcgaaggtcgcaggttcgagacctgcatgggccattattttttttttctttttccttgcaatcgtgattcttttttttttccctttttttgcctgaacaatgttatgttattgtgtgtacgtgccaagatcaaattgcgattcctgagtcctgaacaagtgataaaattgtgtttgtgtatgtgtgtctactgtcaagatcaaattcctgatgatcaaaattgcaatcctgagtcctgaacaatgtgatacaattttgtatgtgcgtatgtttttcaagatcaaatccccgaagatcaaaattgcagtcctcattcctgaacaatgcgatgctatgttccacataatcccaagttccgacaaactttatgccctatacaaattacacaggaatataggcgcaaaaaagaaaacacagcaacacgactgcaaaaactgaggattactccaccaaacatagaaaattttggtaaaaaataaacatagaaaattctggtaaaaaataaacatagaaaattctggtaaaaaataaacatcgaaaattttggtaaaaaaaacatagaaaaatcatattatgatctttctctttctttcttttttataccttttttctctttaacttatcctctccagtaaacctctcatactatgatctctctccccttccccttctcacgttgagctcgagcggcgggcatggcgggcggcggtgtcgcgcgggggtgtgcagatgatcctgcgggcgccgctagaggcgggaccgccgccggcgttgggccgggcgcaacggcgggagagtcgacgccgcggtggattggatacggggacgacggcgcggcgcggcttcggctggaattcggcctcgatcctgggcgaggttacgcgtggtggattcggggactgttatcccgtgaaatcgtctagcgatgtgaggggggggggggggggaactccactcttatggaataatgctgctgttcgtccggttttttccttcagtccagaaacactgaaactaagatttcccctgcaggaaaggattccttcagaaattcctccaatccaaacgggaccagccatctccgattgatagggattatccacgatcgaatttgtctgctccgaaattccctgagaagtagtgcagagtacagtccatacatgttcatgttcatgttcatattattaaaggataggagtactctttcaaagtttcaatgatttgtttttgaagatctttggcttcatccaaaatcttttcaatagcccaatagcccaattttcttcttttttttttcttctatagaatagcagatgaaagttgaaacagtggaggatgttacagggtgaagcaccgcaccaccaccaccgcaagcaatcggcatggacaaaatatatctacaccatgtacagcaaattacaatctcagcttggctcattgataggtactactagctaatgctcagtgcattcttcagttcttgaaatattttctctccttttttttgtttcactgactaatcctctcagtccgtcgttctcgcccgcatctccccctcgcttgcggggatgatttgatgaactcgctcaccgtggctgcaactgcaaacctgtcaggattcagagcaaagtggctcgatttctatgggcagacctctctggaactccacgtacgggtatgccatcggaatgtcatcgccatcgattctccatctgcacaggttttcaagaaacgaaagaaacgaagaacgatgatcagcctttctctggcatggatattcagtaagtacatgtagactctactctgaaacaaccgcataatttacataaatctgcctgttcttgtcagttgtcacgtatagattgttgctaatgaacctagttttttttttaaaaaaaagagtttgatcatatcgtggtagtatattttatcttgtatggcagccctcaactcaacttgcatagcctacctatcgaaaactccatgctgtcatgtttgttctgtgtgttgtcgtctgattctatgctctacagtgccacttatgaaaatgcacaagatagctgagttcagacttgcggtccttacagacaaaagcataaataatttgcctagttgctgtcatggccttcttgccattacttactagtggtctagtgtagtgtgtattatcagtatgagagtggtaactgcatcagtatgttttcctgttcatgtttgcctcaacagttttctatggcctatttaaacaccaactactctgcaccagcttcttaaatattacttctgaacgtattttgttcattgctgtttaagccagtcaactttgatccatgcatcttctactcgggtaggacaaatatacccttttgttttacctataattgagcacaaggtgatggaggaagaaagcagcctctacttttgcaagctctgatccagggcagagccgggggccaccgccgaacggcgtaaacttcttgcttgtcccttggcttgcaccctgttgcatcaatcagattaggaacacacatgaatcagaccattagcttcatcacagaaactaagaaaaggaagcaaagccaagaatgctggctttgaatgagaggaatcatggttaggaccatgcacaaaaggcattgcagccacagggagcttgtttggcatctgaagacaccagaatagttgcgagtaattatgtcatagttgggcgctcactaattaaaggtagcaattagttagagaacaccctttaaagaagattctttcaaggctccagataagctctcttgataggtg

SEQ ID NO: 27873 - DNA, 550 bp, Oryza sativa
acacatttccctcacgtggaaccatgtgccacataccaccatggtatatggtcggaagacctggacatagtttccaacccatcctagccatagacaagagtaccgacccaaccccacctacgggcggaacctccgggacaggtaggcaggactgagcccctagcagcaggacaccggccctgtgccatgacatctcgactaccgggccacagctcgtgtagccttcatttgccctaaacatgtccatcgacccccgacttcgtccatctccatccgtgtacttttgtttataaccagactgagccacaaactaagccttacccactaaacatgtggaagtacggtagtgctttgcaacaaaggcccgaagaccggtccttatatggccgaggtgctactatcaaaaccatgcaccccgagcccagcctaaaacccttttgaggattttgaatagagagggaggtgtgaatccaattccacaataatccaaccatttcacagtgtccaggtgatgagaatattcccaaagtctagagttgtaaaaccacct

SEQ ID NO: 27874 - DNA, 930 bp, Oryza sativa
cgactactagggtggcactcaccgcgtggggggtcgcagccaagtaaagcagcaatggttcctccgtccctggggctaccaagatgggaggggaggtcaggtaagctttcagctgattgagagcttgctccgcctcctctgtccacacaaacggcccggggcgcttgaggagtttgaataggggcagcgccctctctcccagcctcgatatgaatcgacttagcgcggccatgcatccagtgacgcactgcacatcaataagcttgctgggggggcgcatcctctctatcgcgcgtattttctcaggattagcttctatgcctcgggaggagactagaaaaccgaggagtttgaccgctggcacgccgaacacacacttttcggggttcagtttcatgcgcgtggacctaagactgtcgaaatgccacaccctaaaaatcctaaatatataaattgttgtttaattggaattattagaatttattttaaaagcctagaagagaagatctaattttaattaataaattccaatataaaatggggccagataaaatttcattaaatactttgcttaactctataattcctagatttttctgggatttatttgagccaaggaggtatttttaataaatggaattgcatttcatgagtaatttaaattggaaaaggttttaaaagtctcttttggctttgggcctaaagtcggcccaaaaccttctctctcttctggcccagtccggcccgaagatgagcccgccgctcgcgcgcgcgcgttcgcccgctgataggtggggcccacctgtcagggccgtcgtatttctcgcgccgtgggccgcccgaaccctagcgccgcgttgccgtcgtctcctttcaaatacagacgccccttttcatttccggggaaatcaatagaggggaaatgatctt

SEQ ID NO: 27875 - DNA, 664 bp, Oryza sativa
acataactctacatagaaacaggctaaacaaaacagactgaaaataaacagatgcagataagaaataatcaaaggtaatgagaaacagatgcagataagaaataatcaaaggtaatgagatgcatcagcaacggcaaaagatccacagcatactcatcttggtcatcgggttcaaaagattttgcacgttgctttcccgaacaataagcacatatatcgtaaactatttcatccctcttctgtccaaagagcggcaaaactaaaacgatattaactccgacacattacacccctgaatcagggaaagcttttaaagtggggaaagggggggagatctacagtttttcttcttcttatgtatggtacacacaagaacattacgatcttcgatcatccacctgggggtcagggtccaaaagatgaaatggcaattatcaactacagaaatcatcaaaagggcgaccggtcctatcttaactgctgactgctacactatgcctcctaaatctcacagttctacatcgtctcaacttggcgattgcttcttgtgccttcccttgaagaaggtccacataaactgatgctagcactggcctggggtttgtgggcaacaaggcaacgccacggcttaccatatagttagcctgctcaagctcttcctgca

SEQ ID NO: 27876 - DNA, 920 bp, Oryza sativa
ttacaggggcggacctacccattgggcagggttgggcgaccggcccagctacggcccacgttgccccactcccctggatgccatatccatcagtccatcaaggaatagcccacaagtcagcccatcaagcaaacaagccaatgttagcccgttaggcatctgttaacgaccaaatttggtaagatatgaaccaggttcggcattggaatcgaagtggattcggcaaagacatagatttgaagaatagagtatgcatcggctgcgaaggcatcggctggattctgaatcggctgagatggcttcgaggctgcttctagaatcgatggacgtgcttcatgaggattgccacgatggagataaagctctcagataggtaattgtatctattaattaggatatcttatttaatttccttagagatatgtttgggtaaaagtctgccgcaaagacttatggtatcttagagtttgttagagataagagtcgtgtccggcaaggacatattttgtatctcgggtataaatatgacctgaacccatgtaatcaattaacacatgttcaataacactttcggcgcatcgccacccttttattttatttcgacgagttcttgctttcgggttgagctgcatcgattcgatcttcaactagaggtaaacttgtcatggcggtttgcgttctcgggaatagtgcttccatctttatgacactctaatcttgtctatgtaattcgttgagttatcatatatactttataatctctgttagttacgctatataacttgtcatcggctgtttcttttgttaggaagttgccgatagagttagatctcgttattaatctagattatatcgtgtatctaccatctcttagaggttttcatcatcttgtatagatctcacagttatctttatgctta

SEQ ID NO: 27877 - DNA, 7808 bp, Oryza sativa
cccgatcggctatcgtttatggatttaaccgcggcttctcttgtctttattcttgttgattgtaggatcaaatcaactggcacgctcatgaacctaaaggcgagattttggacctgtacaggatttaagcagatcttccaggctagtgtgtgttttttcacatcaacacgcttttggcacgtccggtgggatcgagttgtgacaactttttctcatggcagaaaaacaatcaccgtcatcaggagtcaagcctccaaaccccccgagggccaagcttccaaaccctccggggaccaagcatccaaatcctccggggaccaagcaatcatcatatgaagttgggactgataacattgttccagtcactatagacaaattatcaccagaacaaaagctggagtttgtgcaaataatgaagagcgctcaggagaaattcatgaactcattcaaggaaacccgccaaggaacagtcattcaaaagtacaagctgaaggtggttgctgccgatgaacctggaacaagctcatctcaagatggtagaaccaagggagctaaaggtggtgtggatggttcaggtgacaaaggtgcggaacctagagatggtgaggttgaggacattggagaagaggatgctgaggagcaagagcctccaaggtgcaataatttccaagaccaagttgactatgctgtgcaacatgctttgaccaaccaatcaggagtgcttgttaacactttaacaaatatgattaagtctgtggttgatggtacgataactgagcatcaaaacacggggccagtcttcctaccaaatggcgtgttcccacagtacaagaatttggtgataggcaaccaacagcataccgccaatgcaccaccggtccagccgatggcagcagtttcagctctagcaacaggtgcaccgtcgtcggcacaaaggcaggtggttaatcctcatgtcttgaccagagagcaaccacaacatgttggacagaacatcaatcggctgactcaggagcagattgctgcaatgttcgcgccaactcagccgactgtcgagccagtacagtcgacaccaatcaggcagcaggttatccagccgattaggcagcagacggtgcaacagataccaacaggacagagaacacctattgctcagaaaatccacctgtcggagcccagtttgtgcctgaacagcagatgtataatgttcaacaaacccctcaaaactatcttggtggtaatttcaatctccagtatccacctcggtcacctcaaattcaatatcaaacaggaggatcacctcagcctcagtttctaccccaactcaatcaattcgatccaatacagcagcagatgcaaggagtgccccagcagaagccttgggcaggcatgattgcagatgtgatgagggagcagtttgggcttaagccaaaagacactggaaatttgtatcggcacccctatcctgagtggtttgaaagagttttgctgcccaaccgatacaaggttccggacttctcgaagttttcaggacaagacaatatttcaacctatgagcatgtcagccgattcttagctcagtgtggagaggcattggctgttgatgctttgagggttcgattgtttcctttgtctttgtctggatcggcattcacatggttttcttcgctaccttataattctgtcaatagttgggccgatttagagaaacaatttcacagctacttctacagtgggattcatgagatgaagctttctgatttgacagcaattagacagaggcatgatgaaactgtacaggactatattcagagattcagagagatgaggaataggtgttacagtttggctttgaccgattctcggttagctaatctggctttttagagtttgatcgctccgatcaaggagaagttttcgtcccaagacttcgagagcttgtcccatcttgcactaaaggtgaccttgcatgagcaaaggtttgtagaggctaagaagaatttcaagaaggtcaatcatgtgtatccttatatgtatgactctgaagaagaagatgactccaaggtagcagcagccgaatgggccagaagcaaaaagattatagcgtgcccatgggtgaagagttctgggaaggaagaaagatatgatttcgatatcaccaaggctgataagattttcgatttgctacttcgggagaggcagattcaacttcctgctagtcatgtgattccatcggctgaggagttggggaaaaggaaatattgcaagtggcataactctagttctcatgctaccaatgattgcaaagttttcagacaacagatccagctggctatcgagggaggcaaaattaagtttgttgactccaaaaagccgatgaaggtcaatggtaatccttttcctatcaacatggtgcatatatctgggagaacagccgatgagggcaaacatcggagttcacagctgaattcagttagaattatcaacaaatatcaaaggaggcatgacaagcagcaggagaggtattttgaagagaaagatgacggttttgatccacattgagattgtgagtttttcagattttgctagaacgaggggatgcggttgccatcaattgaagattgccctggatgcagagacaatgcggggagttcaagccgatcctacaatagaggcaatcggctgggtcagaaaagagtcctgttcatcagaggttgggcctagtgcatcatgatcgtgatcaagatgaagatgagggtagaaaaacgcaatggtgtccttctggtattttcaccaaaaatcagaagaaaagggttcaaaggatgaggaacagagagcgttttctggaggtacaacaggagatcaatcatcggctgaagaagaccaagcaggaatggcgcgtcaaaagtaaagttacaacagccgatgaatttgaagccgacaaggcgaagagattgaccaagagcaaagctgttgcatccacgtcggtaaacatggtttttatgttacctgcagaattcgaagctaaacaagccaatgttgatgatgtagaagaggcctctgctaggttgattttgtcgccagagcaagcaatctttgagaagccagaagggacagagaatcggcaccttaagccattatatgtcaatgggtttgtcaatgggaagccgatgtccaagatgatggtcgatggtggggctgttgtgaatttgatgccatacgctacattcgggaagctgggcaagaatatagatgatctcatcaagacaaacctgattctcaaggattttggtggtaatccatcggagaccaagggagttttaaatgtggagttgacaatcggcagcaaaactgttcctacaacgttttttgtcatcgatgggaagggatcctacagcctgttgcttggaagggattggattcatgcgaattgttgtattccttcaaccatgcaccagtgcttgattcaatggcaaggtgacaagattgagatcggctcgaagataaatgatacgtcatcggcaactagccgatcggctatcatttatggatttaaccacggtttctcttgtctttattcttgttgattgtaggatcaaatcaactggcacgctcacgaagctaaaggcgagattttggacctgcacaggagttaatcagatctccaggccagtgtgtgttttttcacatcaacagcatcacgcgcacacgccgcagccgcacacgaaacagacttgacttctcgtcttgattgttttctcgtcttccgatcggcgatgctgcccgacgccgattgacaccgacccattgtggcgcactgcctctgccgtcgtacgcgcgactgcgccgacgcatccaccgcccacgccgggtgctgctgccatgccaggctgctgcctgctgcagtccgctagggcctagggctagctagcggcatggcattgcaggcagcgggcctgcggtagccggcagccggcagccagcaaaggtctgaagtggcgaaagccgctgtccgtttccaggcagcccggttggaaaaggtatcatcagcaagaagtccaaaatgaaatcaaggtatcgtagatgtagtggagttttcaatataattgactgatgagcaacaagctagtgaccggatttttctcctcttagaattttgaccttgtggatatagacatttcttttaaagaaagtgctagcatgtgttttccaatagtctctactctagaaagggctaatttattagcaggacatcttcttatatattaaacgatttttaaagacaatgaccagttaactatcaccaatgttttataaattacctggtttttgcaaattgatatgatgaattatatataacataaagattattgttttgttttaaaatgaaacgcaccatccagaataaaagtattatcttgaatgttcttattcgtcttaatttattgattgtattgaactttttatgtgattaaaatatataaatataatgcgtgccgtgtttggttgtacttatcgagcgaacatctccaccccatcttttttataaagctgcgtccgccactgatttcttaacgacattactagaaatataatttctagcaatgatgtagaaatattcatggtatattcatagttacagatatgatccgtaagcgcacggatataccattataatttcacccggaagtatttcaaggtatcgtatttatttaatccaagggaagatatgataagagagaattatactgataatttatatattacttgtatatatcaaggtctatggaggggttaagtaattcaaaaggtaggataaatgtgacacacagaagaaagagctaatatattctcactaaaatataatctaaactaagtggaggaagaataagaaaagaattcattcctatactgggatcctctagagtcgatatgcaggcatgcatactttacactgctagtatacagtcatgcaaacaatagccctaatagtgccctcctagtgtttcgagagaccacccctgattgccgagttaattacgacagcctgtcatggccatccaaccagggctaaatacagaagagtatcctccccaggaaagtgtctcaggaatatacactaacgtagaggaacacctgtactgagctgtcaccatcagcagcccacctttactgtcccgcagcatatatggccagataatgatactccctccgtttcacaatgtaggtcattctagtatttcccacattcatattgatgctaatgaatctagacatatatatctatccagattcattaacatcaatatgaatgtgggaaatgctagaataacttacattgtgaaacggaggaagtacttaataatctaagcaccatgcttgcattattaaatactacaccacatccatgcatccaacatagagcaaccgaatattcggacattaaacccataccaatgcacctcttcggtaagctagctacacaactatatcgatacacgtagaaaataaagtcggtactcagataataaaaagcgaataaaataccaaagatgtataaagaagaatattctattaatttaatgtcttacaaaagaagagagaaaagctgctagagccatacccgaaatctcctgaagactcgaggactaagaaaactattctatttcctactccactagcactagaccactactaaacttgagagagctctttgatcttcttcttgagtgtgtggagaatggagtgagaggaggggtatttatacgctatgaggtgccttgggagtgtggaaatgctcaaagcatccaatgagcatattccctcttgcttcacctctttgtgccaagtgtccatgacggttgcttcaggtagaaacggtcacaactgccatgggatgtcgataactaccggcctgtggaatttctgggccatctgggctgttttgggttcgatagaaccctagactggcccatttagcccacaaatcgacagatgaactcctcgttgattcctcagctcagaagtgcattagttgggcccaattgatattattttaatgggtttagaggcccatccacccgtaaatctacctctcgacggattttgattaattgttcagttatgtttcgtcgattctcctccatttatgaatgcttctcctgcatatatgttagtagcatagcacatagtggaagtagatattttatttggaaattatgcattgcaagcatagctagtcttcattaattgggtaatattgacggtcgaaattagtcgataacgaccgtcaacaatcccctcaagcttgaatctttgctcgtctcgagtaaaggatgaaaggaaacaaagacttggttattgatcaggagctgttgcaatgctgtatatctagaatgtacaaaatgcatagtatgggtacccttaccagaatcaagtcagccagcacggtggcttaaccatacgcctaaactgtgaggcatcatgcttcaccttgtcttgggtgtttgagagacagaacggttagtaaagcactactcacccattccttgtctaacttttattcaggagattttctcaaatgatttgtgcaaataaaaaaaacaagttgctcaaatgattctctcagtccctcagcggtatataattgtattcctcaccaaggtattgcattggtccctattctaaggtcatatatgtggagtttggtagggatcaagtgagtcatacttctattcacatttattacttctgatcaagatcatgcaagatgtgtgtgtggaatatatggtggtaccaagacctatttagtggataaatataaaactaaactttactcctttttgatatacctcctccttctttatttttgcaagctttaagaagtatggctagctctttgtcgaaactagatttcggcaatactaaagggggtagcgaacaagctgtaaaaatggatgggttatgagacaaaggatttatactggttcaggccctctcgatgagaagtaataccctactcctgtccggggaaatattctgctgattgtgttattgatttgacaatctgaagggtggttataccctcaaggagccccccgacctctccttatataggtagaggagtcgtgattacaagatagaaaccttatcccttacgatctaagttctatagatattttacaattgtcaccgagtaaaactacaagatatttccttgatatacaagttaacataatacctgagtccttatctttacatattctattactatgtgttacccccaataaccagtcggataacacaaccctgtgagtatatggtatagcccctgagacattcacagacgacgagataatcctttcccaagtgatttaataaaaaggtcgagtaattcaattatcctccgctgcaaccctcgagtacttcaatcatctcaagctgtgaagggctaaaaaaacaaaaattaaggtgcatcaactagatgcacctaattaggtgtagccctcgactatgtaattagttgagcaaactaaacatatagtcaaggataaaataaataaccaaccaagcggtatggaatgattacggtcatcaaaatgactaaacaaaatataaagccgattaatcgccgattcgccgtcccgtcctccatccgccgcgcgccgtctccgcctacgcaccgcgcgccgactccttcaccaccacacagcctcgccaaccgctttcatcgttctcccacgtcgccatcaccatcctatctgctgccggcgctctccagtggtcctgcctaccgccggcaccacccc

SEQ ID NO: 27878 - DNA, 1342 bp, Oryza sativa
tgcttaattttcatgggaaactgcacttatgctgattaacctagctcttttggtgataagaattaatatagtttacaaaagcgttattgtgcattagactaaatgaatatatgtgaagtcgttaaattatgtatacgatgagtgcaagctatagtcgctgaataaaatctcactgattcattgtagttgtaactaaagaaaaaagagactatgctcaacaccttcgccgcctcccaccttgatggcatgctggggtcctcctcaagcccgcttccaaagccaggatcctcatccatatctgctacccgggcccgtggcattaccgactcccaagttggcgcatctgcgacaatgggttatgtggacaccccgagtattataccatccagtgtccaacgcgaccaccacatactattggagaagtgggatccatacatgcacaaatagccactcgtcctcaatatgtccatgatcgcggttgacaaccttctgttataataaccgaaatgtcgagtagtgagcgcaagacataaccgtaagatagcttgccagtccactctgtcataagcccatcaaccactcgaaggtggtgactgaaagcataccccagtgactcgatccaaagcgctatccccgattatctcaagcgatcaaaactcgttactcatgcttggctagtccccaggaatgcgactagcctcacactttcatcgcaagcaattaataaacatagcaagtcccataatagggttaaagtgcagcaaggtacatgacacataatatggtccaaggtcccaacatacaacacataaatatagcagcggaagtctcaattagagttcataagcaaaagataaaaccggtggtgccacaaccccactagggcaaaccaaccgggcaagagccaagctgcaatagatcacttattgccctcgccgcccttggcaaagcaatgaccacacaagaaacataactcataaccggaatcctctcctgaaattgcagacaccgggttaagtacaagattgtactcgcaagtcttacccaaaattataaatacataagggagagagaagtatgcaagctttctagcctatagtgggtctctaggttcaacatttgcataaagctaattttattgagcaattaatgagtaaaataagcaaggacaagtaaatctagcatcattttaatttatggacagcaagtatataattctgaaatgtataagcaaatgagcccaaacggcgctctcatcatcagccatggactaccaaagtccatgccaacatggcacaacatgccaacaccaccatctaacataatcccatccataataatc

SEQ ID NO: 27879 - DNA, 1604 bp, Oryza sativa
ccatacaccataaaccgacaatattaatatctaggcaatgcatgcatatatgtacgtatagattgcaaccaaatcatttttagagaaagcataggttctatatgcttaggtgcttgccttgctgctgcgtggaaacacactcaacctcagagtcttgctccacgtactccgaattctccgaatctatcgataagaggcaagtatgcaaataagattcgaataaacatgcatatgcaacatgctctgcagaacacggggtaaacacagtggacatgtcacattttcaacaagaacttgggtgaaagaatgaccctatttgctgccatgattctggagatataaaagtgacaagccacaaatgctgaaaatggtcctatgccaaaactgaatataaactataggtcatttggtgatacccacatattctagcaaattttcatgggtgaaacttgctccatacaaaagagtataatttactggtgataggaatagtattcggattatttaatttggagtttgaacaagatagtaggtatatatgaaacctagagagtgagaaaaagaaaactgctgtctgcagcccttgtgcccaagatttgattcgaaagtttacttcgcaaatgctcagtgattgaggaaaatgaagaaggcatgatttagctcagctattggttttgtaaatacaacttttacaaggtgttggttagttctcggagggattaagtcgcaacatgaaatttctagctggcctaagaacttatgatgctgaaagacagcaacttgcttccaatggcaactcataaaggtccaaaggttgctgttacactccatgcatgcatatactttagaatgcagatggtgaggtactttggttgtgaaggttggagcacaaacagccatagaacaagaacaaatcaatgaagaaaaaaaaaatggtgatagcaacctgagtaaaccgagggagataggggttgtaatcgtcggagtggagagagacgagttgcagctgttctttgctctaaaatcttgcatcaatgacctgtggagagaggtagggaggctcaacacaatggcactcacaagagggacacaatggatgggaaggaaactcaccaagtggaggaaaaacatggttgttttgctgctgcaaccagcagcaagctccacctattttcttcccgatctccctcacgaatccatgcatgtgcaagatatttggatggatgggaggcttggatacttgagattgttgtggtgtgacatgcagggatggatctcaagtgtttggaggagatttgatgggaagaagtgagctgggagctcagcttgcaagaaagaaaagaacaggcacgggagaaagaaaagaggaagaagatgaaagggtttagcttgtcttatggatctgatgtgggtggatgacctggaggtgggttggggtttggtggagagcctaggtctgtgacaggtggggccaagtcgagctgggtccatgggacagataaaggaaggttagaaccataagtacacattgaaaatagtgaattttcaggaattttccttctctccttcttgggtaactagtttgtcctagctacaagagagtc

SEQ ID NO: 27880 - DNA, 5193 bp, Oryza sativa
  unsure (1)..(5193): unsure at all n locations
agagcctaggtctgtgacaggtggggccaagtcgagctgggtccatgggacagataaaggaaggttagaaccataagtacacattgaaaatagtgaattttcaggaattttccttctctccttcttgggtaactagtttgtcctagctacaagagagtcaaaaatgtgtgttctggcgtggagatagattgagttacgtagtttccatttttcaaagtttcactcaaaaattcaaaatattttaattatggcaaaaaggtgaaaaggggtatgctgagaaataaattgaattttaatgaggttaaaactgactgtaaaaattctagaaaaattatattaactcattataaataatgtactatttgaataaattataaaacctatatccttcagttcaactttaggcacatttagaagttgcttcattttgccaattaggtttctaattaatttagcttgactaccttgactgctttacttgaggtagtaaaaagaatgataaaattatgaaaccttcatggtggtcatcttaggttgtctaagagacaagacgagcttcaaggaattttatgttgcttagatttagtacagagtctatgttcatttaacatgtaccaatcagcaaaacaaaagaaatcattcaagctaataaattggacttcactacaaacaggtacacaatcacacaatcacagccactagttactcaaattacaaaccaaatgctatgcgtgattgggtagattatctaataagagaaatattaatgactagactatgaagttatatttccgattggtcatttaatatagttaaatacaaagaggttttgacttggcttaaaagttaaaagggagaaaaagaaaggtggatcttcgtggattatctggtattgagttggcttagtctcttatattctcgttccattcgtgcaaggaaattattggtgagtaggtctttagttgtgttggtgaattttattagcgtcgtagtgctctctgaaaaattggatgagacttcattaacccagcaacttatagatttcgccaccaaggttatagagttatttgttttctgaaaaaaaatgttttccctataacggtaactaaagattcacatcgtcccaaacgaaggtctggtaaaaggtttaaatttctagccattttaaacataagaatcatctggagaattttttttaagaaagtttttgaaactcctataattttatcagaaacacaatatatgacatgttaaacaactaattaaaatttcaggttgttacaggttatggaaggaggaccccaagggaatgttcacggacaatatccagaccaacggcgcgtccatcacttgggaggagggtctcatgcctgaggtgaagtattggtttgtgctgttcgatactgctaggttgttagtagggtttaaactttagaacaatcacgtcaggtaaaaatacatgttgtttcgtagaattttacaatgtgaattattcttaaattggtgaatttgttatgtaggaaggaagaagcagggaggctgaaatttctattttaatctaataatggagttgaacatgtgatttgatctttatgctaatttattttgcaaacaatctgggtgtggttactgactgcatgctattttttcccaggttttcctgttggaatttgcttattttataagttttcttccttaaaattccatttgttctgtgattgttctcaagtggcaaatgaggaagttgttgatttagtatattaaacattggtggaggaatattgatcaagtgcaaaattgatcaaaagttgcctgttgatctggcgacgaagatcagttgcaaaactaatactctttcaaaatagacatgatagcaaaggttgtatttttcttaagttctttgcagcataaatattccatactggtgtactgtggttctacacggtgattttcttaattttatttaattttcattttgtatggaaacaaaaatgaggcttggtgtcttctccgtttcaatgatctattctcgccaacatggattccatgtgcattgttgtactctggttggatgctctacacttctgaagtgttgtgtttatttttcattttcaagttgagtggaaattacaatgaaaatttatttattctatctctgaaacgaaaatggacagtcttggatacatattaagtatgcattgctaaatattaggttgaagcaagatgtaataaagaacgtgcattgcacgtgcatgattactagtatcaatcaaatgtcttaataaaccctcactgctttgcgacttattaaagaagtccacaaaacaagcataaaaattttaaactgtaaggtaccttttaaaatgcactgtagtaattcactaaagaattaacggtattgggtatttaatcacgtgcaaatttgccaaaacaaaaattacctaagacccaaaggaacgtgacaacggtagctcggtaagaattttgacgtgggaccaaaaccatctgaaagtagactccataagctttccagcaagtactcatgggcctcgaaattccttctagatcagcggctaggtccgtttgaagttgatgctgttaggaggcttgattccaaatccaaaacgtgtacaacttgatctcttgtcttctatgggccaaaagtgacatggtgagttagaagtagacttggagaaggtcttggtttggtccccaatcaactttatcatccatgcattcgttatgctcggcctcttttacttcgtacaagcaagaacctctgcaaacgaaaacacacaaaacttattgtgtagtaacgtttgttcaaatatataacaagtaaatctaatgtagaacatatgcacctttggttgattaatacataaagtagtcatggttatatccgagctagttgtgtactcatcagctggtatggacccgaagtggtcacacagcatggcacgtgcgctggcactggatacacggacgtggccaagaggggacgttcctggcctgggcattaatagaatacttatatcaataagctgcaacttgttttcagaagccgatctccaaagaactctagggttaagcgtgcttggcttggagcaatttgggatgggtgaccgaccgggaaattgttcccgggtgcgcacgagtgaggacaaagtgtgcagaaaagacttgtgttggtctgtgaggacagtctatgacctataaaagctatcagatgtaagcaggcttcccgggtgcgcacgaatgaggacaaagtgtgcagaaaagacttttgttggtctgtgagggcagtctatgacctataaaagctatcagatgtaagcaggcccggcctgggagaggtgggtctacaagatcctagagaacatcaatgttaagctagatggtttcgcttctgctttacaaagccagctgagcttcaataaaatgatagaaacacaactagctcaattggcttctttagtccctgcaactaaaactgggaggattctgggccaacccgactcctccattgaaaatgtcaaggcgatcacgacgaggggaggtaagtccactcgtgatccgccgtatcctaaccctacaggaactaatgggattgccagagaagcgccatctagtgactcggctgacaaagaggttcagccagaaaaagccgtgccgcaggaatacttcgacacatgattgctgccgttttcctcaacggagtaggaaaccgtcagtggacgagcagttcgctcgctttgttgaagtaatccagaagattcacatcaacgtgccattgttggatgctatgcaagtgccaacatatgctagttatctcaatgatatcctcaacaacaagagaccgctcccaacaacagaggtggttaagctgacggagcagtgcagcaacgtcatactccacaagctccccgaaaagaagaaggatccggggtgtcctacgatctcctacgaccaaaccctgtgtgatcttggagccagtgtcagcgtcatgccgaaggacgtctttgacaagctcaacttcacggtgttggcaccaacaccatggtgttggcaccaacacggatgcgcctacaactgctgactcgtcagtccgttacccagcggagatagcggaggatgtgccagtcaagatatgggatttcttcatcctggttgactttgtggtgctggatatggacacgggaaaagagacgccgctcatcctggggcgttcgttccttagcaccgcaggagctaacattgacgtgggaacgggaagtatccgtttccatatcaacgagaaggaggaaaagtttgagtttcagccaaggactgaacaatgctccacggtcagaataaagtacgggccaaacccgcagaatattcaagtggtcgaagtggagccacccaatacggatagcctagtaagggctcctttgattcaaaggattggcataggacttttgtaggatttacaatcctatggattttttcctatgtatgtctttgattcataggaaatgaaaggaaacattccttaggattgcattcctttagttcattttcacaggaaaataagaaagaggtctgacctctttggaaactttcctggcgcgaaagaagggcgcgcccacgcgtgcgcacgtcgtcgttggcgccacttttgtgtgtttggcggtaaaccgtggcccttcgcgcttcttccagaaaaagagagagagagagaaagatgggaacgagaacaccgaggaccacatattagcagccaagaaagccaactgtgatagagatagacaacagcttgagccggccgctgggggtgcaaggcggaggcgaggctcgccggctcagtcgcgtatgcggcttctgctggggacgccggcccaacaactagcagcacgcagcaaccaagcacagcatccatctggcgcgcaggttgggctccgctaggcggaggcgtgcggcaggtcccccatcgagggcagcagccagggccatcgatttggtatttgtctgcacttttgagctttcatacttgacttattattgacttattagtgcttctgtactttggatctatggattagtgaatttttaagctgactacttggaactagtttgtttcattggcactgtaggtgtaaatccctctctgataagganggtgtattcnttttttctttctttttttttggg

SEQ ID NO: 27881 - DNA, 2292 bp, Oryza sativa
aggctcttctcagatgaccatgacaaatcaacgcaatttgtccgatcgacgagcccagcaacctctatcacaggtttatgttgatgttgacagtgagcatgggactgcagagcgtcaagaaataggtaatatttgcaaattcagtttcacttgttgtttgcatcaaaccttttttgtttcatattgctgctgaaactgaaattgttaaatgtttgtcaaatttagggacgacaaagagagccagatggagtcaccagatgaagatgttccttattgagctcctaacagatcatgacgtgccaggttttcgaacacaaaatgcttggagtaaggaagcatggacaaatattgtttgccgcctgaatacaaaattcggtacatcatttacgaccaaccaagtcaagcaaaaggagcaggatttgaagaaagattatcgcagtgttaaagatttgttggatcaaagtggttttgggtgggatagtgacagaatgatggtgagtgcaccacaaagtgtttgggacacttttgctgatcgcaagaacaaagatgcaattcattggcgagataagtcgttcccatattttgatgatttagctccactttatgatggtgagctttatattttttttatcagtggtttgtttgttttgttgaaatgttttaggcaagttatgctgatcgtgaggagaatataattgtgtaggtcgttatgctgaagggagaactcgccatggtatggaccattatgcaaggaagacaaagaatgcaccagctcattcaacacaagaagcaaatgtggttgatacatatcagtcaccatcccctaattcaaatgctccaggtgaatcaggtttgcaatttccttttggtgaagaggttgagacagccaatttggacttttcacagcattcacctacccctgtccatctcacaaaagtcccacctagctcggcacaaacaccttcagaggttcctgaatctcgacctgggaagaaacaaaagatcaaatctgttagtcctgatgatggatttcatgagagatacctaaaacttaaaaaagaagaaatagatcgatttgctgcaattgaggagaagaaattggaggatccttacagcatcaacaagtgtatcacagtgcttgaaggtttacatggtctacaaataggagatatattggtggcagctgatatcttcaaaggtaaggataatagggaagttttcttgtccttttcaagtgatgcattacgcctggcttggattagaaaggaaatcgcagcattagagtgagtacttttgtgaaacatatggcatgcaagtagtaggatagtacttttgtgaaatagatggcatgcaaatagaaggatagtacttttgtgaaacaaagggggtacttttgtgaagcagatagtagtaggatatacttttgcttagagggagtgcatgcaagtagttacttcattaagtagaatgtgacaaacttggagtacaagactagtaattgaccttgaatgccatggtggtcaaatgcaatatattatttccttcgtgctacgtaatggttccacatccgatgtgccatgtcatctcgttttctattcccagcttctctagagttgttaaattcttgtacatcaccattatagttctcgtctccatttggcacatcaacaatatgatctggatcaatctccaaacgacaattacttggccacaccatatctccattatgcaggcgtatgaagttgtgtagaacacaacaggcaaccgaaatatcaacttgtttacgagctgggtggtgtgagccggtctttagtataggaaatctcatttttaatacaccaattgctctctctatatggtttctgagttgtgcatgccgaagattgaataactccttataattttgtggcttttgattagctctgccctgttcctttaaatgatatcttgtcccacgatacggtgctagaaactgtgttgtatttgcataaccagcatctacaagaaaaaatttaccaggaggtacttcaaaaccatggtttagtgcatcttgaagaactcttgcgtctgaagctgatccctcccagccggcatgtacatgtacaaatttcagatcgaagtcgcaagctaccataacattctgagaaattgtttgctttctattccggtatggttcttgctggtctagtggaagtatcattggtacatgtgtcccgtcaatagagccaacacaattctatacaaatacaaatataaccttgattaagtctttttatgtacaatgattggttt

SEQ ID NO: 27882 - DNA, 2636 bp, Oryza sativa
taataaatctgatggtttggtctaccaatatatataggagagcagaagcaagcaaataagttgctaatccttacatacataccaaaaagaaaaaaaaatcatttatgacttaccaaatgaattgccacgtttgagctcttgtcatgcttggccgatacaatcgaaggtgaggtgagctagttttgttgatgtccagttgcagctacagcaatatatataaggacatgcaacggctagtacttgctttgaacgccaacggctatctgttcaaattcaaaccggaagagaaatcctgtatttttcctatagcactatcaaagggcacctttcattttttcctatgtttttgattcctgcgggattgaagaatcatactacttcaattcctgtgtttttcctattcctgtgtttttcctatcctgcgaatcaaaggggccctaaagttcatgcagaatttcctaaaaaaggaaacaacgatgcacaggagccgttaatggaagacgccggtaaaatcaagtacaccggccaagaagctagagcagtcgaagccgtcttttgcaccaaaaccaaaggtgtggatagaaaagccaaagacgcccgctccattacctccggagacgggtggaaaatccgcgcactgaactgaaaggaggtacggtcttgcacgtcggacttaaaatgacgcgaccttcaccaacaggtaaattggtatgtatccgcatatttgttttcaacaatttaaaattttgcatcatcacatgtttgaatttgaaaattgcatttaggatttttttgaattttgaggaaattcttcaaatgaatttttcagagcaaatcaaaataaaattttcaacgaaaattcactgtgccacgaccacactgaccgttggaacccaacggccgaaagtagggctggtttggctcaccaagggttcggccgaaccggccaggcaacggtcggctgcctccctttttgaggcaacggctagtgggccccacaggtcagttttgaccattgtgggtgcaccacttaagccaaccggccgggagagggaaatccaccccatttcaacacattttcattcccattctaaagtttgctctcaagttcattcaagctttgatagtttccctcaaattcaaatacttagctgcatatatacaagttgctttggtgaaactaaccggcgggtgaaactcttgctattctaatccccgccgagttagaccgttcttgctccattgtgcagaatgaggaggcagctgtctcgtctgttcaaggggtctggcttttcgtcaagtcatcatgacgagtctagtgctcattcatcagctgatgtctcgatagaggacgccgaagctccgcgacgtctcctgaacgacgccgacctcgaccttgttgacgattgggaaagacaagcctactacattctgagcgaccgggagtacgctcacatgcgagaatactctccggagctgctgaaaaagataggtatggatgttgattttcgtgctatttggaaagctgttggttggcatagatttgctgtggttgatgagcctgattctcgtttgcttacttttcaatttgtgtgcactttgaaagaaatagaagatggagtttccttttgctttttccataaagaatacacacttacatggaaaggattaagtacacttcttggctttcacgattcctgtaaaatcgatctccagaaaggaatttctttgttcgagaaaaataggttttgggaagatatttatggtgctccaatttgcaagaaacctaggacgaatgatatccataatcctacacttaggctcatgcacaggtggattgctatgactttgtttcctagaggtgatcttagacccattaggggggatgaattaattatcatgtttgccatggttacaaaaaccaaaattgctcatgtgaaatgtatgataaggcaatgttaggacgtataagattttttgctcttgttgagtgcacatctctgattactcggagcaaaagggctaggggtcgttagtgaccaaatagctttcatctcagccgctcgtccttgtattgatgagaattatctagtgcaagggcatattcttaaacatgaagtagatggatctttgatataccttttccccggttgtacaaatgaaattccgttgccaaatgcggggtatcatttgtacaactgctgtgaactaaccattcccctgcagaccatagaagaatctcgtgcaggtggagcatacagggagacgcgcaacatggcaaggaatgaacgagaaagttcatcatccccaacacccgtgcagatgtatgaggcaggttgggaaccaattggggatgcacccggatggacccaagctccatgccatagcattggagtctcaagctgggcaagtgccagtgaggaccgatggcatgtgtgtcacgtccgtaaataacccaacgggcgttccttacgtgcgtgcattattccttgtcccaggaggcaaggtacaccaaaagttgatacaattcagagtttaacaagcggaagcgtaattattttattacatgggcgccgaagcccccgcgcacaagaagacaaatgaaaacacagcggaagattagggcgccaaccaca

SEQ ID NO: 27883 - DNA, 1419 bp, Oryza sativa
ttgctcaaagctattttgtaaatacgatcctcgagctatgcaatattattaatcaaggccgtgaacccacacgaacctgccttaacccaaggcctacgatgattcagaccaaactggcaacccgaccctgggtcccagctcgtcccaagccaacccaggccaaccattccacattttagttgttaagcaggttttaagaattaaaatactaacttgggtacattgctcggcttgcccataaccgagggcgcggctattcgaataggttatactctgatcagaggtgtacatctttacccacaagacacatcttcctcacgtgtaaccacgtgccacataccaccacggtatacagacggaagacgtgacatagtttccaacccatcctagccatagacaagagtaccgacccaatcccacctacggccggaacccccgggacaggtaggcaggactgagcccctagcagcaggacaccggccctgtgccatgacatctcgactaccgggccgcagctcgtgtagccttcatttgtcctagagatgtccatcgacccccgacttcgtccatttccatccgtgtacttttgtttataaccagactgagccacaaactaagccttacccactagacatgtggaagtacggtagtgctttgcaacagaggcccgaagaccggtccttatatggccgaggtgctactatcgaaactatgcaccccgagcccagcctaaaaccattttagggattttgaatagagggggcggtgtgaatccaattccacaataatccaacaattccaaagtgtccaggtgatatgaatatcccaaagtctagagttgtaaaaccgcctaatgttacctaattaatcagcgaagcatctacctaaaattatactagtggtactatgagtagagtgtccactagttggggttttgtttaatctagggtgaacaaggtaataataacaataacaataataataaggtcataacaaaggtagataggcatggctaaataaaacagtgataacgcaggaatttaaataaagcggtaatgcaataatttaaattaaaataatttcataaactgggattcaatatgttcaaggatgatgtgacttgccttgctcgctttcccaaacgccggcttcaacttccacgaagagcggatcctccgaagctgcagcgtctacacgaccaacggaaaagaaaaggcttttactctaataaactccatataaccagtaggaacaaagcacaaaaatgggttcttgacttcctaaggaaaaattagagacttgaacggtccaattccgagttcaaatggccaagttatggccatttgaagtttatatgctctttaaatgaatatttgcgaatttcttcatttaaattttaatttaaaaagggttcagccg

SEQ ID NO: 27884 - DNA, 7018 bp, Oryza sativa
actgccacatcattatctagtaacaatcattaaatttaaacatcaaacaaagatgctatattgtctataattttataatttattaaattttagagcttttaaaatgcaagtatgttaaatcatcatcccacattatcacataatatttcaatatacatctttattattttttaaatatactatgtaactatatagttcatgttatttttctcttctctcattaagccatatcaaatcagttgtttttagtgcttaaatgaaatctatggtccaaattttctctctttttcttctctcattaatctatatcacctcaatgatttttagcctttagatgattaatctatggttcaaactatctcaatattttttttctttcataaattcatataaccttacttttacattttaatcatcattctatatactattaaaatttaaattatcataaaagatgttaacttatgtaatcttatgttgtctacttgtcttacacattatttttatttattgttatcatactaaattcccgcagcaacgtgcggggttttacctagtaataatcgtaagatccaaacctaacccattttttaattgcactatcgatggcgacagatcaatagtttaacatatgttttgtcactattcatctaatatatgaataaccataaagattttttatgggaaaaattttctatacatatgttttgtcattatattcatttaacatatgaataaccataaaaaaatggcactataatacttcctccatccacaaaagttacacatatttcacattaaagtttttctaaataagttgttcctatttgtagtctttatgcattcaagacttaaatgagaagataaattaaatgtttgatggagtcatctaaatgctcattggttgcatgcttgcattcactccttacatccaaaataatataatttttcttggtcttgatgacaaaagtaatatgtgtaacttttgtggatggagggagtactatgactttgtttggcaaatgggattgggaaaataatatcccaccctttaaagggcaatattgcatcctaaccattcatccttcacacctcatttaatcctagccattcatccatttccatttcctaatcccacctcccatatcccatttgccaaacacaccctatagtttttccgctccctctctccttttatcttttcccttataagtatgactgtactgatggggaataatttgtagcttgccaatggagtcttagggcctatttagttcacgaaaagataattttttaggtgttgcatctgatgtttgaccggatgttggaaggggttttcggacacgaatgaaaaaactaatttcataactcacctggaaaccgcgcgcgagacgaatcttttgagcataattaatccgtcattagcacatgtgagttactgtagtacttatggctaatcatggactaattaggctcaaaagattcgtctcgcgatttctcccttaactgtacaattattatttttaatctatatttaatgcttcatacatgtgttcaaagattcgatgtgatgtttttggggaaaaaaattggaaactaaaccaggccttaaacctgttgccggcgatacaaagagcgcccttttgtgttgaaatagctactcggtttagattttcagcgccacgtgaaacgattagctgtttctgtgctcattttctttttttttttatcaaagagctcatagcaccttttccgaacatatcatctcgggatggtatcttaaaatcaaggcagagcatttgaacaaattagctagaaccccgggcgttgctgcttaataaaaacaaaacatttaacatatgaataaccttaaagattttttatgggaaaaattttctatacagaacacctataatttacatacaagtagagtcagatgacagagatcaatcacatagggggcagtggctcaacatacagagacgactagttgcatatagtcgggactcaggcgggcaagtggtgggccatctcgttgttggagggggagagcgcgaaccctactctctttccccattgccacttgcggagttgcggtgactagggtgcggggtagggtcgacggtgctaccgtgatgtgttctggctggtggtgctcctgttccacctgctcgtcttcgtcggggcgcttgcggtcactggcctcaaccgcttcgcccaggccgaccgcttcaccaacctcactgctacacatcgcttcactgaatcgctggagcccgtgagggagttgctccagcgcccgacgctcgaggttgaggaggtcaccccactaagctcacggagtcgtagtagccctactatggcaccacggggctgtggggtctattatcgcatgggcatggttggtggcaactattgggagcctaggaggaaagatgcggagagggtggtcatgagggccgccacgcacaacctcaccacgtacctcacggtggtgagcttttttttttctcttccccaaaggtcaaaaaggtaaggtataatcccaagattatatattttattatgcttcatttggttaccatataagttttcttgaatgttatctgagtgactatagttcacatattgttgtaaaaatttaatttcatagatcagtaaagttcattcattgatgttgtttgtcttctaattttcagttgacttagttttgctaagatatagccccccttttttcacttgatctcgctttattccctgtgtagtatatatgtatatgtatgtttctatctccgttatctcctctcaagaagataatcaatttcttctactctaattctcttgtacaatgggtactagaaaaattacaatgtaaccattgaaatttatagtgtcatattggtgtagatgtagtttacagtataaaaaatttgactggtttttagaacaatatgacaaaaaaatatggctagtccctagtttaatttggcccaatagtttagacgcggttatgaaacaacatatatagaataaaacgtgaattgtacatgcagtattgctagtctcactaaaagaacagtagctccatggagaaataaacccgcaacaccagtcatgtaattccaaaagtagaaagatacatacaaagtgcggctggtgttacccctctctgtacattgttcaataagtagcacatttggaagcaactcagcagaaacatcatatcaccacatgcgtatacaatggcacaaagaatatgcatgtctgaagatcaaaagcctaaagagctaactttaatgttcacaccctcctgacactctttccatactccttcctgatctcccacagctgctctccaacttctttcatggtcggacggtcctcccgcgtcggagcggcacactggaatgccaagttcagcagcctttcgagcacctcatcgtccacaggatcctccaacaacggatccaatatctccctcctgttcccttcattgaatttcttgaatgtctgcagaaatacaagttaaagtgtgcccacattctctacttatggacaggacagatacaaaagtagagttttgacttgaaacacggttgtaggtaaattctagctagaggttcagttccgctatatttcaaattatcgtgcaaaaaactgaggacagttatggttagatcagaaaaacgagtatgattttaccctcacattttgccagagctgtattaacaatcagtgtcattttagttcatggtaacatatgatcacatccatagtaatagaagtatgcaacaagtgtaacatcactggaattaattgcaaagaattggtatcaaagaagaagccattgaacatacccatctgatagttattctctcttcagcagcccgcttcagttctaccggtcggcgagcagagagaatttccacaagcagtatgccaaaggagaagacgtcgctcttaggagtcaactggtatgttctcagatactcaggatcaaggtagccagcggttccttttacttttgttgagatgtgtgtcttttctgtgtcactggggccacttcttgcaaatccaaagtcagacaccttggcccggtagctctctgtcagcaggatgtttgatgacttcacatcccgatgaattattgtcttctctgttcacatcggagaaattatcagatagcaatacagtattattaaaatcaaacttcatcaaaataaaaagtgtgaatttcataaaaccgcagcaatagcaaatgatttcatcaatatgaaattttctcccttatgtgtgtatggcatgtgggcccgatttgcataaagcatgtgtacgtcatgtgtatgataggtggggccaaaattgtagagatataaagttacagctttttgataaaatcgtatgctattgttgcagttctctgaaatgcttagctaaaccatactgatagttttgacaaaatagttgtagctttctgaaatttactcaaatacaaatatagaaaattggcactagtgttatttcaaaatagaaattatgcaaccaaattaacaaggaaaaagtctaatagatcctctaaactataaaccatcccaggaaacttctgatctatgcaaaaacatttaaataactcctttagaggggtcttcaaggtggtttgccacttcggcatctgatgtggtagaaaatgtgtatggacttcgcaaaattcataaaaataaatttccttgcatattcagattgcatgtgatagaaataaataaagggagagagaataggtcatcttctttgctacacagggcatgatgatcgacccgcactgtggagagaactcgagatggccaaaaaggaatgctcactacacaaggaacttaatggtgctggtgatttagtagtccgatgggcattagagttgtgctggcaggcacatctctatagaaggtatagatgagcgcatcacatcaatattgatccaaggaaaaacagagatggcttaccagcatatagatgaagataagtcagtgcatgtgcaacatcaattgcgatttcgagacgctgattaaaatccagggttcttccatattggcctgcagaatgcagaaatatttattaatatggaaatttggaaacacacaaatggcaatgaagagaataaatcagaaagtgcaatgtaccatcaagatgctccctcagagtgccatttggaacatactcagtgataatgatacgttcatgtcccttatcagtaaatcccagcaacctcaccaaattccggtggtcaatcttagcaagcaattctacttcattgctaaactcatctctgggacctgcgaattgatcctgtgcacaaaaaatagtcaaacccattagcaggcagtaaaccaaatacttcgtctggtcataaatacttgatgttttggataggatctgactatcagcgacttctaataaagtactaagtttgaaaacataaaaatggtacgtagatttatcctgaaatgtaatttcataacatcataaacttattgttggcaacttttttttgacaagaagacaatcacgatcgggacacctaaacgccttgcggtgatatggaatcgccaaccaccccaatctagccaaaagacaaatcaagatgggttttgtagaaaaaaaagctaaaccggccagcggagccgatttagagatcaaaatcagcctctaagctgatttagatcgatatgaggataactgcccgtctcgtgggcaaacggaaggtttacgggacaaacctacaaaggggtaattgcactctcgagcgacggcagacgatttacggcgcaaatcgacaaagatgaactaaaactagagtaaagtagaaaacatggctaaagtaaagataaaagaacgattcgattgtgtttgaggaagagaaatatctcgatcaaaccggccttgtcccttagataggggttggtcttgcctcctacaagtcctccacgtccaactcggggtagaaaccaatggaaacccgaaacatgccttcccgagcaaggaaacccgagacccgacgaaaaacagactcgggctcggactcagccggtctgaccggcggcacgcaccgccggtcagaccggccctcaagcaacggtctgaccggccaacatacggcggtctgaccggccctgtggaggaaaccggcaatttttccaaatcttggcaataattccttaatttgaacctaggtgccaaatttgggtgtaaacacttacaatattatataaatttattctcatataaaattatgggtaaggcaccttgaggaccacgaaaaaaaaaatcaaacatcattttttacctgagggagtaacttaatccaaatcctaagagcagtgtattcacccatagatattctaattaaccccaacatagtgatataaaaggagcaacgtgtaccagtggtccttaaacttgccgaatagtgtcatccaggtccctacactttcaaattgcagatttaggcctttatagttgtttaacgtaccatcatgagtccaaatgtgcccataccctcttcaagagcctatgtggcatgctaacttggagctgacgtgacatacaagatgacatgagcagtgtagaagggaatatatgcatatatcccatctataccaagctcacacatagcttatgtgttcccacacaccatgtcggctctaagttggcatatcacatcgctctctagagagttatgataaacaagtttaagaacctaaatctgcaatttaaaagtttagtggcatgactgacactgtaagagggccgctagtgtactttacgcattggccctgttcttttcagcttattcaccagatcatttgctccacgcttcggaaaacacagtttctttaaaattcttttaccgcattgcctagaccacttatttcaaaccatttgttaaatttatttcttaaaatatttaatttatcactataatagagtagataatctgcgcaataatccattcataatctaaatc
